United States Patent Application Publication US 2023/0026259 A1 - sequence listing, part 82

SEQ ID NO: 187133 - DNA, 9930 bp, Homo sapiens
  Payload ID: 16842
  Gene Symbol: SMC1A
  Gene Name: structural maintenance of chromosomes 1A
  ENST ID: ENST00000375340
  CDS Start-End: 341-3976
aggcctggacgtattctcgcgacatttgccggtcgcccggcttgcactgcggcgtttcccgcgcgggctacctcagttctcgggcgtacggcgcggcctgtcctactgccgccggcgccgcggccgtcatggggttcctgaaactgattgagattgagaactttaagtcgtacaagggtcgacagattatcggaccatttcagaggttcaccgccatcattggacccaatggctctgcccagcgtcctctctcgcctcgcattggtacactccaactcctttctactcttctctggaggcggcacttttgaatttcagacccagcgctccagtctttagaatgcttgaggtgtcgatccccaccccccaccgctatgtcagaggtaagtcaaatctcatggatgccatcagctttgtgctaggtgaaaaaaccagcaacctgcgggtaaagaccctgcgggacctgatccatggagctcctgtgggcaagccagctgccaaccgggcctttgtcagcatggtctactctgaggagggtgctgaggaccgtacctttgcccgtgtcattgtaggaggttcttctgagtacaagatcaacaacaaagtggtccaactacatgagtacagtgaggaattagagaagttgggcattctcatcaaagctcgtaacttcctcgttttccagggtgctgtggaatctattgccatgaagaaccccaaagagaggacagctctatttgaagagattagtcgttctggggagctggcgcaggagtatgacaagcgaaagaaggaaatggtgaaggctgaagaggacacacagtttaattaccatcgcaagaaaaatattgcggctgaacgcaaggaagcaaagcaggagaaagaagaggctgaccggtaccagcgcctgaaggatgaggtagtacgggctcaggtacagctgcagctctttaagctttaccataatgaagtggaaattgagaagctcaacaaggaactggcctcaaagaacaaggagatcgagaaggacaagaagcgtatggacaaggtggaggatgaactgaaggagaagaagaaggagctgggcaaaatgatgcgggagcagcagcagattgagaaggagatcaaggagaaggactcagaattgaaccagaagcggcctcagtacatcaaagccaaggagaacacctcccacaaaatcaagaagctggaagcagccaagaagtctctgcagaatgctcagaagcactacaagaagcgtaaaggtgacatggatgagctggagaaggagatgctgtcagtggagaaggctcggcaggagtttgaagaacggatggaagaagagagtcagagtcagggcagagatttgacgttggaggagaatcaggtgaagaaataccaccggttgaaagaagaagccagcaagagagcagctaccctggcccaggagctggagaaattcaatcgagaccagaaagctgaccaggaccgtctggatctggaagaacggaagaaagtagagacagaggccaagatcaagcaaaagctgcgggaaattgaagagaatcagaagcggattgagaaactggaggaatacatcaccactagcaagcagtccctagaagagcagaagaagctagagggggagctgacagaggaggtggagatggccaagcggcgtattgatgaaatcaataaggagctgaaccaggtgatggagcagctaggggatgcccgcatcgaccgccaggagagcagccgccagcagcgaaaggcagagataatggaaagcatcaagcgcctttaccctggctctgtgtacggccgcctcattgacctatgccagcccacacaaaagaagtatcagattgctgtaaccaaggttttgggcaagaacatggatgccattattgtggactcggagaagacaggccgggactgtattcagtatatcaaggagcagcgtggggagcctgagaccttcttgcctcttgactacctggaggtgaagcctacagatgagaaactccgggagctgaagggggccaagctagtgattgatgtgattcgctatgagccacctcatatcaaaaaggccctgcagtatgcttgtggcaatgcccttgtctgtgacaacgtggaagatgcccgccgcattgcctttggaggccaccagcgccacaagacagtggcactggatggaaccctattccagaagtcaggagtgatctctggtggggccagtgacctgaaggccaaggcacggcgctgggatgagaaagcagtagacaagttgaaagagaagaaggagcgcttgacagaggagctgaaagagcagatgaaggcaaaacggaaagaggcagagctgcgtcaggtgcagtctcaggcccatggactgcagatgcggctcaagtactcccagagtgacctagaacagaccaagacacgacatctagccctgaatctgcaggaaaaatccaagctggagagtgagctagccaactttgggcctcgcattaatgatatcaagaggatcattcagagccgagagagggaaatgaaagacttgaaggagaagatgaaccaggtagaggatgaggtgtttgaagagttttgtcgggagattggtgtgcgcaacatccgggagtttgaggaagaaaaggtgaaacggcagaatgaaatcgccaagaagcgtttggagtttgagaatcagaagactcgcttgggcattcagttggattttgaaaagaaccaactgaaggaggaccaagataaagtacacatgtgggagcagacagtgaaaaaagatgaaaatgagatagaaaagctcaaaaaggaggaacaaagacacatgaagatcatagatgagaccatggctcagctacaagacctgaagaatcagcatctggccaagaagtcggaagtgaatgacaagaatcatgagatggaggagattcgtaagaaactcgggggcgccaacaaggaaatgacccatttacagaaggaggtgacagccattgagaccaagcttgaacagaagcgcagtgaccgtcacaacttgctacaggcctgtaagatgcaggacattaagttgccactgtcaaaaggcaccatggatgatattagtcaggaagagggtagctcccagggggaggactcagtgagtggttcacagagaatttccagtatctatgcacgagaggccctcattgagattgactacggtgatctgtgtgaggatctgaaggatgcccaggctgaggaagagatcaagcaagagatgaacacactgcagcagaagctgaatgagcagcagagtgtgcttcagcgtattgccgcccccaacatgaaggccatggaaaagctggaaagtgtccgagacaagttccaggagacctcagatgagtttgaagcagcccgaaagcgagcaaagaaggccaagcaggcattcgaacagatcaagaaggagcgctttgaccgcttcaatgcttgttttgaatctgtggctaccaacattgatgagatctataaggccctgtcccgcaatagcagtgcccaggcattcctgggccctgagaaccctgaagagccctacttggatggcatcaactacaactgtgtggctcctgggaaacgcttccggcctatggacaacttgtcaggcggggagaagacagtggcagctctggccctgctctttgccatccacagctacaagccagcccccttcttcgtcctggatgagattgatgctgccttggataacaccaacattggcaaggtggcaaattacatcaaggagcagtcgacttgcaacttccaggccatcgtcatctctctcaaggaggagttctacaccaaggccgagagcctcattggagtctatcctgagcaaggggactgtgtgatcagcaaagtcctgaccttcgacctcaccaagtacccagatgccaaccccaaccccaatgagcagtagcagtatttttgccctcccgccctgtctggatccctaagctgtccctctcccaatctctggatatttgactcccaaccttccccctacctcctggccctttttggtgtagtcatgggatttaggcactgctaatcaagcatgaagaggaacagaggtgatgttaggtctggagcaaaaattcctgaacgacagggagtattctggcctctgaaaggaggtgctgagctgaacagggccatctgttcatcacacacacccccttcctccccctcatcacccataatcgtgggccccttgggcctcttgcccactgtgtgtgtgggtatgtatgtgtgtatgtatgtatccgcatgtgtgcatgtgagtatgtttgcaaaataataaaggatattggagacctgttttagaaggagcctaggctgaatttgattccaagagagcttaggatgacagcacccctgagctgggcaaaggtactcaggacctcataggagtcttaggcagttacctgaaactgccttcattcactcatttgtgtattcattcatttatgtattcatcagacacataccgaacaccctctatttgtcaggctctgtgcttggaatacagagttgaatcagacatgatctctaccctcctagtaaggagatacagtgggttcatgaatgactatagttagctgaatgtcatatgtactttgaatttgagaagtgggtgatcccctctaggcttcctggaggtcacatttaagctagaccttgacaaattggtaggatttggtcaggcactaggagtggagcatgagctctggggacagacagttatgggttctggtcccactttttatcacttactagttgtttgaccttgggcaagtcatttgaccttctgtgcctcagtttcctcatctgtaaaatggggctaacaatattacctacctcataggatttaatgatgtcaagctcctcactggaggccttatcccttcgtggagcccactaggtgccgacccctcagaatataaccctcatgcctggacccctgagagcttctgatcccagctattagggacagaagaagcctccaaatctggaaggtgctgaatgccctgctgactgggaaagtttcagggcactgatggggtctacctggtaagcggagggcctgaggaaacctgtagcttcaatcatgtctggtaaccgggtgcctgagccccaatctgggttgtgaggaaataggggagaggtatcctgggccacatcccagcctaacacctgtgaggttcattttaggaactaacctcattagctataaggatcatgcagaggcagcaaagccgggtgcgatgagctcagcctttactcattcacatacaccatcacactttaattccaatctgtatattgctttttaaaagttaagtccattctaattacccaaatatgcatgaattcattctccttttgagaagttagattgttaaagatagtctcattcagctaccaaccactccttgatccttcccttcttagtggctgttgtttgttgtacttccgtttagactttgttttaatgcttgtacgtacatatgtgaactcattggaaatattgtgtgtttaatgcaaatgatatattgaattgtttagcaatttgttttctttgcttaacgatgtttttgagatctgtgcatgttacttaatgtagctcaatccatcttctgtaattgctgtatagattgtcatcatatgattaccacattttacttacgcatttcttttgtgatggacattaagactgtttttaggttttgctattacaaaatactacacaggagcatcactatgcctgtgtgaaagtatatgtatgaaagtttacctagggttgattcctagaagtggaattgcaaagtcataggatatttatatattggtttttaataatacttccaaattgccctcctgtactatttactcagtatttttcttgaggttgatctgaggtctaacattgttatcctatatcattttcatcccaagtagtgatatctgtgaaatcacaggtttgatgtgtgctaattatgtattcttctaatacatattaaaagacataactatcaaaacaaaataaatttgtctgttttcaaccaaagaagtcacgtaccactggtggtactgtgtgccataatttggcaaatgctggcctttatggacgagcacaattcgggggtcagacctggttcaaattctagctgtagaaacttgtgcaagttacttcacctctgagcctaagtttccacatctgtaaaaggagataataaacacctaccttgcagtagtgaagcaaagagaaaattaaatatatatgaagcaatttggctggcatctagatcattcacagccctttaaaggtcacctttgctgttctccccactttacagataaggaaactgaggcccaaaaaggtttgaacccaggtcttccaagtcattcaagtgctttctccactgtacaggtggttatcaaccttggctgcgcatcagaatcgtttgtaaagctttttctttttcctttttaaaaagtaaagcaatatatacacaggtaaaaaaataaaatagtacagaagggcttataatgagaagcagcagttccctgcttgcacccccacatccaaaggatgtggagctctttaaaaataaattgctctggtcccacctctggaaatctgattcagccagcatggataataacccagataactaacccctacctcacaggataaaaaggattacatgagatgccttaggctaaggccctggcacacaggaacacatgtgctacaaaggagctttggggacttaagtcctgaggatccaggaggtgaggtgacttgtccaagattccactggtttagtggcagagcctagacttccactcggatctatttagtgcttgccccctgctctctcctgtcgtgccccaccacctcctggcatcacagggcaaccgttgtcaaggctatgctcacgggaggctgggcaccacagtgtttccaagagcaagctggatccgagtagattccctagggcttgttggaggaactagtttgactcccttatactgtggacgcagtagccttgctgtagggagttgaagagtactccacaacagtatcttaagtttaactgggcacttccctctggaaatcacagtgttgtgcaccaggaacacaaagatgagtcaaatctttatcctgcctttgaggagctcactgtttagttggggaaaccatttgtaaaacagccattaaccatacagtgtgatcaacactgacaggagcacaggaaaaacatctagcttatgtgaagattcagagaaggcatcctgtagtctaggtggtgatacctgaactgagtcttgagggacgggtaggaattagccagttgaggaagtagaaggaatttccagatattggaaacagtatgcatgaagacatgaaggcaagaaacagcaaaacaaatactgaagcatgaagattcctggggtggggggaaagcagcaagaaaaggtagagaggaaccagattggaagagggtcgtaaatgcatggctacagaattcagatttgttttgtaggacagtgtggttcccaaactggctgtataccacaaacaggtacggcattctgggccccggcccctaaaacattcattaagtctggggtgaagatttggaatcttgaatgcttataaaggttaccacatgactagggtacagccagatttggaaaccatagcttgaaggcagtgagggagccatgaaatggtttttaatagggggactccagatcagatgtgaacttaacctgtttctggctggctagccaaccagcatggaaaacagattaggttagatgttcatgctgtatgtgcccgtgcctgtagcttccctgttaatcagcttcttacactactatatttgcttattttgtctctgaataagctttaggcaccacaagggtgggcctggggatattttgcttaccagtatagcccctgcaaaaaagcacagtgcctgacacaaaacaggcacccagtaaagtttttgaatgaatgaatgcatgagtgaatccatttgtgagagagcgaatggagatgacaagattagctaggagactggaaaaagaccaggaggcctgcactagggcaaaggccagtaggaatagattggaggtgttaaggtgtgaactgttaaggtaagatgataacttaatgactgattattggatgtggagggtgactgagaggatagaatgagtacccatgaatagccatgattcctaccctgtcccagtcatctctttccttatccatctctgaaacaatctgcttacatcctcctcagcaactggaattcctcaagttagttagacattctgtgtgctgtgtggtctctcactgcccccccactccccacccctccacaagccattgattcattcatccagttcaataaatcttggctaagcacctccagtgtgcagtaaggctcttccaagccaggactctgactccctctttcctacctcaagagatgtttttgagggctttcccaggtaagagtcacatctcttatacaataacttatagtgagatacccagaatgtcagacttgtaagggaagactgcccaaaccccttctgaggtcctcagaggggaattaacttcctaaggtccgactgctaggaagtgttggagccagaaatggaagctaggtttcctttctatgtcatctctggagtcttgatcttgatctatcccattgtagatcaggacaggcagaggtggtcagggagaaggtgggacttaggttgaaccttgaaggtcaatgtattggacaggtcaaacaagatggttgccaattacactgcccccttctggaaacccttagcaaacctgccatgcttgcagtcccttctaaggggtttccttagcataagttgccatgctctgtaccatgtgacctcacaatcctggccacagatagctagatgtggatagtgtctggttcaagggcaaccaatctctaggctggccagtggcctgttagctggactggcataaggacttcaccttacaggggtggcatgtatcaaatggcaaatgtatgaaacaaccagatctttcagggaggcagaatgtgagctattcagaagaagtgaacgttaattagaatttaatgaggcattagtggtggtggatgaggggtggccagaaactaaacagcaaaagcaaagagaaagctgcagaaaccataagtaagcagaggtcatgagacatttgtataatgagatcacggagccacagggtggcagaagccatgaagcagcaaggcaacaatgggctagaagccatgaagcaataggagccacgaggaacagaaaccgtgagacaaaactgactatgagatccacaaagcagcagaaggcttgaatagataagatcatgagacagtagaagcgatgagactgcaagaaccacaaggtagccagaaccatgtggcaacatggcaacaggaatggaagaggcagcaggagctacaatgcagaaaagccatggattaataggaactgaagcgccgggagccatgaagctgcaggacccatgaggcagaaaaagccatgggctagcatcgaggggggcagaaagaagttagtcagtagcagtaggaggagtataaatacagccagaaaggagttgagtcaccaatttgggaagcactagagaagggagcaacagatgcctgcagctgagggggtgacaagataagccaggctctagagctgctttggatcatgaaccattttcaagtttctgttcttccatgaggctgcctgtgtagctgttcttgtcttccttatttccctgtgaatgctttaataaatccccatcactaa

SEQ ID NO: 187134 - DNA, 868 bp, Homo sapiens
  Payload ID: 16842
  Gene Symbol: SMC1A
  Gene Name: structural maintenance of chromosomes 1A
  ENST ID: ENST00000428014
  CDS Start-End: 81-868
attggtacactccaactcctttctactcttctctggaggcggcacttttgaatttcagacccagcgctccagtctttagaatgcttgaggtgtcgatccccaccccccaccgctatgtcagaggtaagtcaaatctcatggatgccatcagctttgtgctaggtgaaaaaaccagcaacctgcgggtaaagaccctgcgggacctgatccatggagctcctgtgggcaagccagctgccaaccgggcctttgtcagcatggtctactctgaggagggtgctgaggaccgtacctttgcccgtgtcattgtaggaggttcttctgagtacaagatcaacaacaaagtggtccaactacatgagtacagtgaggaattagagaagttgggcattctcatcaaagctcgtaacttcctcgttttccagggtgctgtggaatctattgccatgaagaaccccaaagagaggacagctctatttgaagagattagtcgttctggggagctggcgcaggagtatgacaagcgaaagaaggaaatggtgaaggctgaagaggacacacagtttaattaccatcgcaagaaaaatattgcggctgaacgcaaggaagcaaagcaggagaaagaagaggctgaccggtaccagcgcctgaaggatgaggtagtacgggctcaggtacagctgcagctctttaagctttaccataatgaagtggaaattgagaagctcaacaaggaactggcctcaaagaacaaggagatcgagaaggacaagaagcgtatggacaaggtggaggatgaactgaaggagaagaagaaggagctgggcaaaatgatgcgggagcagcagcagattgagaaggagatcaa

SEQ ID NO: 187135 - DNA, 838 bp, Homo sapiens
  Payload ID: 16842
  Gene Symbol: SMC1A
  Gene Name: structural maintenance of chromosomes 1A
  ENST ID: ENST00000470241
  CDS Start-End: 1-838
aaatgacccatttacagaaggaggtgacagccattgagaccaagcttgaacagaagcgcagtgaccgtcacaacttgctacaggcctgtaagatgcaggacattaagttgccactgtcaaaaggcaccatggatgatattagtcaggaagagggtagctcccagggggaggactcagtgagtggttcacagagaatttccagtatctatgcacgagaggccctcattgagattgactacggtgatctgtgtgaggatctgaaggatgcccaggctgaggaagagatcaagcaagagatgaacacactgcagcagaagctgaatgagcagcagagtgtgcttcagcgtattgccgcccccaacatgaaggccatggaaaagctggaaagtgtccgagacaagttccaggagacctcagatgagtttgaagcagcccgaaagcgagcaaagaaggccaagcaggcattcgaacagatcaagaaggagcgctttgaccgcttcaatgcttgttttgaatctgtggctaccaacattgatgagatctataaggccctgtcccgcaatagcagtgcccaggcattcctgggccctgagaaccctgaagagccctacttggatggcatcaactacaactgtgtggctcctgggaaacgcttccggcctatggacaacttgtcaggcggggagaagacagtggcagctctggccctgctctttgccatccacaggtggcaaattacatcaaggagcagtcgacttgcaacttccaggccatcgtcatctctctcaaggaggagttctacaccaaggccgagagcctcattggagtctatcctgag

SEQ ID NO: 187136 - DNA, 880 bp, Homo sapiens
  Payload ID: 16842
  Gene Symbol: SMC1A
  Gene Name: structural maintenance of chromosomes 1A
  ENST ID: ENST00000463684
  CDS Start-End: 70-234
cgcgcgggctacctcagttctcgggcgtacggcgcggcctgtcctactgccgccggcgccgcggccgtcatggggttcctgaaactgattgagattgagaactttaagtcgtacaagggtcgacagattatcggaccatttcagaggttcaccgccatcattggacccaatggctctgggtgctgtggaatctattgccatgaagaaccccaaagagaggacagctctatttgaagagattagtcgttctggggagctggcgcaggagtatgacaagcgaaagaaggaaatggtgaaggctgaagaggacacacagtttaattaccatcgcaagaaaaatattgcggctgaacgcaaggaagcaaagcaggagaaagaagaggctgaccggtaccagcgcctgaaggatgaggtagtacgggctcaggtacagctgcagctctttaagctttaccataatgaagtggaaattgagaagctcaacaaggaactggcctcaaagaacaaggagatcgagaaggacaagaagcgtatggacaaggtggaggatgaactgaaggagaagaagaaggagctgggcaaaatgatgcgggagcagcagcagattgagaaggagatcaaggagaaggactcagaattgaaccagaagcggcctcagtacatcaaagccaaggagaacacctcccacaaaatcaagaagctggaagcagccaagaagtctctgcagaatgctcagaagcactacaagaagcgtaaaggtgacatggatgagctggagaaggagatgctgtcagtggagaaggctcggcaggagtttgaagaacggatggaagaagagagtcagagtcagggcagagatttgacgttggaggagaatcag

SEQ ID NO: 187137 - DNA, 4201 bp, Homo sapiens
  Payload ID: 16843
  Gene Symbol: SMC1B
  Gene Name: structural maintenance of chromosomes 1B
  Uniprot ID: Q8NDV3
  ENST ID: ENST00000357450
  CDS Start-End: 1-3708
atggcccacctggagctgctgcttgtggaaaatttcaagtcgtggcggggccgccaggtcattggccccttccggaggttcacctgcatcatcggccccaacggctctggaaaatctaatgtaatggatgcacttagttttgtaatgggagagaaaatagctaatttaagagtgaaaaatattcaagaactcattcatggagcacatattggaaaacctatttcttcttctgcaagtgtaaaaattatatatgtggaggaaagtggcgaagagaaaacatttgcaaggattatccgagggggatgctcagaatttcgctttaatgataatcttgtgagtcgttctgtttacattgcagagttggaaaagataggcataatagtcaaagcacaaaattgtttggtttttcagggaactgtagagtcaatttcagtgaagaaacccaaagaaaggacccagttttttgaggaaatcagcacttcaggagagcttataggagaatatgaagaaaagaaaagaaagttacaaaaagccgaagaggatgcacagtttaactttaataagaaaaaaaatatagcggcagagcgcagacaagcaaaattagagaaggaagaggcagaacgttaccagagtctccttgaagaactgaaaatgaacaagatacaactgcagctttttcaactataccataatgagaaaaagattcatctcctgaacaccaagttagagcatgtgaatagggatttgagtgtcaaaagagagtctttgtctcatcatgaaaacatagttaaagccaggaaaaaggaacatggaatgctaactagacaactacaacaaacagaaaaagaattaaaatcggttgaaacccttttaaatcagaagaggcctcagtacattaaagccaaagaaaacacttctcaccaccttaagaaattagatgtggctaagaaatcaataaaggacagcgaaaaacaatgttctaaacaggaagatgatataaaagccctggagacagagctggctgatttagatgctgcatggagaagttttgaaaagcagattgaggaagaaattttacataaaaagcgagacattgaactggaagccagtcagctggatcgttataaagaacttaaggaacaagtaagaaagaaagtagctacaatgactcaacaactggaaaaactgcagtgggaacagaagacagatgaagaaagactggcatttgaaaagaggaggcatggagaagttcagggaaatctaaaacaaataaaagaacaaatagaagatcataaaaaacgaatagagaagttagaggagtatacaaagacatgcatggattgcttgaaagagaaaaaacagcaagaggaaaccctagtggatgaaattgaaaaaacaaaatcaagaatgtctgaagttaatgaagaattgaatcttattagaagtgaattgcagaatgctgggattgatacccatgagggaaaacgtcagcaaaagagagcagaggttctggaacaccttaaaagactgtacccagattctgtgtttggaagactatttgacctgtgtcatcctattcataagaaataccagctggctgttactaaggtttttggccggttcatcactgccattgttgtagcctctgaaaaggtagcaaaagattgtattcgatttctgaaggaggaaagagctgaacctgagacattcctcgctctagattaccttgatatcaagccaatcaatgaaagactaagggagcttaaaggctgtaaaatggtgattgatgtcataaagactcagtttcctcagctgaagaaagtgattcagtttgtgtgtggaaatggtcttgtttgtgagactatggaagaagcaaggcatattgcactcagtggacctgaaagacagaaaacagtagctcttgatggaacattatttttaaaatctggagtgatctctggagggtcaagtgacttaaaatacaaggctagatgctgggatgagaaagagttaaagaatctaagagacagacgaagccagaaaatccaagagctaaagggtttaatgaagacactccgcaaagaaacagatttgaaacaaatacagaccctgatacagggaactcaaacacgactcaaatattcacaaaatgaactagagatgattaagaagaagcaccttgttgctttttaccaggaacaatctcagttacaaagtgaactactaaatattgagtctcaatgtattatgttgagtgaaggaatcaaggaacgacaacgaagaattaaagaatttcaagaaaagatagataaggtagaagacgatatcttccaacacttctgtgaagaaattggcgtggaaaatattcgtgaatttgagaacaaacatgttaaacggcaacaagaaattgatcaaaaaagattagaatttgaaaaacaaaaaactcggcttaatgttcaacttgagtatagtcgcagtcaccttaagaagaaactgaataagatcaacacattaaaagaaactatccagaaaggtagtgaagatattgatcacctaaagaaggctgaagaaaactgtctgcagacagtgaatgaactcatggcaaagcagcagcaacttaaggacatacgtgtcactcagaactccagtgccgagaaagttcaaactcaaattgaagaggaacggaagaagtttctggctgttgatagggaagtggggaaattgcaaaaagaagttgtaagtattcaaacttctctggaacagaaacgattagagaagcataacttgctgcttgattgcaaagtgcaagacattgagataatccttttgtcggggtcactggatgacatcattgaagtggagatgggaactgaagcagaaagtacccaggcaacaattgatatctatgaaaaagaagaagcctttgaaatagactacagctctctaaaagaggatttgaaggctctacagtctgatcaagaaatcgaggcccaccttaggctcttattgcagcaagtagcatcccaggaagatatcttactgaaaacagcagccccaaacctacgagcactggagaacttaaagactgtcagagacaagtttcaagagtccacagatgcttttgaggccagcagaaaggaagccagactgtgtaggcaagagttcgagcaagtgaaaaaaaggagatacgatcttttcacccagtgttttgagcatgtctcaatctcaattgatcaaatctacaagaagctctgcagaaacaacagcgcccaagcatttcttagcccagagaaccctgaagaaccttacttggagggaattagctataactgtgtggccccaggcaaacggtttatgccaatggacaatttgtcagggggagaaaagtgtgtggcagccttggctctcctgtttgctgtgcacagttttcgtcctgccccattctttgttttagatgaagtggatgcagccctagacaatactaacataggcaaagtgtcaagttacatcaaagagcaaactcaagaccagtttcagatgatagtcatctccctaaaagaagagttctattccagagccgacgcgctgatcggcatctatcctgagtacgatgactgcatgttcagccgagttttgaccctagatctttctcagtatccagacactgaaggccaagaaagcagcaagagacacggagagtcccgctaggggcagtcctgcagcagtcacctgatcactgttcagttcccactctaatactcacacagctcctccacaggagacttctggagcaagcaggaccagcctggtgcaccctttaagagaaaccttagtcgttctagccaaagaggctgtggctcactttagttgagtgttcagacctcattctagtagggaaagttttcagtgagagctggtgtcaaatgagtttttaaaaaacaaacaaaaggtacaattttgtactataattctaacttctattttgaaataagctagtttggttggaaaaattttgaattcagcttcatcttcactctgatcttgccttgcacccaagtaatcttgaagggaacttctcttggtttttaaacatactagttataagattgttaataaactgttgaacctggcttttgggaaattgtttcagagaaactatgttagtattgaaaatatcaataaaaaatgttctaatttcaaa

SEQ ID NO: 187138 - DNA, 3636 bp, Homo sapiens
  Payload ID: 16843
  Gene Symbol: SMC1B
  Gene Name: structural maintenance of chromosomes 1B
  Uniprot ID: Q8NDV3
  ENST ID: ENST00000404354
  CDS Start-End: 53-3538
cgctttttccgcgggcgcttgataacgcgggtgaggcgtggagggcggcgccatggcccacctggagctgctgcttgtggaaaatttcaagtcgtggcggggccgccaggtcattggccccttccggaggttcacctgcatcatcggccccaacggctctggaaaatctaatgtaatggatgcacttagttttgtaatgggagagaaaatagctaatttaagagtgaaaaatattcaagaactcattcatggagcacatattggaaaacctatttcttcttctgcaagtgtaaaaattatatatgtggaggaaagtggcgaagagaaaacatttgcaaggattatccgagggggatgctcagaatttcgctttaatgataatcttgtgagtcgttctgtttacattgcagagttggaaaagataggcataatagtcaaagcacaaaattgtttggtttttcagggaactgtagagtcaatttcagtgaagaaacccaaagaaaggacccagttttttgaggaaatcagcacttcaggagagcttataggagaatatgaagaaaagaaaagaaagttacaaaaagccgaagaggatgcacagtttaactttaataagaaaaaaaatatagcggcagagcgcagacaagcaaaattagagaaggaagaggcagaacgttaccagagtctccttgaagaactgaaaatgaacaagatacaactgcagctttttcaactataccataatgagaaaaagattcatctcctgaacaccaagttagagcatgtgaatagggatttgagtgtcaaaagagagtctttgtctcatcatgaaaacatagttaaagccaggaaaaaggaacatggaatgctaactagacaactacaacaaacagaaaaagaattaaaatcggttgaaacccttttaaatcagaagaggcctcagtacattaaagccaaagaaaacacttctcaccaccttaagaaattagatgtggctaagaaatcaataaaggacagcgaaaaacaatgttctaaacaggaagatgatataaaagccctggagacagagctggctgatttagatgctgcatggagaagttttgaaaagcagattgaggaagaaattttacataaaaagcgagacattgaactggaagccagtcagctggatcgttataaagaacttaaggaacaagtaagaaagaaagtagctacaatgactcaacaactggaaaaactgcagtgggaacagaagacagatgaagaaagactggcatttgaaaagaggaggcatggagaagttcagggaaatctaaaacaaataaaagaacaaatagaagatcataaaaaacgaatagagaagttagaggagtatacaaagacatgcatggattgcttgaaagagaaaaaacagcaagaggaaaccctagtggatgaaattgaaaaaacaaaatcaagaatgtctgaagttaatgaagaattgaatcttattagaagtgaattgcagaatgctgggattgatacccatgagggaaaacgtcagcaaaagagagcagaggttctggaacaccttaaaagactgtacccagattctgtgtttggaagactatttgacctgtgtcatcctattcataagaaataccagctggctgttactaaggtttttggccggttcatcactgccattgttgtagcctctgaaaaggtagcaaaagattgtattcgatttctgaaggaggaaagagctgaacctgagacattcctcgctctagattaccttgatatcaagccaatcaatgaaagactaagggagcttaaaggctgtaaaatggtgattgatgtcataaagactcagtttcctcagctgaagaaagtgattcagtttgtgtgtggaaatggtcttgtttgtgagactatggaagaagcaaggcatattgcactcagtggacctgaaagacagaaaacagtagctcttgatggaacattatttttaaaatctggagtgatctctggagggtcaagtgacttaaaatacaaggctagatgctgggatgagaaagagttaaagaatctaagagacagacgaagccagaaaatccaagagctaaagggtttaatgaagacactccgcaaagaaacagatttgaaacaaatacagaccctgatacagggaactcaaacacgactcaaatattcacaaaatgaactagagatgattaagaagaagcaccttgttgctttttaccaggaacaatctcagttacaaagtgaactactaaatattgagtctcaatgtattatgttgagtgaaggaatcaaggaacgacaacgaagaattaaagaatttcaagaaaagatagataaggtagaagacgatatcttccaacacttctgtgaagaaattggcgtggaaaatattcgtgaatttgagaacaaacatgttaaacggcaacaagaaattgatcaaaaaagattagaatttgaaaaacaaaaaactcggcttaatgttcaacttgagtatagtcgcagtcaccttaagaagaaactgaataagatcaacacattaaaagaaactatccagaaaggtagtgaagatattgatcacctaaagaaggctgaagaaaactgtctgcagacagtgaatgaactcatggcaaagcagcagcaacttaaggacatacgtgtcactcagaactccagtgccgagaaagttcaaactcaaattgaagaggaacggaagaagtttctggctgttgatagggaagtggggaaattgcaaaaagaagttgtaagtattcaaacttctctggaacagaaacgattagagaagcataacttgctgcttgattgcaaagtgcaagacattgagataatccttttgtcggggtcactggatgacatcattgaagtggagatgggaactgaagcagaaagtacccaggcaacaattgatatctatgaaaaagaagaagcctttgaaatagactacagctctctaaaagaggatttgaaggctctacagtctgatcaagaaatcgaggcccaccttaggctcttattgcagcaagtagcatcccaggaagatatcttactgaaaacagcagccccaaacctacgagcactggagaacttaaagactgtcagagacaagtttcaagagtccacagatgcttttgaggccagcagaaaggaagccagactgtgtaggcaagagttcgagcaagtgaaaaaaaggagatacgatcttttcacccagtgttttgagcatgtctcaatctcaattgatcaaatctacaagaagctctgcagaaacaacagcgcccaagtgtcaagttacatcaaagagcaaactcaagaccagtttcagatgatagtcatctccctaaaagaagagttctattccagagccgacgcgctgatcggcatctatcctgagtacgatgactgcatgttcagccgagttttgaccctagatctttctcagtatccagacactgaaggccaagaaagcagcaagagacacggagagtcccgctaggggcagtcctgcagcagtcacctgatcactgttcagttcccactctaatactcacacagctcctccacaggagacttctggagcaagcaggaccagcc

SEQ ID NO: 187139 - DNA, 5992 bp, Homo sapiens
  Payload ID: 16844
  Gene Symbol: SMC2
  Gene Name: structural maintenance of chromosomes 2
  Uniprot ID: O95347
  ENST ID: ENST00000286398
  CDS Start-End: 305-3898
cacaggaaataagcaatggaggtggggtcctttgctcgcgccgaaattcaaaggaataaatagttccggcgcgggtgttgagagcggtgtggcaggtgttgtagccgctatggtgaagttcgctttgtagcggccccggctagagagttgttctgttccctgcctttgtgacccggaggagcttttggggtgcgtcaagcccctggcctgaggcagcggtggtggtatttctgtttcgtacagaactggtttgtggcctgtttgattcctgtcagaggtttgctgacccaagacagtatcgaaaatgcatattaagtcaattattctagagggattcaagtcctatgctcagaggaccgaagtcaatggttttgaccccctcttcaatgctatcactggcttaaatggtagtgggaaatccaacatattggactccatctgctttttgctgggcatctccaacctgtctcaggttcgggcttctaatttacaagatttagtttacaaaaatgggcaggctggtattaccaaagcctctgtgtcaatcacttttgataattctgacaaaaagcaaagtcctttaggatttgaggttcatgatgaaatcacagtaacaaggcaggtggttattggtggtagaaataaatatttaatcaatggagtcaatgccaacaacaccagagtacaggatctcttctgttctgttggccttaatgttaacaaccctcactttctcatcatgcagggccgaattacaaaagtattgaatatgaaacctccagagattttatccatgatagaagaagcagctggaaccaggatgtatgaatacaaaaaaatagctgcacagaaaactatagaaaaaaaggaggctaagctgaaagaaattaagacgatacttgaagaagagattactccaaccattcaaaaattaaaagaggaaagatcgtcctacttggagtaccaaaaagtaatgagagaaatagaacatttgagtcgtttatatattgcttatcagtttttgctggctgaagataccaaagtacgctcagctgaggaattaaaagaaatgcaagataaagttataaagcttcaggaagaattgtctgagaatgataaaaaaataaaagcacttaatcatgaaatagaagaattggaaaaaagaaaagataaggaaactggaggtatacttcgatctttagaagatgctcttgcagaggctcagcgagttaatactaaatctcaaagcgcatttgatctcaagaagaaaaatctggcatgtgaggaaagcaaacgcaaagagctggaaaaaaatatggttgaggactcaaaaactttagcagcaaaggaaaaagaggttaaaaagataacagatggactgcatgcccttcaagaagcaagtaataaagatgctgaagctctggcagctgcacagcagcacttcaatgctgtttccgctggcctgtccagtaatgaagatggagcagaagcaactcttgctggtcaaatgatggcctgtaaaaatgatataagtaaagctcagacagaagccaaacaggctcagatgaagttgaagcatgctcaacaggaattaaagaataaacaagctgaagttaagaagatggatagtggctacaggaaggatcaagaagctctagaagctgtaaaaagacttaaagaaaaacttgaagctgaaatgaaaaagctaaattatgaagaaaataaagaggaaagccttttggaaaagcgcaggcagctgtctcgtgatattggtagattgaaagaaacatatgaagctctattagccagatttcccaatcttcgatttgcatacaaggatccagagaagaactggaatagaaattgtgtgaaaggacttgtggcttctctgattagtgtgaaagacacttctgcaaccacagctttagaattagtggctggagaacgactctacaatgttgtagtagacacagaagttactggtaaaaagctactagaaaggggggaactgaaacgtcgatacactataattccactcaataaaatttcagccagatgtattgcaccagaaactctgagagttgctcagaatcttgttggccctgacaacgttcatgtggctctttccttggttgaatataaaccagaacttcagaaagcaatggagtttgtctttggaacaacatttgtttgtgacaatatggataatgccaaaaaagtggcctttgataagaggataatgactagaactgtaactctcggaggtgatgtgtttgatcctcatgggacattgagtggaggtgctcgatcccaggcagcttccattttaaccaagtttcaagaactcaaagatgttcaggatgaactgagaatcaaagagaatgagctgcgggctctagaagaggaattagcaggtcttaaaaacactgctgaaaagtatcgccaactaaaacagcagtgggagatgaaaactgaagaggcagatttattacaaaccaagctccagcaaagctcatatcacaagcaacaagaagaattagatgcccttaaaaaaaccattgaggaaagtgaggagactttgaaaaacactaaagaaatccaaagaaaagcagaagaaaaatatgaagtattggaaaataaaatgaaaaatgcagaagctgaaagagagcgagaactgaaagatgctcagaaaaaactggattgtgccaaaacaaaggcagatgcatctagcaagaagatgaaagaaaaacaacaggaagttgaagctatcactctggaactggaagagctcaagagagagcatacatcttacaaacaacagcttgaagctgtaaatgaagctatcaaatcctatgaaagtcagattgaagtaatggcagctgaggtggctaaaaataaggagtcagtaaataaagctcaagaagaggtgaccaagcaaaaagaggtgataacagcccaagacactgtaattaaagctaaatatgcagaagtggcaaaacacaaggagcaaaacaatgattctcagcttaaaattaaggaattagaccacaacatcagcaaacataaacgggaggctgaagatggtgctgcaaaggtatccaaaatgttgaaagattatgactggattaatgcagagagacacctctttggccaacccaatagtgcctatgatttcaaaactaacaaccctaaagaagctggtcagagacttcagaagttgcaagaaatgaaggagaaactaggaagaaatgtcaatatgagagctatgaatgtattgacagaagctgaagagcgatacaatgacttgatgaagaagaagagaattgtagaaaatgacaaatccaaaattcttacaactatagaagaccttgaccagaagaaaaaccaagccctaaatattgcatggcaaaaggtgaacaaggactttgggtctattttttctactcttttgcctggtgctaatgctatgcttgcaccaccagagggtcaaactgttttggatggtctggagttcaaggttgccttgggaaatacctggaaagaaaacctaactgaacttagtggtggtcagaggtctttagtggccttgtcattaatactgtccatgcttctcttcaaacctgctccaatttatatccttgatgaggtagatgcagccttggatctttctcatacccaaaacattggacagatgctgcgtactcatttcacacattctcagttcattgtggtgtcactaaaagaaggtatgttcaacaatgcaaacgttcttttcaaaaccaagtttgtggatggtgtttctacagtagccagatttactcaatgtcaaaatggaaagatttcaaaggaagcaaaatccaaggcaaaaccacccaaaggagcacatgtggaagtttaaactacaaagttatttcttcatcttgacctgtttttttaaatgtaaacttttaaggacttgagataactaatttgtttatatacaaaaattaatgttactgtgttacttaacccatgttttctctttatataatcacttatcgcttacaaatgagcatatattcctcatctcttaactagtctaattatggtccaattattgtggttgtgattttatgcatatcatcaaatgtttttttcttatgcgggtcttttatatattagggatcctgagatacccgattctatatgtaaaagctaatatacaaaaaagcagattaaattacatgataaatgtagctgatcatcagtgtttaattgatttaattcctaaggcaatattaatgtgttttctaaagtcattcaggtaaggaagaattataaatcaggtaactggaccaacaaagggaacacatataaagctattatgcatgcatggagccgtttgaggctagttttttaaggccacaactccagacccctgatttagactgagataggaaacagatcttgaaagaatccttattttaatgatacatgaatatcatgttcctatacgcttaataattggtctctacgttttaatgatacatgaatatcatgttcctatacgcttaataattggtctctacgactttaatgtttttgtttttttaagctgtgtaagtatttttaaatcaaagcttaggaggtgtgttgcgtggtactatctgctgcaaatttatctgaagtttgttaatattttccaagatttttgtcagccttttcataatccagtcattaacaacctattggtaaacaagaatgtaggtgccagtagactaaaccaaatttatttttccctgagtctgatatatatatgtataaatataaataactcaatccatctgttccaccaaaataactcaaaagttggatgattatttgtcttccgctttccagttcaaagggatgaaattcctttagaacttgaaagatgacactagcgaacaccatgagaatactgtctacagtttttggtacgtcatcactagaacagtgaccccaaactgaatcatgaaaggtctgacatgatgtaatctgatcttccatgtgttattttggccccacatctcttcttgattttttagtcttatttccttagtgttattatcatacttcccctgatatatggccgtacttcctggccctgggcttgacatttcccacccttcattctccatacatatgagatgtcagaaaacatgcagtaattgatattatgggacacattggaaaggattgaatctggaattagttctgtccactgtggaggggagaggaaataatgctgtaaatgttgagttacagaaagtccaatgtcaaatatagtttttttgtttcctttcaaatgtattacagactgtgccaaaacagttaccaattcacactgtcaatattaaagtataccatagtatacaaattagtcagtacttgctgttaattttaatatttctgatttaacagttagttattaagtggtacttcattgctgttttagccaacgttttaaaaataatttgggagtttgactattttggcttacgtactcatttccttttctctgctaaaaatgttttgcttgtgtgcgttcctgatttttgtcttgtataatcttgatctttgaaaaccctcaaacatgtattaaattgttgtaactttttttcattagagggaagacattaaggggattggggacatttgtttcacacatctgcagtaatatgagttaactaatatttaacaagctctttctttacattagctgctgttctcatttgtatgtattgtcatatttaatcctcagagtaacctagtgaggtaaatactgttgttgtcagcatggtgtaatcgaggaattgagtgagttgagcagaaaagttaggaaacttgctcagggtgataatacagttaggagtgtcagggcccatggacaaatcttgtcagtctccagaacctaagatatactacgtcactgacagcttgaacatttgtatttattgtacagaataaattt

SEQ ID NO: 187140 - DNA, 4266 bp, Homo sapiens
  Payload ID: 16844
  Gene Symbol: SMC2
  Gene Name: structural maintenance of chromosomes 2
  Uniprot ID: O95347
  ENST ID: ENST00000374787
  CDS Start-End: 337-3930
gggggctgtagggagggggaccagtggcagagggaccttaggtgatccttagaaataaaggctagcttctgttcgaccttggagtagggcgaagaggtgtagacaggcctggagaagcgaggtaaaagcctgagtaaaagcaagaagttggagaatatgagatacatctcatctctagtaaatacttaaatgacttcccctcctcccggagtcaagcacaattcggggatgcaatgacggacgtaggtgaagacactgcgggaacttacagacaaaactggtttgtggcctgtttgattcctgtcagaggtttgctgacccaagacagtatcgaaaatgcatattaagtcaattattctagagggattcaagtcctatgctcagaggaccgaagtcaatggttttgaccccctcttcaatgctatcactggcttaaatggtagtgggaaatccaacatattggactccatctgctttttgctgggcatctccaacctgtctcaggttcgggcttctaatttacaagatttagtttacaaaaatgggcaggctggtattaccaaagcctctgtgtcaatcacttttgataattctgacaaaaagcaaagtcctttaggatttgaggttcatgatgaaatcacagtaacaaggcaggtggttattggtggtagaaataaatatttaatcaatggagtcaatgccaacaacaccagagtacaggatctcttctgttctgttggccttaatgttaacaaccctcactttctcatcatgcagggccgaattacaaaagtattgaatatgaaacctccagagattttatccatgatagaagaagcagctggaaccaggatgtatgaatacaaaaaaatagctgcacagaaaactatagaaaaaaaggaggctaagctgaaagaaattaagacgatacttgaagaagagattactccaaccattcaaaaattaaaagaggaaagatcgtcctacttggagtaccaaaaagtaatgagagaaatagaacatttgagtcgtttatatattgcttatcagtttttgctggctgaagataccaaagtacgctcagctgaggaattaaaagaaatgcaagataaagttataaagcttcaggaagaattgtctgagaatgataaaaaaataaaagcacttaatcatgaaatagaagaattggaaaaaagaaaagataaggaaactggaggtatacttcgatctttagaagatgctcttgcagaggctcagcgagttaatactaaatctcaaagcgcatttgatctcaagaagaaaaatctggcatgtgaggaaagcaaacgcaaagagctggaaaaaaatatggttgaggactcaaaaactttagcagcaaaggaaaaagaggttaaaaagataacagatggactgcatgcccttcaagaagcaagtaataaagatgctgaagctctggcagctgcacagcagcacttcaatgctgtttccgctggcctgtccagtaatgaagatggagcagaagcaactcttgctggtcaaatgatggcctgtaaaaatgatataagtaaagctcagacagaagccaaacaggctcagatgaagttgaagcatgctcaacaggaattaaagaataaacaagctgaagttaagaagatggatagtggctacaggaaggatcaagaagctctagaagctgtaaaaagacttaaagaaaaacttgaagctgaaatgaaaaagctaaattatgaagaaaataaagaggaaagccttttggaaaagcgcaggcagctgtctcgtgatattggtagattgaaagaaacatatgaagctctattagccagatttcccaatcttcgatttgcatacaaggatccagagaagaactggaatagaaattgtgtgaaaggacttgtggcttctctgattagtgtgaaagacacttctgcaaccacagctttagaattagtggctggagaacgactctacaatgttgtagtagacacagaagttactggtaaaaagctactagaaaggggggaactgaaacgtcgatacactataattccactcaataaaatttcagccagatgtattgcaccagaaactctgagagttgctcagaatcttgttggccctgacaacgttcatgtggctctttccttggttgaatataaaccagaacttcagaaagcaatggagtttgtctttggaacaacatttgtttgtgacaatatggataatgccaaaaaagtggcctttgataagaggataatgactagaactgtaactctcggaggtgatgtgtttgatcctcatgggacattgagtggaggtgctcgatcccaggcagcttccattttaaccaagtttcaagaactcaaagatgttcaggatgaactgagaatcaaagagaatgagctgcgggctctagaagaggaattagcaggtcttaaaaacactgctgaaaagtatcgccaactaaaacagcagtgggagatgaaaactgaagaggcagatttattacaaaccaagctccagcaaagctcatatcacaagcaacaagaagaattagatgcccttaaaaaaaccattgaggaaagtgaggagactttgaaaaacactaaagaaatccaaagaaaagcagaagaaaaatatgaagtattggaaaataaaatgaaaaatgcagaagctgaaagagagcgagaactgaaagatgctcagaaaaaactggattgtgccaaaacaaaggcagatgcatctagcaagaagatgaaagaaaaacaacaggaagttgaagctatcactctggaactggaagagctcaagagagagcatacatcttacaaacaacagcttgaagctgtaaatgaagctatcaaatcctatgaaagtcagattgaagtaatggcagctgaggtggctaaaaataaggagtcagtaaataaagctcaagaagaggtgaccaagcaaaaagaggtgataacagcccaagacactgtaattaaagctaaatatgcagaagtggcaaaacacaaggagcaaaacaatgattctcagcttaaaattaaggaattagaccacaacatcagcaaacataaacgggaggctgaagatggtgctgcaaaggtatccaaaatgttgaaagattatgactggattaatgcagagagacacctctttggccaacccaatagtgcctatgatttcaaaactaacaaccctaaagaagctggtcagagacttcagaagttgcaagaaatgaaggagaaactaggaagaaatgtcaatatgagagctatgaatgtattgacagaagctgaagagcgatacaatgacttgatgaagaagaagagaattgtagaaaatgacaaatccaaaattcttacaactatagaagaccttgaccagaagaaaaaccaagccctaaatattgcatggcaaaaggtgaacaaggactttgggtctattttttctactcttttgcctggtgctaatgctatgcttgcaccaccagagggtcaaactgttttggatggtctggagttcaaggttgccttgggaaatacctggaaagaaaacctaactgaacttagtggtggtcagaggtctttagtggccttgtcattaatactgtccatgcttctcttcaaacctgctccaatttatatccttgatgaggtagatgcagccttggatctttctcatacccaaaacattggacagatgctgcgtactcatttcacacattctcagttcattgtggtgtcactaaaagaaggtatgttcaacaatgcaaacgttcttttcaaaaccaagtttgtggatggtgtttctacagtagccagatttactcaatgtcaaaatggaaagatttcaaaggaagcaaaatccaaggcaaaaccacccaaaggagcacatgtggaagtttaaactacaaagttatttcttcatcttgacctgtttttttaaatgtaaacttttaaggacttgagataactaatttgtttatatacaaaaattaatgttactgtgttacttaacccatgttttctctttatataatcacttatcgcttacaaatgagcatatattcctcatctcttaactagtctaattatggtccaattattgtggttgtgattttatgcatatcatcaaatgtttttttcttatgcgggtcttttatatattagggatcctgagatacccgattctatatgtaaaagctaatatacaaaaaagcagattaaattacatgataaatgt

SEQ ID NO: 187141 - DNA, 5909 bp, Homo sapiens
  Payload ID: 16844
  Gene Symbol: SMC2
  Gene Name: structural maintenance of chromosomes 2
  Uniprot ID: O95347
  ENST ID: ENST00000374793
  CDS Start-End: 214-3807
cggcgcgggtgttgagagcggtgtggcaggtgttgtagccgctatggtgaagttcgctttgtagcggccccggctagagagttgttctgttccctgcctttgtgacccggaggagcttttggggtgcgtcaagcccctggcctgaggcagcgaactggtttgtggcctgtttgattcctgtcagaggtttgctgacccaagacagtatcgaaaatgcatattaagtcaattattctagagggattcaagtcctatgctcagaggaccgaagtcaatggttttgaccccctcttcaatgctatcactggcttaaatggtagtgggaaatccaacatattggactccatctgctttttgctgggcatctccaacctgtctcaggttcgggcttctaatttacaagatttagtttacaaaaatgggcaggctggtattaccaaagcctctgtgtcaatcacttttgataattctgacaaaaagcaaagtcctttaggatttgaggttcatgatgaaatcacagtaacaaggcaggtggttattggtggtagaaataaatatttaatcaatggagtcaatgccaacaacaccagagtacaggatctcttctgttctgttggccttaatgttaacaaccctcactttctcatcatgcagggccgaattacaaaagtattgaatatgaaacctccagagattttatccatgatagaagaagcagctggaaccaggatgtatgaatacaaaaaaatagctgcacagaaaactatagaaaaaaaggaggctaagctgaaagaaattaagacgatacttgaagaagagattactccaaccattcaaaaattaaaagaggaaagatcgtcctacttggagtaccaaaaagtaatgagagaaatagaacatttgagtcgtttatatattgcttatcagtttttgctggctgaagataccaaagtacgctcagctgaggaattaaaagaaatgcaagataaagttataaagcttcaggaagaattgtctgagaatgataaaaaaataaaagcacttaatcatgaaatagaagaattggaaaaaagaaaagataaggaaactggaggtatacttcgatctttagaagatgctcttgcagaggctcagcgagttaatactaaatctcaaagcgcatttgatctcaagaagaaaaatctggcatgtgaggaaagcaaacgcaaagagctggaaaaaaatatggttgaggactcaaaaactttagcagcaaaggaaaaagaggttaaaaagataacagatggactgcatgcccttcaagaagcaagtaataaagatgctgaagctctggcagctgcacagcagcacttcaatgctgtttccgctggcctgtccagtaatgaagatggagcagaagcaactcttgctggtcaaatgatggcctgtaaaaatgatataagtaaagctcagacagaagccaaacaggctcagatgaagttgaagcatgctcaacaggaattaaagaataaacaagctgaagttaagaagatggatagtggctacaggaaggatcaagaagctctagaagctgtaaaaagacttaaagaaaaacttgaagctgaaatgaaaaagctaaattatgaagaaaataaagaggaaagccttttggaaaagcgcaggcagctgtctcgtgatattggtagattgaaagaaacatatgaagctctattagccagatttcccaatcttcgatttgcatacaaggatccagagaagaactggaatagaaattgtgtgaaaggacttgtggcttctctgattagtgtgaaagacacttctgcaaccacagctttagaattagtggctggagaacgactctacaatgttgtagtagacacagaagttactggtaaaaagctactagaaaggggggaactgaaacgtcgatacactataattccactcaataaaatttcagccagatgtattgcaccagaaactctgagagttgctcagaatcttgttggccctgacaacgttcatgtggctctttccttggttgaatataaaccagaacttcagaaagcaatggagtttgtctttggaacaacatttgtttgtgacaatatggataatgccaaaaaagtggcctttgataagaggataatgactagaactgtaactctcggaggtgatgtgtttgatcctcatgggacattgagtggaggtgctcgatcccaggcagcttccattttaaccaagtttcaagaactcaaagatgttcaggatgaactgagaatcaaagagaatgagctgcgggctctagaagaggaattagcaggtcttaaaaacactgctgaaaagtatcgccaactaaaacagcagtgggagatgaaaactgaagaggcagatttattacaaaccaagctccagcaaagctcatatcacaagcaacaagaagaattagatgcccttaaaaaaaccattgaggaaagtgaggagactttgaaaaacactaaagaaatccaaagaaaagcagaagaaaaatatgaagtattggaaaataaaatgaaaaatgcagaagctgaaagagagcgagaactgaaagatgctcagaaaaaactggattgtgccaaaacaaaggcagatgcatctagcaagaagatgaaagaaaaacaacaggaagttgaagctatcactctggaactggaagagctcaagagagagcatacatcttacaaacaacagcttgaagctgtaaatgaagctatcaaatcctatgaaagtcagattgaagtaatggcagctgaggtggctaaaaataaggagtcagtaaataaagctcaagaagaggtgaccaagcaaaaagaggtgataacagcccaagacactgtaattaaagctaaatatgcagaagtggcaaaacacaaggagcaaaacaatgattctcagcttaaaattaaggaattagaccacaacatcagcaaacataaacgggaggctgaagatggtgctgcaaaggtatccaaaatgttgaaagattatgactggattaatgcagagagacacctctttggccaacccaatagtgcctatgatttcaaaactaacaaccctaaagaagctggtcagagacttcagaagttgcaagaaatgaaggagaaactaggaagaaatgtcaatatgagagctatgaatgtattgacagaagctgaagagcgatacaatgacttgatgaagaagaagagaattgtagaaaatgacaaatccaaaattcttacaactatagaagaccttgaccagaagaaaaaccaagccctaaatattgcatggcaaaaggtgaacaaggactttgggtctattttttctactcttttgcctggtgctaatgctatgcttgcaccaccagagggtcaaactgttttggatggtctggagttcaaggttgccttgggaaatacctggaaagaaaacctaactgaacttagtggtggtcagaggtctttagtggccttgtcattaatactgtccatgcttctcttcaaacctgctccaatttatatccttgatgaggtagatgcagccttggatctttctcatacccaaaacattggacagatgctgcgtactcatttcacacattctcagttcattgtggtgtcactaaaagaaggtatgttcaacaatgcaaacgttcttttcaaaaccaagtttgtggatggtgtttctacagtagccagatttactcaatgtcaaaatggaaagatttcaaaggaagcaaaatccaaggcaaaaccacccaaaggagcacatgtggaagtttaaactacaaagttatttcttcatcttgacctgtttttttaaatgtaaacttttaaggacttgagataactaatttgtttatatacaaaaattaatgttactgtgttacttaacccatgttttctctttatataatcacttatcgcttacaaatgagcatatattcctcatctcttaactagtctaattatggtccaattattgtggttgtgattttatgcatatcatcaaatgtttttttcttatgcgggtcttttatatattagggatcctgagatacccgattctatatgtaaaagctaatatacaaaaaagcagattaaattacatgataaatgtagctgatcatcagtgtttaattgatttaattcctaaggcaatattaatgtgttttctaaagtcattcaggtaaggaagaattataaatcaggtaactggaccaacaaagggaacacatataaagctattatgcatgcatggagccgtttgaggctagttttttaaggccacaactccagacccctgatttagactgagataggaaacagatcttgaaagaatccttattttaatgatacatgaatatcatgttcctatacgcttaataattggtctctacgttttaatgatacatgaatatcatgttcctatacgcttaataattggtctctacgactttaatgtttttgtttttttaagctgtgtaagtatttttaaatcaaagcttaggaggtgtgttgcgtggtactatctgctgcaaatttatctgaagtttgttaatattttccaagatttttgtcagccttttcataatccagtcattaacaacctattggtaaacaagaatgtaggtgccagtagactaaaccaaatttatttttccctgagtctgatatatatatgtataaatataaataactcaatccatctgttccaccaaaataactcaaaagttggatgattatttgtcttccgctttccagttcaaagggatgaaattcctttagaacttgaaagatgacactagcgaacaccatgagaatactgtctacagtttttggtacgtcatcactagaacagtgaccccaaactgaatcatgaaaggtctgacatgatgtaatctgatcttccatgtgttattttggccccacatctcttcttgattttttagtcttatttccttagtgttattatcatacttcccctgatatatggccgtacttcctggccctgggcttgacatttcccacccttcattctccatacatatgagatgtcagaaaacatgcagtaattgatattatgggacacattggaaaggattgaatctggaattagttctgtccactgtggaggggagaggaaataatgctgtaaatgttgagttacagaaagtccaatgtcaaatatagtttttttgtttcctttcaaatgtattacagactgtgccaaaacagttaccaattcacactgtcaatattaaagtataccatagtatacaaattagtcagtacttgctgttaattttaatatttctgatttaacagttagttattaagtggtacttcattgctgttttagccaacgttttaaaaataatttgggagtttgactattttggcttacgtactcatttccttttctctgctaaaaatgttttgcttgtgtgcgttcctgatttttgtcttgtataatcttgatctttgaaaaccctcaaacatgtattaaattgttgtaactttttttcattagagggaagacattaaggggattggggacatttgtttcacacatctgcagtaatatgagttaactaatatttaacaagctctttctttacattagctgctgttctcatttgtatgtattgtcatatttaatcctcagagtaacctagtgaggtaaatactgttgttgtcagcatggtgtaatcgaggaattgagtgagttgagcagaaaagttaggaaacttgctcagggtgataatacagttaggagtgtcagggcccatggacaaatcttgtcagtctccagaacctaagatatactacgtcactgacagcttgaacatttgtatttattgtacagaataaatttaagaaaaa

SEQ ID NO: 187142 - DNA, 705 bp, Homo sapiens
  Payload ID: 16844
  Gene Symbol: SMC2
  Gene Name: structural maintenance of chromosomes 2
  ENST ID: ENST00000440179
  CDS Start-End: 271-705
cgcgccgaaattcaaaggaataaatagttccggcgcgggtgttgagagcggtgtggcaggtgttgtagccgctatggtgaagttcgctttgtagcggccccggctagagagttgttctgttccctgcctttgtgacccggaggagcttttggggtggttattggtggtagaaataaatatttaatcaatggagtcaatgccaacaacaccagagtacaggatctcttctgttctgttggccttaatgttaacaaccctcactttctcatcatgcagggccgaattacaaaagtattgaatatgaaacctccagagattttatccatgatagaagaagcagctggaaccaggatgtatgaatacaaaaaaatagctgcacagaaaactatagaaaaaaaggaggctaagctgaaagaaattaagacgatacttgaagaagagattactccaaccattcaaaaattaaaagaggaaagatcgtcctacttggagtaccaaaaagtaatgagagaaatagaacatttgagtcgtttatatattgcttatcagtttttgctggctgaagataccaaagtacgctcagctgaggaattaaaagaaatgcaagataaagttataaagcttcaggaagaattgtctgagaatgataaaaaaataaaagcacttaatcatgaaatagaagaattggaaaaaagaaaagataag

SEQ ID NO: 187143 - DNA, 1408 bp, Homo sapiens
  Payload ID: 16844
  Gene Symbol: SMC2
  Gene Name: structural maintenance of chromosomes 2
  ENST ID: ENST00000493955
  CDS Start-End: 84-584
ctcagcttaaaattaaggaattagaccacaacatcagcaaacataaacgggaggctgaagatggtgctgcaaaggtatccaaaatgttgaaagattatgactggattaatgcagagagacacctctttggccaacccaatagtgcctatgatttcaaaactaacaaccctaaagaagctggtcagagacttcagaagttgcaagaaatgaaggagaaactaggaagaaatgtcaatatgagagctatgaatgtattgacagaagctgaagagcgatacaatgacttgatgaagaagaagagaattgtagaaaatgacaaatccaaaattcttacaactatagaagaccttgaccagaagaaaaaccaagccctaaatattgcatggcaaaaggtgaacaaggactttgggtctattttttctactcttttgcctggtgctaatgctatgcttgcaccaccagagggtcaaactgttttggatggtctggagttcaaggttgccttgggaaatacctggaaagaaaacctaactgaacttagtggtggtcagagacaaaaacagcagaaccatactacaggttaaaggaagttctcaggcaaaaggaaaatgataccagatggaaccttggatctacataaaggaaagaagagtgttggaaactaacatggatttggagttcagggaagtttctcctgaccttacacagtgattcagaaaatcagcatagtgatagaaacctaaaaggtctttagtggccttgtcattaatactgtccatgcttctcttcaaacctgctccaatttatatccttgatgaggtagatgcagccttggatctttctcatacccaaaacattggacagatgctgcgtactcatttcacacattctcagttcattgtggtgtcactaaaagaaggtatgttcaacaatgcaaacgttcttttcaaaaccaagtttgtggatggtgtttctacagtagccagatttactcaatgtcaaaatggaaagatttcaaaggaagcaaaatccaaggcaaaaccacccaaaggagcacatgtggaagtttaaactacaaagttatttcttcatcttgacctgtttttttaaatgtaaacttttaaggacttgagataactaatttgtttatatacaaaaattaatgttactgtgttacttaacccatgttttctctttatataatcacttatcgcttacaaatgagcatatattcctcatctcttaactagtctaattatggtccaattattgtggttgtgattttatgcatatcatcaaatgtttttttcttatgcgggtcttttatatattagggatcctgagatacccgattctatatgtaaaagctaatatacaaaaaagcagattaaattacatgataaatgta

SEQ ID NO: 187144 - DNA, 4114 bp, Homo sapiens
  Payload ID: 16845
  Gene Symbol: SMC3
  Gene Name: structural maintenance of chromosomes 3
  Uniprot ID: Q9UQE7
  ENST ID: ENST00000361804
  CDS Start-End: 127-3780
ttttgtttggctgaggggagcgagcggcgctttgggggaggggtcgcgtaggcgcctcacctgaccctgcggccgtgcggttgctgctccggggcaggtctccttccaggccaggggcccggaatcatgtacataaagcaggtgattatccagggttttcgaagttacagagatcaaacaattgtagatcccttcagttcaaaacataatgtgattgtgggcagaaatggatctggaaaaagtaactttttttatgcaattcagtttgttctcagtgatgagtttagtcatcttcgtccagaacagcggttggctttattgcatgaaggtactggtcctcgtgttatttctgcttttgtggagattatttttgataattcagacaaccggttaccaatcgataaagaggaagtttcacttcgaagagttattggtgccaaaaaggatcagtatttcttagacaagaagatggtcacgaaaaatgatgtgatgaacctccttgaaagcgctggtttttctcgaagcaatccttattatattgttaaacaaggaaagatcaaccagatggcaacagcaccagattctcagagattaaagctattaagagaagtagctggtactagagtgtatgacgaacgaaaggaagaaagcatctccttaatgaaagaaacagagggcaaacgggaaaaaatcaatgagttgttaaaatacattgaagagagattacatactctagaggaagaaaaggaagaactagctcagtatcagaagtgggataaaatgagacgagccctggaatataccatttacaatcaggaacttaacgagactcgtgccaaacttgatgagctttctgctaagcgagagactagtggagaaaaatccagacaattaagagatgctcagcaggatgcaagagataaaatggaggatatcgaacgccaagttagagaattgaaaacaaaaatttcagctatgaaagaagaaaaagaacagcttagtgctgaaagacaagagcagattaagcagaggactaagttggagcttaaagccaaggatttacaagatgaactagcaggcaatagtgaacaaaggaaacgtttattaaaagagaggcagaagctgcttgaaaaaatagaagaaaagcagaaagaactggcagaaacagaacccaaattcaacagtgtgaaagagaaagaagaacgaggaattgctagattggctcaagctacccaggaaagaacggatctttatgcaaagcagggtcgaggaagccagtttacatcaaaagaagaaagggataagtggattaaaaaggaactcaagtctttagatcaggctattaatgacaagaaaagacagattgctgctatacataaggatttggaagacactgaagcaaataaagagaaaaatctggagcagtataataaactggaccaggatcttaatgaagtcaaagctcgagtagaagaactggacagaaaatattacgaagtaaaaaataagaaagatgaactacaaagtgaaagaaactacttgtggagagaagagaatgcagaacagcaagcacttgctgctaaaagagaagatcttgaaaagaagcaacaacttcttagagcagcaacaggaaaggccattttaaatggaatagacagcataaacaaagtgctagaccacttccgtcgaaaaggaataaaccagcatgttcaaaatggctatcatggtattgtaatgaataactttgaatgtgaaccagctttctacacatgcgtggaagtcactgctggaaacaggttattttatcacattgttgattcagatgaagtcagcacgaagattttaatggagtttaataaaatgaatcttcctggagaggttacttttctgcctcttaacaagttagatgtcagggatacagcctatcctgaaaccaatgatgctattcctatgatcagcaaactgaggtacaatcccagatttgacaaagctttcaaacatgtgtttggaaagactcttatttgtcgtagcatggaagtttcaacccagctggcccgtgctttcactatggactgtattactttggaaggtgaccaagtcagccatcggggtgctctaactgggggttattatgacacaaggaagtctcgacttgaattgcaaaaagatgttagaaaagcagaagaagaactaggtgaacttgaagcaaagctcaatgaaaacctgcgcagaaatattgaaaggattaataatgaaattgatcagttgatgaaccaaatgcaacagatcgagacccagcaaaggaaatttaaagcatctagagatagcatattatcagaaatgaagatgctaaaagagaagaggcagcagtcagagaaaaccttcatgcctaagcaacgtagcttacagagtttggaggcaagcttgcatgctatggagtctaccagagagtcattgaaagcagaactgggaactgatttgctttctcaactgagtttggaagatcagaagagagtagatgcactgaatgatgagattcgtcaacttcagcaggaaaacagacagttgctaaatgaaagaattaaattagaaggtattattactcgagtagagacttatctcaatgagaatctgagaaaacgcttggaccaagtagaacaggaacttaatgagctgagagagacagaagggggtactgttctcacagccacaacatcagaacttgaagccatcaataaaagagtaaaagacactatggcacgatcagaagatttggacaattccattgataaaacagaagctggaattaaggagcttcagaagagtatggagcgctggaaaaatatggaaaaagaacatatggatgctataaatcatgatactaaagaactggaaaagatgacaaatcggcaaggcatgctattgaagaagaaagaagagtgtatgaagaaaattcgagaacttggatcacttccccaggaagcatttgaaaagtaccagacactgagcctcaaacagttgtttcgaaaacttgagcagtgcaacacagaattaaagaagtacagccatgttaacaaaaaggctttggatcagtttgtaaatttctccgagcagaaagaaaagttaataaagcgtcaagaagagttagataggggttacaaatcaatcatggaactgatgaatgtacttgaacttcggaaatatgaagctattcagttaactttcaaacaggtatctaagaacttcagtgaagtattccagaagttagtacctggtggcaaagctactttggtgatgaagaaaggagatgtggagggcagtcagtctcaagatgaaggagaagggagtggtgagagtgagaggggttctggctcacaaagcagtgtcccatcagttgaccagtttactggagttggaattagggtgtcatttacaggaaaacaaggtgaaatgagagaaatgcaacagctttcaggtggacagaaatccttggtagcccttgctctgatttttgccattcagaaatgtgacccggctccattttacttgtttgatgaaattgaccaggctctggatgctcagcacagaaaggctgtgtcagatatgattatggaacttgctgtacatgctcagtttattacaactacttttaggcctgaactgcttgagtcagctgacaaattctatggtgtaaagttcagaaataaggttagtcatattgatgtgatcacagcagagatggccaaagactttgtagaagatgataccacacatggttaattggaaaatactacctactggtttgggagatgtatatagtaatatgattctcatacccaggaactgtaaatttaaacctaaatatttggccaatagttttcagacttaaagcatcatagtccttttatatttgtctttgtattttataagatactctgtaatgtcatgtttgtactgatagtttaagaatttaatttcctgtacaactttttgtaaaatgttctgctcctattttaaatgttttgaaacatgctaaatattctttcctaattattttatcacttatactaccttttttatagcttcaattaaataatcggttttatgactaata

SEQ ID NO: 187145 - DNA, 5356 bp, Homo sapiens
  Payload ID: 16846
  Gene Symbol: SMC4
  Gene Name: structural maintenance of chromosomes 4
  Uniprot ID: Q9NTJ3
  ENST ID: ENST00000344722
  CDS Start-End: 346-4212
ccttaattagaaatgcgttagcgaatattatacgcttatactatgggcggacgggtggagagccttaaaaacaacaacaacaaactaagcagttgctcaatcgttgattgatcctcaggcacgtctagattttcccacttacataggtcttgttaagaaaccagtcctgccttcttgccactcgtgtctttcgatggctcccttcccgaagtcccgctgcctctaagcggagtgttaagcggggctctcggaagccggtggaccgagatttccccgggtggggcgggcgcggtgtagcggcccgcgggctgacttgctcccggctgtcccccggccccagcgaccatgccccgtaaaggcacccagccctccactgcccggcgcagagaggaagggccgccgccgccgtcccctgacggcgccagcagcgacgcggagcctgagccgccgtccggccgcacggagagcccagccaccgccgcagagactgcaagtgaggaacttgataatagaagtttagaagagattttgaacagcattcctcctcccccgcctccagcaatgaccaatgaagctggagctcctcggcttatgataactcatattgtaaaccagaacttcaaatcctatgctggggagaaaattctgggacctttccataagcgcttttcctgtattatcgggccaaatggcagtggcaaatccaatgttattgattctatgctttttgtgtttggctatcgagcacaaaaaataagatctaaaaaactctcagtattaatacataattctgatgaacacaaggacattcagagttgtacagtagaagttcattttcaaaagataattgataaggaaggggatgattatgaagtcattcctaacagtaatttctatgtatccagaacggcctgcagagataatacttctgtctatcacataagtggaaagaaaaagacatttaaggatgttggaaatcttcttcgaagccatggaattgacttggaccataatagatttttaattttacagggtgaagttgaacaaattgctatgatgaaaccaaaaggccagactgaacacgatgagggtatgcttgaatatttagaagatataattggttgtggacggctaaatgaacctattaaagtcttgtgtcggagagttgaaatattaaatgaacacagaggagagaagttaaacagggtaaagatggtggaaaaggaaaaggatgccttagaaggagagaaaaacatagctatcgaatttcttaccttggaaaatgaaatatttagaaaaaagaatcatgtttgtcaatattatatttatgagttgcagaaacgaattgctgaaatggaaactcaaaaggaaaaaattcatgaagataccaaagaaattaatgagaagagcaatatactatcaaatgaaatgaaagctaagaataaagatgtaaaagatacagaaaagaaactgaataaaattacaaaatttattgaggagaataaagaaaaatttacacagctagatttggaagatgttcaagttagagaaaagttaaaacatgccacgagtaaagccaaaaaactggagaaacaacttcaaaaagataaagaaaaggttgaagaatttaaaagtatacctgccaagagtaacaatatcattaatgaaacaacaaccagaaacaatgccctcgagaaggaaaaagagaaagaagaaaaaaaattaaaggaagttatggatagccttaaacaggaaacacaagggcttcagaaagaaaaagaaagtcgagagaaagaacttatgggtttcagcaaatcggtaaatgaagcacgttcaaagatggatgtagcccagtcagaacttgatatctatctcagtcgtcataatactgcagtgtctcaattaactaaggctaaggaagctctaattgcagcttctgagactctcaaagaaaggaaagctgcaatcagagatatagaaggaaaactccctcaaactgaacaagaattaaaggagaaagaaaaagaacttcaaaaacttacacaagaagaaacaaactttaaaagtttggttcatgatctctttcaaaaagttgaagaagcaaagagctcattagcaatgaatcgaagtagggggaaagtccttgatgcaataattcaagaaaaaaaatctggcaggattccaggaatatatggaagattgggggacttaggagccattgatgaaaaatacgacgtggctatatcatcctgttgtcatgcactggactacattgttgttgattctattgatatagcccaagaatgtgtaaacttccttaaaagacaaaatattggagttgcaacctttataggtttagataagatggctgtatgggcgaaaaagatgaccgaaattcaaactcctgaaaatactcctcgtttatttgatttagtaaaagtaaaagatgagaaaattcgccaagctttttattttgctttacgagataccttagtagctgacaacttggatcaagccacaagagtagcatatcaaaaagatagaagatggagagtggtaactttacagggacaaatcatagaacagtcaggtacaatgactggtggtggaagcaaagtaatgaaaggaagaatgggttcctcacttgttattgaaatctctgaagaagaggtaaacaaaatggaatcacagttgcaaaacgactctaaaaaagcaatgcaaatccaagaacagaaagtacaacttgaagaaagagtagttaagttacggcatagtgaacgagaaatgaggaacacactagaaaaatttactgcaagcatccagcgtttaatagagcaagaagaatatttgaatgtccaagttaaggaacttgaagctaatgtacttgctacagcccctgacaaaaaaaagcagaaattgctagaagaaaacgttagtgctttcaaaacagaatatgatgctgtggctgagaaagctggtaaagtagaagctgaggttaaacgcttacacaataccatcgtagaaatcaataatcataaactcaaggcccaacaagacaaacttgataaaataaataagcaattagatgaatgtgcttctgctattactaaagcccaagtagcaatcaagactgctgacagaaaccttcaaaaggcacaagactctgtcttgcgtacagagaaagaaataaaagatactgagaaagaggtggatgacctaacagcagagctgaaaagtcttgaggacaaagcagcagaggtcgtaaagaatacaaatgctgcagaggaatccttaccagagatccagaaagaacatcgcaatctgcttcaagaattaaaagttattcaagaaaatgaacatgctcttcaaaaagatgcacttagtattaagttgaaacttgaacaaatagatggtcacattgctgaacataattctaaaataaaatattggcacaaagagatttcaaaaatatcactgcatcctatagaagataatcctattgaagagatttcggttctaagcccagaggatcttgaagcgatcaagaatccagattctataacaaatcaaattgcacttttggaagcccggtgtcatgaaatgaaaccaaacctcggtgccatcgcagagtataaaaagaaggaagaattgtatttgcaacgggtagcagaattggacaaaattacttatgaaagagacagttttagacaggcatatgaagatcttcggaaacaaaggcttaatgaatttatggcaggtttttatataataacaaataaattaaaggaaaattaccaaatgcttactttgggaggggacgccgaactcgagcttgtagacagcttggatcctttctctgaaggaatcatgttcagtgttcgaccacctaagaaaagttggaaaaagatcttcaacctttcgggaggagagaaaacacttagttcattggctttagtatttgctcttcaccactacaagcccactcccctttacttcatggatgagattgatgcagcccttgattttaaaaatgtgtccattgttgcattttatatatatgaacaaacaaaaaatgcacagttcataataatttctcttcgaaataatatgtttgagatttcggatagacttattggaatttacaagacatacaacataacaaaaagtgttgctgtaaatccaaaagaaattgcatctaagggactttgttgaactttatgctgaagattcttcaagttgattcagtgtattactgatttttttctatttgtaaaggattatgagttgtataaaatacatactccctaaactagatcatgaaactggtttctgttttatgcagttgtcatttgtaaagtctaataaaatattctctataattgcttctagattacaaaaatatgacaatcttgtaagtagcagactatggagaaaaatgagttacctggagggtcaggtaacttgccaaactaaaaagtatgttagttgaggcaaagtcctaagcaaggttgtgctatcaaggctcagcataccttcgtgggcctttgatttaccaacactggaaatgcctgccaactaatcttggatagattctttaaggcattccacttagcttgccagttgagacaatcaccacagttattacccaaatactatgaacatatttttgtaaaccagtcattctgaattatagtgatgagaatttaaatatatgcttttctagaatttgatgtttgaccatttatgacttaattaccagagagccagtaaattaggacagtgtttcaacaagcctaggctatctcgtaagttgaaaaatatcccactatagttgcttcatgagtatgaagtaagatggcctctgatttacactggttcaatttacaaattttcaactttatgataggtttatccgggtactaaatgcatttcaacttgatagtttcaacttatgataggtttaccaggatgtagtcccactgttgaggagcatctatttaggggttaattactttagtaataagtggaaagtaagataccttgagtaatgtttgcctataaaattgtcagcgtatttttacactattggctcaagaatgttataatgctaagggacataagttggcaaccacttggtttttggaaggactttcggtattgtattagaagtctgccctagctgttaaatttctgggtatttatcctaaggaattaattaaagagttaattgttcctttcttcagtgggccattgttttagatatttaaaaaatccaacagtttctatcataatgtaactgtaaaaatgtaaacacattattagcatggacttttaaataaagatttaaagaaagcaa

SEQ ID NO: 187146 - DNA, 5471 bp, Homo sapiens
  Payload ID: 16846
  Gene Symbol: SMC4
  Gene Name: structural maintenance of chromosomes 4
  Uniprot ID: Q9NTJ3
  ENST ID: ENST00000357388
  CDS Start-End: 452-4318
gccctcttctgaagaggcgtttctggaccactgagccccgcctcccactgtgagcggaaccctaccgtttttaaaaaaatctttttcaaaacttgccaggttgtctttccaaatatttttaataatagtgctgctgctgtagaccacagagaaaagaatccctcgctcttccttttcacttagtagaaacttctaccgcgtaggtcccgccaggagttcgcgcatgcgcaggagcgacaataagatggcggtgataatcgccgcactttttttcaaattagtggatcccagaaatcattgcgcgcatttgtaacgaatttccgttcgagtttgtattttaggcgccattttcgagtgaaggacccggagccgaaacaccggtaggagcggggaggtgggtactacacaaccgtctccagccttggtctgagtggactgtcctgcagcgaccatgccccgtaaaggcacccagccctccactgcccggcgcagagaggaagggccgccgccgccgtcccctgacggcgccagcagcgacgcggagcctgagccgccgtccggccgcacggagagcccagccaccgccgcagagactgcaagtgaggaacttgataatagaagtttagaagagattttgaacagcattcctcctcccccgcctccagcaatgaccaatgaagctggagctcctcggcttatgataactcatattgtaaaccagaacttcaaatcctatgctggggagaaaattctgggacctttccataagcgcttttcctgtattatcgggccaaatggcagtggcaaatccaatgttattgattctatgctttttgtgtttggctatcgagcacaaaaaataagatctaaaaaactctcagtattaatacataattctgatgaacacaaggacattcagagttgtacagtagaagttcattttcaaaagataattgataaggaaggggatgattatgaagtcattcctaacagtaatttctatgtatccagaacggcctgcagagataatacttctgtctatcacataagtggaaagaaaaagacatttaaggatgttggaaatcttcttcgaagccatggaattgacttggaccataatagatttttaattttacagggtgaagttgaacaaattgctatgatgaaaccaaaaggccagactgaacacgatgagggtatgcttgaatatttagaagatataattggttgtggacggctaaatgaacctattaaagtcttgtgtcggagagttgaaatattaaatgaacacagaggagagaagttaaacagggtaaagatggtggaaaaggaaaaggatgccttagaaggagagaaaaacatagctatcgaatttcttaccttggaaaatgaaatatttagaaaaaagaatcatgtttgtcaatattatatttatgagttgcagaaacgaattgctgaaatggaaactcaaaaggaaaaaattcatgaagataccaaagaaattaatgagaagagcaatatactatcaaatgaaatgaaagctaagaataaagatgtaaaagatacagaaaagaaactgaataaaattacaaaatttattgaggagaataaagaaaaatttacacagctagatttggaagatgttcaagttagagaaaagttaaaacatgccacgagtaaagccaaaaaactggagaaacaacttcaaaaagataaagaaaaggttgaagaatttaaaagtatacctgccaagagtaacaatatcattaatgaaacaacaaccagaaacaatgccctcgagaaggaaaaagagaaagaagaaaaaaaattaaaggaagttatggatagccttaaacaggaaacacaagggcttcagaaagaaaaagaaagtcgagagaaagaacttatgggtttcagcaaatcggtaaatgaagcacgttcaaagatggatgtagcccagtcagaacttgatatctatctcagtcgtcataatactgcagtgtctcaattaactaaggctaaggaagctctaattgcagcttctgagactctcaaagaaaggaaagctgcaatcagagatatagaaggaaaactccctcaaactgaacaagaattaaaggagaaagaaaaagaacttcaaaaacttacacaagaagaaacaaactttaaaagtttggttcatgatctctttcaaaaagttgaagaagcaaagagctcattagcaatgaatcgaagtagggggaaagtccttgatgcaataattcaagaaaaaaaatctggcaggattccaggaatatatggaagattgggggacttaggagccattgatgaaaaatacgacgtggctatatcatcctgttgtcatgcactggactacattgttgttgattctattgatatagcccaagaatgtgtaaacttccttaaaagacaaaatattggagttgcaacctttataggtttagataagatggctgtatgggcgaaaaagatgaccgaaattcaaactcctgaaaatactcctcgtttatttgatttagtaaaagtaaaagatgagaaaattcgccaagctttttattttgctttacgagataccttagtagctgacaacttggatcaagccacaagagtagcatatcaaaaagatagaagatggagagtggtaactttacagggacaaatcatagaacagtcaggtacaatgactggtggtggaagcaaagtaatgaaaggaagaatgggttcctcacttgttattgaaatctctgaagaagaggtaaacaaaatggaatcacagttgcaaaacgactctaaaaaagcaatgcaaatccaagaacagaaagtacaacttgaagaaagagtagttaagttacggcatagtgaacgagaaatgaggaacacactagaaaaatttactgcaagcatccagcgtttaatagagcaagaagaatatttgaatgtccaagttaaggaacttgaagctaatgtacttgctacagcccctgacaaaaaaaagcagaaattgctagaagaaaacgttagtgctttcaaaacagaatatgatgctgtggctgagaaagctggtaaagtagaagctgaggttaaacgcttacacaataccatcgtagaaatcaataatcataaactcaaggcccaacaagacaaacttgataaaataaataagcaattagatgaatgtgcttctgctattactaaagcccaagtagcaatcaagactgctgacagaaaccttcaaaaggcacaagactctgtcttgcgtacagagaaagaaataaaagatactgagaaagaggtggatgacctaacagcagagctgaaaagtcttgaggacaaagcagcagaggtcgtaaagaatacaaatgctgcagaggaatccttaccagagatccagaaagaacatcgcaatctgcttcaagaattaaaagttattcaagaaaatgaacatgctcttcaaaaagatgcacttagtattaagttgaaacttgaacaaatagatggtcacattgctgaacataattctaaaataaaatattggcacaaagagatttcaaaaatatcactgcatcctatagaagataatcctattgaagagatttcggttctaagcccagaggatcttgaagcgatcaagaatccagattctataacaaatcaaattgcacttttggaagcccggtgtcatgaaatgaaaccaaacctcggtgccatcgcagagtataaaaagaaggaagaattgtatttgcaacgggtagcagaattggacaaaattacttatgaaagagacagttttagacaggcatatgaagatcttcggaaacaaaggcttaatgaatttatggcaggtttttatataataacaaataaattaaaggaaaattaccaaatgcttactttgggaggggacgccgaactcgagcttgtagacagcttggatcctttctctgaaggaatcatgttcagtgttcgaccacctaagaaaagttggaaaaagatcttcaacctttcgggaggagagaaaacacttagttcattggctttagtatttgctcttcaccactacaagcccactcccctttacttcatggatgagattgatgcagcccttgattttaaaaatgtgtccattgttgcattttatatatatgaacaaacaaaaaatgcacagttcataataatttctcttcgaaataatatgtttgagatttcggatagacttattggaatttacaagacatacaacataacaaaaagtgttgctgtaaatccaaaagaaattgcatctaagggactttgttgaactttatgctgaagattcttcaagttgattcagtgtattactgatttttttctatttgtaaaggattatgagttgtataaaatacatactccctaaactagatcatgaaactggtttctgttttatgcagttgtcatttgtaaagtctaataaaatattctctataattgcttctagattacaaaaatatgacaatcttgtaagtagcagactatggagaaaaatgagttacctggagggtcaggtaacttgccaaactaaaaagtatgttagttgaggcaaagtcctaagcaaggttgtgctatcaaggctcagcataccttcgtgggcctttgatttaccaacactggaaatgcctgccaactaatcttggatagattctttaaggcattccacttagcttgccagttgagacaatcaccacagttattacccaaatactatgaacatatttttgtaaaccagtcattctgaattatagtgatgagaatttaaatatatgcttttctagaatttgatgtttgaccatttatgacttaattaccagagagccagtaaattaggacagtgtttcaacaagcctaggctatctcgtaagttgaaaaatatcccactatagttgcttcatgagtatgaagtaagatggcctctgatttacactggttcaatttacaaattttcaactttatgataggtttatccgggtactaaatgcatttcaacttgatagtttcaacttatgataggtttaccaggatgtagtcccactgttgaggagcatctatttaggggttaattactttagtaataagtggaaagtaagataccttgagtaatgtttgcctataaaattgtcagcgtatttttacactattggctcaagaatgttataatgctaagggacataagttggcaaccacttggtttttggaaggactttcggtattgtattagaagtctgccctagctgttaaatttctgggtatttatcctaaggaattaattaaagagttaattgttcctttcttcagtgggccattgttttagatatttaaaaaatccaacagtttctatcataatgtaactgtaaaaatgtaaacacattattagcatggacttttaaataaagatttaaagaaagcaagatcggaaa

SEQ ID NO: 187147 - DNA, 629 bp, Homo sapiens
  Payload ID: 16846
  Gene Symbol: SMC4
  Gene Name: structural maintenance of chromosomes 4
  ENST ID: ENST00000485867
  CDS Start-End: 159-629
ggagccgaaacaccggtaggagcggggaggtgggtactacacaaccgtctccagccttggtctgagtggactgtcctgcagagactgcaagtgaggaacttgataatagaagtttagaagagattttgaacagcattcctcctcccccgcctccagcaatgaccaatgaagctggagctcctcggcttatgataactcatattgtaaaccagaacttcaaatcctatgctggggagaaaattctgggacctttccataagcgcttttcctgtattatcgggccaaatggcagtggcaaatccaatgttattgattctatgctttttgtgtttggctatcgagcacaaaaaataagatctaaaaaactctcagtattaatacataattctgatgaacacaaggacattcagagttgtacagtagaagttcattttcaaaagataattgataaggaaggggatgattatgaagtcattcctaacagtaatttctatgtatccagaacggcctgcagagataatacttctgtctatcacataagtggaaagaaaaagacatttaaggatgttggaaatcttcttcgaagccatggaattgacttggaccataatagatttttaattttacag

SEQ ID NO: 187148 - DNA, 3998 bp, Homo sapiens
  Payload ID: 16846
  Gene Symbol: SMC4
  Gene Name: structural maintenance of chromosomes 4
  ENST ID: ENST00000469762
  CDS Start-End: 106-3897
attttcgagtgaaggacccggagccgaaacaccggtaggagcggggaggtgggtactacacaaccgtctccagccttggtctgagtggactgtcctgcagcgaccatgccccgtaaaggcacccagccctccactgcccggcgcagagaggaagggccgccgccgccgtcccctgacggcgccagcagcgacgcggagcctgagccgccgtccggccgcacggagagcccagccaccgccgcagcaatgaccaatgaagctggagctcctcggcttatgataactcatattgtaaaccagaacttcaaatcctatgctggggagaaaattctgggacctttccataagcgcttttcctgtattatcgggccaaatggcagtggcaaatccaatgttattgattctatgctttttgtgtttggctatcgagcacaaaaaataagatctaaaaaactctcagtattaatacataattctgatgaacacaaggacattcagagttgtacagtagaagttcattttcaaaagataattgataaggaaggggatgattatgaagtcattcctaacagtaatttctatgtatccagaacggcctgcagagataatacttctgtctatcacataagtggaaagaaaaagacatttaaggatgttggaaatcttcttcgaagccatggaattgacttggaccataatagatttttaattttacagggtgaagttgaacaaattgctatgatgaaaccaaaaggccagactgaacacgatgagggtatgcttgaatatttagaagatataattggttgtggacggctaaatgaacctattaaagtcttgtgtcggagagttgaaatattaaatgaacacagaggagagaagttaaacagggtaaagatggtggaaaaggaaaaggatgccttagaaggagagaaaaacatagctatcgaatttcttaccttggaaaatgaaatatttagaaaaaagaatcatgtttgtcaatattatatttatgagttgcagaaacgaattgctgaaatggaaactcaaaaggaaaaaattcatgaagataccaaagaaattaatgagaagagcaatatactatcaaatgaaatgaaagctaagaataaagatgtaaaagatacagaaaagaaactgaataaaattacaaaatttattgaggagaataaagaaaaatttacacagctagatttggaagatgttcaagttagagaaaagttaaaacatgccacgagtaaagccaaaaaactggagaaacaacttcaaaaagataaagaaaaggttgaagaatttaaaagtatacctgccaagagtaacaatatcattaatgaaacaacaaccagaaacaatgccctcgagaaggaaaaagagaaagaagaaaaaaaattaaaggaagttatggatagccttaaacaggaaacacaagggcttcagaaagaaaaagaaagtcgagagaaagaacttatgggtttcagcaaatcggtaaatgaagcacgttcaaagatggatgtagcccagtcagaacttgatatctatctcagtcgtcataatactgcagtgtctcaattaactaaggctaaggaagctctaattgcagcttctgagactctcaaagaaaggaaagctgcaatcagagatatagaaggaaaactccctcaaactgaacaagaattaaaggagaaagaaaaagaacttcaaaaacttacacaagaagaaacaaactttaaaagtttggttcatgatctctttcaaaaagttgaagaagcaaagagctcattagcaatgaatcgaagtagggggaaagtccttgatgcaataattcaagaaaaaaaatctggcaggattccaggaatatatggaagattgggggacttaggagccattgatgaaaaatacgacgtggctatatcatcctgttgtcatgcactggactacattgttgttgattctattgatatagcccaagaatgtgtaaacttccttaaaagacaaaatattggagttgcaacctttataggtttagataagatggctgtatgggcgaaaaagatgaccgaaattcaaactcctgaaaatactcctcgtttatttgatttagtaaaagtaaaagatgagaaaattcgccaagctttttattttgctttacgagataccttagtagctgacaacttggatcaagccacaagagtagcatatcaaaaagatagaagatggagagtggtaactttacagggacaaatcatagaacagtcaggtacaatgactggtggtggaagcaaagtaatgaaaggaagaatgggttcctcacttgttattgaaatctctgaagaagaggtaaacaaaatggaatcacagttgcaaaacgactctaaaaaagcaatgcaaatccaagaacagaaagtacaacttgaagaaagagtagttaagttacggcatagtgaacgagaaatgaggaacacactagaaaaatttactgcaagcatccagcgtttaatagagcaagaagaatatttgaatgtccaagttaaggaacttgaagctaatgtacttgctacagcccctgacaaaaaaaagcagaaattgctagaagaaaacgttagtgctttcaaaacagaatatgatgctgtggctgagaaagctggtaaagtagaagctgaggttaaacgcttacacaataccatcgtagaaatcaataatcataaactcaaggcccaacaagacaaacttgataaaataaataagcaattagatgaatgtgcttctgctattactaaagcccaagtagcaatcaagactgctgacagaaaccttcaaaaggcacaagactctgtcttgcgtacagagaaagaaataaaagatactgagaaagaggtggatgacctaacagcagagctgaaaagtcttgaggacaaagcagcagaggtcgtaaagaatacaaatgctgcagaggaatccttaccagagatccagaaagaacatcgcaatctgcttcaagaattaaaagttattcaagaaaatgaacatgctcttcaaaaagatgcacttagtattaagttgaaacttgaacaaatagatggtcacattgctgaacataattctaaaataaaatattggcacaaagagatttcaaaaatatcactgcatcctatagaagataatcctattgaagagatttcggttctaagcccagaggatcttgaagcgatcaagaatccagattctataacaaatcaaattgcacttttggaagcccggtgtcatgaaatgaaaccaaacctcggtgccatcgcagagtataaaaagaaggaagaattgtatttgcaacgggtagcagaattggacaaaattacttatgaaagagacagttttagacaggcatatgaagatcttcggaaacaaaggcttaatgaatttatggcaggtttttatataataacaaataaattaaaggaaaattaccaaatgcttactttgggaggggacgccgaactcgagcttgtagacagcttggatcctttctctgaaggaatcatgttcagtgttcgaccacctaagaaaagttggaaaaagatcttcaacctttcgggaggagagaaaacacttagttcattggctttagtatttgctcttcaccactacaagcccactcccctttacttcatggatgagattgatgcagcccttgattttaaaaatgtgtccattgttgcattttatatatatgaacaaacaaaaaatgcacagttcataataatttctcttcgaaataatatgtttgagatttcggatagacttattggaatttacaagacatacaacataacaaaaagtgttgctgtaaatccaaaagaaattgcatctaagggactttgttgaactttatgctgaagattcttcaagttgattcagtgtattactgatttttttctatttgtaaaggattatgagttgtataaaatacatactccctaaactag

SEQ ID NO: 187149 - DNA, 582 bp, Homo sapiens
  Payload ID: 16846
  Gene Symbol: SMC4
  Gene Name: structural maintenance of chromosomes 4
  ENST ID: ENST00000472991
  CDS Start-End: 165-582
aggcgccattttcgagtgaaggacccggagccgaaacaccggtaggagcggggaggtgggtactacacaaccgtctccagccttggtctgagtggactgtcctgcagcgcttttcctgtattatcgggccaaatggcagtggcaaatccaatgttattgattctatgctttttgtgtttggctatcgagcacaaaaaataagatctaaaaaactctcagtattaatacataattctgatgaacacaaggacattcagagttgtacagtagaagttcattttcaaaagataattgataaggaaggggatgattatgaagtcattcctaacagtaatttctatgtatccagaacggcctgcagagataatacttctgtctatcacataagtggaaagaaaaagacatttaaggatgttggaaatcttcttcgaagccatggaattgacttggaccataatagatttttaattttacagggtgaagttgaacaaattgctatgatgaaaccaaaaggccagactgaacacgatgagggtatgcttgaatatttagaagatataattggttgtggacggctaaatg

SEQ ID NO: 187150 - DNA, 1971 bp, Homo sapiens
  Payload ID: 16846
  Gene Symbol: SMC4
  Gene Name: structural maintenance of chromosomes 4
  ENST ID: ENST00000469858
  CDS Start-End: 105-257
ttttcgagtgaaggacccggagccgaaacaccggtaggagcggggaggtgggtactacacaaccgtctccagccttggtctgagtggactgtcctgcagcgaccatgccccgtaaaggcacccagccctccactgcccggcgcagagaggaagggccgccgccgccgtcccctgacggcgccagcagcgacgcggagcctgagccgccgtccggccgcacggagagcccagccaccgccgcagagactgcaaggtgaagttgaacaaattgctatgatgaaaccaaaaggccagactgaacacgatgagggtatgcttgaatatttagaagatataattggttgtggacggctaaatgaacctattaaagtcttgtgtcggagagttgaaatattaaatgaacacagaggagagaagttaaacagggtaaagatggtggaaaaggaaaaggatgccttagaaggagagaaaaacatagctatcgaatttcttaccttggaaaatgaaatatttagaaaaaagaatcatgtttgtcaatattatatttatgagttgcagaaacgaattgctgaaatggaaactcaaaaggaaaaaattcatgaagataccaaagaaattaatgagaagagcaatatactatcaaatgaaatgaaagctaagaataaagatgtaaaagatacagaaaagaaactgaataaaattacaaaatttattgaggagaataaagaaaaatttacacagctagatttggaagatgttcaagttagagaaaagttaaaacatgccacgagtaaagccaaaaaactggagaaacaacttcaaaaagataaagaaaaggttgaagaatttaaaagtatacctgccaagagtaacaatatcattaatgaaacaacaaccagaaacaatgccctcgagaaggaaaaagagaaagaagaaaaaaaattaaaggaagttatggatagccttaaacaggaaacacaagggcttcagaaagaaaaagaaagtcgagagaaagaacttatgggtttcagcaaatcggtaaatgaagcacgttcaaagatggatgtagcccagtcagaacttgatatctatctcagtcgtcataatactgcagtgtctcaattaactaaggctaaggaagctctaattgcagcttctgagactctcaaagaaaggaaagctgcaatcagagatatagaaggaaaactccctcaaactgaacaagaattaaaggagaaagaaaaagaacttcaaaaacttacacaagaagaaacaaactttaaaagtttggttcatgatctctttcaaaaagttgaagaagcaaagagctcattagcaatgaatcgaagtagggggaaagtccttgatgcaataattcaagaaaaaaaatctggcaggattccaggaatatatggaagattgggggacttaggagccattgatgaaaaatacgacgtggctatatcatcctgttgtcatgcactggactacattgttgttgattctattgatatagcccaagaatgtgtaaacttccttaaaagacaaaatattggagttgcaacctttataggtttagataagatggctgtatgggcgaaaaagatgaccgaaattcaaactcctgaaaatactcctcgtttatttgatttagtaaaagtaaaagatgagaaaattcgccaagctttttattttgctttacgagataccttagtagctgacaacttggatcaagccacaagagtagcatatcaaaaagatagaagatggagagtggtaactttacagggacaaatcatagaacagtcaggtacaatgactggtggtggaagcaaagtaatgaaaggaagaatgggttcctcacttgttattgaaatctctgaagaagaggtaaacaaaatggaatcacagttgcaaaacgactctaaaaaagcaatgcaaatccaagaacagaaagtacaacttgaagaa

SEQ ID NO: 187151 - DNA, 708 bp, Homo sapiens
  Payload ID: 16846
  Gene Symbol: SMC4
  Gene Name: structural maintenance of chromosomes 4
  ENST ID: ENST00000497311
  CDS Start-End: 190-708
gggcccgagaccccgcctctcggcgagcccgccctcttctgaagaggcgtttctggaccactgagccccgcctcccactgcgccattttcgagtgaaggacccggagccgaaacaccggtaggagcggggaggtgggtactacacaaccgtctccagccttggtctgagtggactgtcctgcagcgaccatgccccgtaaaggcacccagccctccactgcccggcgcagagaggaagggccgccgccgccgtcccctgacggcgccagcagcgacgcggagcctgagccgccgtccggccgcacggagagcccagccaccgccgcagagactgcaagtgaggaacttgataatagaagtttagaagagattttgaacagcattcctcctcccccgcctccagcaatgaccaatgaagctggagctcctcggcttatgataactcatattgtaaaccagaacttcaaatcctatgctggggagaaaattctgggacctttccataagcgcttttcctgtattatcgggccaaatggcagtggcaaatccaatgttattgattctatgctttttgtgtttggctatcgagcacaaaaaataagatctaaaaaactctcagtattaatacataattctgatgaacacaaggacattcagagttgtacagtagaagttcattttcaaaagataattgataaggaaggggat

SEQ ID NO: 187152 - DNA, 849 bp, Homo sapiens
  Payload ID: 16846
  Gene Symbol: SMC4
  Gene Name: structural maintenance of chromosomes 4
  ENST ID: ENST00000465903
  CDS Start-End: 340-849
attttaggcgccattttcgagtgaaggacccggagccgaaacaccggtaggagcggggaggtgggtactacacaaccgtctccagccttggtctgagtggactgtcctgcaggcacgtctagattttcccacttacataggtcttgttaagaaaccagtcctgccttcttgccactcgtgtctttcgatggctcccttcccgaagtcccgctgcctctaagcggagtgttaagcggggctctcggaagccggtggaccgagatttccccgggtggggcgggcgcggtgtagcggcccgcgggctgacttgctcccggctgtcccccggccccagcgaccatgccccgtaaaggcacccagccctccactgcccggcgcagagaggaagggccgccgccgccgtcccctgacggcgccagcagcgacgcggagcctgagccgccgtccggccgcacggagagcccagccaccgccgcagagactgcaagtgaggaacttgataatagaagtttagaagagattttgaacagcattcctcctcccccgcctccagcaatgaccaatgaagctggagctcctcggcttatgataactcatattgtaaaccagaacttcaaatcctatgctggggagaaaattctgggacctttccataagcgcttttcctgtattatcgggccaaatggcagtggcaaatccaatgttattgattctatgctttttgtgtttggctatcgagcacaaaaaataagatctaaaaaactctcagtattaatacataattctgatgaacacaaggacattcagagttgtacagtagaagttcattttcaaaagataattgataag

SEQ ID NO: 187153 - DNA, 566 bp, Homo sapiens
  Payload ID: 16846
  Gene Symbol: SMC4
  Gene Name: structural maintenance of chromosomes 4
  ENST ID: ENST00000467468
  CDS Start-End: 210-566
attttcgagtgaaggacccggagccgaaacaccggtaggagcggggagcaatgaccaatgaagctggagctcctcggcttatgataactcatattgtaaaccagaacttcaaatcctatgctggggagaaaattctgggacctttccataagcgcttttcctgtattatcgggccaaatggcagtggcaaatccaatgttattgattctatgctttttgtgtttggctatcgagcacaaaaaataagatctaaaaaactctcagtattaatacataattctgatgaacacaaggacattcagagttgtacagtagaagttcattttcaaaagataattgataaggaaggggatgattatgaagtcattcctaacagtaatttctatgtatccagaacggcctgcagagataatacttctgtctatcacataagtggaaagaaaaagacatttaaggatgttggaaatcttcttcgaagccatggaattgacttggaccataatagatttttaattttacagggtgaagttgaacaaattgctatgatgaaaccaaaaggccagact

SEQ ID NO: 187154 - DNA, 1553 bp, Homo sapiens
  Payload ID: 16846
  Gene Symbol: SMC4
  Gene Name: structural maintenance of chromosomes 4
  ENST ID: ENST00000489573
  CDS Start-End: 284-1553
cccggagccgaaacaccggtaggagcggggaggtgggtactacacaaccgtctccagccttggtctgagtggactgtcctgcaggtcttgttaagaaaccagtcctgccttcttgccactcgtgtctttcgatggctcccttcccgaagtcccgctgcctctaagcggagtgttaagcggggctctcggaagccggtggaccgagatttccccgggtggggcgggcgcggtgtagcggcccgcgggctgacttgctcccggctgtcccccggccccagcgaccatgccccgtaaaggcacccagccctccactgcccggcgcagagaggaagggccgccgccgccgtcccctgacggcgccagcagcgacgcggagcctgagccgccgtccggccgcacggagagcccagccaccgccgcagagactgcaagtgaggaacttgataatagaagtttagaagagattttgaacagcattcctcctcccccgcctccagcaatgaccaatgaagctggagctcctcggcttatgataactcatattgtaaaccagaacttcaaatcctatgctggggagaaaattctgggacctttccataagcgcttttcctgtattatcgggccaaatggcagtggcaaatccaatgttattgattctatgctttttgtgtttggctatcgagcacaaaaaataagatctaaaaaactctcagtattaatacataattctgatgaacacaaggacattcagagttgtacagtagaagttcattttcaaaagataattgataaggaaggggatgattatgaagtcattcctaacagtaatttctatgtatccagaacggcctgcagagataatacttctgtctatcacataagtggaaagaaaaagacatttaaggatgttggaaatcttcttcgaagccatggaattgacttggaccataatagatttttaattttacagggtgaagttgaacaaattgctatgatgaaaccaaaaggccagactgaacacgatgagggtatgcttgaatatttagaagatataattggttgtggacggctaaatgaacctattaaagtcttgtgtcggagagttgaaatattaaatgaacacagaggagagaagttaaacagggtaaagatggtggaaaaggaaaaggatgccttagaaggagagaaaaacatagctatcgaatttcttaccttggaaaatgaaatatttagaaaaaagaatcatgtttgtcaatattatatttatgagttgcagaaacgaattgctgaaatggaaactcaaaaggaaaaaattcatgaagataccaaagaaattaatgagaagagcaatatactatcaaatgaaatgaaagctaagaataaagatgtaaaagatacagaaaagaaactgaataaaattacaaaatttattgaggagaataaagaaaaatttacacagctagatttggaagatgttcaagttagagaaaagttaaaacatgccacgagtaaagccaaaaaactggagaaacaacttcaaaaagataaagaaa

SEQ ID NO: 187155 - DNA, 583 bp, Homo sapiens
  Payload ID: 16846
  Gene Symbol: SMC4
  Gene Name: structural maintenance of chromosomes 4
  ENST ID: ENST00000485645
  CDS Start-End: 65-583
ttttaggcgccattttcgagtgaaggacccggagccgaaacaccggtaggagcggggagcgaccatgccccgtaaaggcacccagccctccactgcccggcgcagagaggaagggccgccgccgccgtcccctgacggcgccagcagcgacgcggagcctgagccgccgtccggccgcacggagagcccagccaccgccgcagagactgcaagtgaggaacttgataatagaagtttagaagagattttgaacagcattcctcctcccccgcctccagcaatgaccaatgaagctggagctcctcggcttatgataactcatattgtaaaccagaacttcaaatcctatgctggggagaaaattctgggacctttccataagcgcttttcctgtattatcgggccaaatggcagtggcaaatccaatgttattgattctatgctttttgtgtttggctatcgagcacaaaaaataagatctaaaaaactctcagtattaatacataattctgatgaacacaaggacattcagagttgtacagtagaagttcattttcaaaagataattgataaggaaggggat

SEQ ID NO: 187156 - DNA, 5033 bp, Homo sapiens
  Payload ID: 16846
  Gene Symbol: SMC4
  Gene Name: structural maintenance of chromosomes 4
  Uniprot ID: Q9NTJ3
  ENST ID: ENST00000462787
  CDS Start-End: 1160-4852
cggagccgaaacaccggtaggagcggggaggtgggtactacacaaccgtctccagccttggtctgagtggactgtcctgcaggtaaagtacttctcttcctggtcaggttgtcacgctcttacttcctgccttgtccgcgagcgcctggaaaatagaggccttgagcccgagcggcgaagtccgggcttgaagctgccgctgggagatttctcttgctgtcacccctcccccctcggccgctccccggcggcccgggctcccgcgcgcagctcccgggcgccacttttccaagctactcaaatgtctcggggaggccctgagcctcgcagatcttttctttaaaaaatcctagtctctatctggaaaagggcgtctccccctacccctcttccttctgccaacggactagtcaccgggtctcagccttcgctggtgacctttcatggtttactgtccaacgggactccgcctggggagctggagagacaaactcttgccactccaaaattagcaagcgctgccagcgtccgacttgaagttgctagtggttagtcccagccttcgcccttcgcggtccgaccgctgagaggagggagacttcgttatgccccgggccgtcaacggcgccaggagctaaagggcgggcagacgaaagcgggcggcgagtcgccagttagtcttcaccgctctggagagagttgctagccacgggatcctgacccggacacgaactcgtttctccacgtcggtgcgcgcttgcatccctggccccgaaagcgtgggaatgtccggaaatgctggcgtatgggagttccttaattagaaatgcgttagcgaatattatacgcttatactatgggcggacgggtggagagccttaaaaacaacaacaacaaactaagcagttgctcaatcgttgattgatcctcaggcacgtctagattttcccacttacataggtcttgttaagaaaccagtcctgccttcttgccactcgtgtctttcgatggctcccttcccgaagtcccgctgcctctaagcggagtgttaagcggggctctcggaagccggtggaccgagatttccccgggtggggcgggcgcggtgtagcggcccgcgggctgacttgctcccggctgtcccccggccccagcgaccatgccccgtaaaggcacccagccctccactgcccggcgcagagaggaagggccgccgccgccgtcccctgacggcgccagcagcgacgcggagcctgagccgccgtccggccgcacggagagcccagccaccgccgcagagactgcaagtgaggaacttgataatagaagtttagaagagattttgaacagcattcctcctcccccgcctccagcaatgaccaatgaagctggagctcctcggcttatgataactcatattgtaaaccagaacttcaaatcctatgctggggagaaaattctgggacctttccataagcgcttttcctgtattatcgggccaaatggcagtggcaaatccaatgttattgattctatgctttttgtgtttggctatcgagcacaaaaaataagatctaaaaaactctcagtattaatacataattctgatgaacacaaggacattcagagttgtacagtagaagttcattttcaaaagataattgataaggaaggggatgattatgaagtcattcctaacagtaatttctatgtatccagaacggcctgcagagataatacttctgtctatcacataagtggaaagaaaaagacatttaaggatgttggaaatcttcttcgaagccatggaattgacttggaccataatagatttttaattttacagggtgaagttgaacaaattgctatgatgaaaccaaaaggccagactgaacacgatgagggtatgcttgaatatttagaagatataattggttgtggacggctaaatgaacctattaaagtcttgtgtcggagagttgaaatattaaatgaacacagaggagagaagttaaacagggtaaagatggtggaaaaggaaaaggatgccttagaaggagagaaaaacatagctatcgaatttcttaccttggaaaatgaaatatttagaaaaaagaatcatgtttgtcaatattatatttatgagttgcagaaacgaattgctgaaatggaaactcaaaaggaaaaaattcatgaagataccaaagaaattaatgagaagagcaatatactatcaaatgaaatgaaagctaagaataaagatgtaaaagatacagaaaagaaactgaataaaattacaaaatttattgaggagaataaagaaaaatttacacagctagatttggaagatgttcaagttagagaaaagttaaaacatgccacgagtaaagccaaaaaactggagaaacaacttcaaaaagataaagaaaaggttgaagaatttaaaagtatacctgccaagagtaacaatatcattaatgaaacaacaaccagaaacaatgccctcgagaaggaaaaagagaaagaagaaaaaaaattaaaggaagttatggatagccttaaacaggaaacacaagggcttcagaaagaaaaagaaagtcgagagaaagaacttatgggtttcagcaaatcggtaaatgaagcacgttcaaagatggatgtagcccagtcagaacttgatatctatctcagtcgtcataatactgcagtgtctcaattaactaaggctaaggaagctctaattgcagcttctgagactctcaaagaaaggaaagctgcaatcagagatatagaaggaaaactccctcaaactgaacaagaattaaaggagaaagaaaaagaacttcaaaaacttacacaagaagaaacaaactttaaaagtttggttcatgatctctttcaaaaagttgaagaagcaaagagctcattagcaatgaatcgaagtagggggaaagtccttgatgcaataattcaagaaaaaaaatctggcaggattccaggaatatatggaagattgggggacttaggagccattgatgaaaaatacgacgtggctatatcatcctgttgtcatgcactggactacattgttgttgattctattgatatagcccaagaatgtgtaaacttccttaaaagacaaaatattggagttgcaacctttataggtttagataagatggctgtatgggcgaaaaagatgaccgaaattcaaactcctgaaaatactcctcgtttatttgatttagtaaaagtaaaagatgagaaaattcgccaagctttttattttgctttacgagataccttagtagctgacaacttggatcaagccacaagagtagcatatcaaaaagatagaagatggagagtggtaactttacagggacaaatcatagaacagtcaggtacaatgactggtggtggaagcaaagtaatgaaaggaagaatgggttcctcacttgttattgaaatctctgaagaagaggtaaacaaaatggaatcacagttgcaaaacgactctaaaaaagcaatgcaaatccaagaacagaaagtacaacttgaagaaagagtagttaagttacggcatagtgaacgagaaatgaggaacacactagaaaaatttactgcaagcatccagcgtttaatagagcaagaagaatatttgaatgtccaagttaaggaacttgaagctaatgtacttgctacagcccctgacaaaaaaaagcagaaattgctagaagaaaacgttagtgctttcaaaacagaatatgatgctgtggctgagaaagctggtaaagtagaagctgaggttaaacgcttacacaataccatcgtagaaatcaataatcataaactcaaggcccaacaagacaaacttgataaaataaataagcaattagatgaatgtgcttctgctattactaaagcccaagtagcaatcaagactgctgacagaaaccttcaaaaggcacaagactctgtcttgcgtacagagaaagaaataaaagatactgagaaagaggtggatgacctaacagcagagctgaaaagtcttgaggacaaagcagcagaggtcgtaaagaatacaaatgctgcagagatttcaaaaatatcactgcatcctatagaagataatcctattgaagagatttcggttctaagcccagaggatcttgaagcgatcaagaatccagattctataacaaatcaaattgcacttttggaagcccggtgtcatgaaatgaaaccaaacctcggtgccatcgcagagtataaaaagaaggaagaattgtatttgcaacgggtagcagaattggacaaaattacttatgaaagagacagttttagacaggcatatgaagatcttcggaaacaaaggcttaatgaatttatggcaggtttttatataataacaaataaattaaaggaaaattaccaaatgcttactttgggaggggacgccgaactcgagcttgtagacagcttggatcctttctctgaaggaatcatgttcagtgttcgaccacctaagaaaagttggaaaaagatcttcaacctttcgggaggagagaaaacacttagttcattggctttagtatttgctcttcaccactacaagcccactcccctttacttcatggatgagattgatgcagcccttgattttaaaaatgtgtccattgttgcattttatatatatgaacaaacaaaaaatgcacagttcataataatttctcttcgaaataatatgtttgagatttcggatagacttattggaatttacaagacatacaacataacaaaaagtgttgctgtaaatccaaaagaaattgcatctaagggactttgttgaactttatgctgaagattcttcaagttgattcagtgtattactgatttttttctatttgtaaaggattatgagttgtataaaatacatactccctaaactagatcatgaaactggtttctgttttatgcagttgtcatttgtaaagtctaataaaatattctctataattgcttctagatta

SEQ ID NO: 187157 - DNA, 821 bp, Homo sapiens
  Payload ID: 16846
  Gene Symbol: SMC4
  Gene Name: structural maintenance of chromosomes 4
  ENST ID: ENST00000490207
  CDS Start-End: 281-821
ggagccgaaacaccggtaggagcggggaggtgggtactacacaaccgtctccagccttggtctgagtggactgtcctgcaggtcttgttaagaaaccagtcctgccttcttgccactcgtgtctttcgatggctcccttcccgaagtcccgctgcctctaagcggagtgttaagcggggctctcggaagccggtggaccgagatttccccgggtggggcgggcgcggtgtagcggcccgcgggctgacttgctcccggctgtcccccggccccagcgaccatgccccgtaaaggcacccagccctccactgcccggcgcagagaggaagggccgccgccgccgtcccctgacggcgccagcagcgacgcggagcctgagccgccgtccggccgcacggagagcccagccaccgccgcagagactgcaagtgaggaacttgataatagaagtttagaagagattttgaacagcattcctcctcccccgcctccagcaatgaccaatgaagctggagctcctcggcttatgataactcatattgtaaaccagaacttcaaatcctatgctggggagaaaattctgggacctttccataagcgcttttcctgtattatcgggccaaatggcagtggcaaatccaatgttattgattctatgctttttgtgtttggctatcgagcacaaaaaataagatctaaaaaactctcagtattaatacataattctgatgaacacaaggacattcagagttgtacagtagaagttcattttcaaaagataattgataaggaaggggatgattatgaagtcattcctaaca

SEQ ID NO: 187158 - DNA, 5980 bp, Homo sapiens
  Payload ID: 16847
  Gene Symbol: SMC5
  Gene Name: structural maintenance of chromosomes 5
  Uniprot ID: Q8IY18
  ENST ID: ENST00000361138
  CDS Start-End: 118-3423
ggtaacagttcgcggcagttcgcgcgggagcggggcgcctgggtggatgggcgcttgggcgcctgggctgccggacggtgggaacggaagtcgctgtgggacgctgaggaagccaggatggcgactccgagcaagaagacgtcaactccaagcccccagccttccaagagagctctcccgagagacccttcgtcggaggtcccgagcaagaggaagaattcggccccgcagctgccgctgttgcagtcgtccgggcctttcgtggaaggctctatcgtccgcatctcgatggagaacttcctaacatatgatatttgtgaagtatctcctggaccccacttgaatatgatcgttggagccaatggaacagggaagtcgagcattgtgtgtgccatttgccttggtttagctggaaaacctgctttcatgggacgagcagataaggttgggttttttgtgaagagaggatgttctagaggcatggttgaaattgaattgttcagggcttctggaaatcttgtaatcacccgtgagattgatgtggcaaaaaatcagtccttttggttcatcaacaaaaaatctacaacccagaaaatagtggaagagaaagttgcagccttaaatattcaagtggggaatctttgccagtttctccctcaggacaaagttggagaatttgctaaactcagcaaaattgaactcctcgaagccactgaaaagtcaattggtcccccagaaatgcacaaatatcactgtgaactcaaaaacttaagggagaaagaaaaacagctcgagacctcatgcaaagagaaaactgagtatctacagaaaatggttcagaggaatgaaagatataaacaagatgtggagaggttctatgaacggaagcgacatttagatttaattgagatgcttgaagcaaaaaggccatgggtggaatatgaaaatgttcgtcaggaatatgaagaagtaaaactagttcgtgaccgagtgaaggaagaggtcagaaaacttaaagaagggcagattcctgtaacatgtcgaattgaagaaatggaaaacgagcgtcacaatttggaggctcgaatcaaagaaaaggcaacagatattaaggaggcatctcaaaaatgcaaacagaagcaagatgttatagaaaggaaagataaacatattgaggaacttcagcaggctttaatagtaaagcaaaatgaagagcttgaccgacagaggagaataggtaatacccgcaaaatgatagaggatttgcaaaatgaactaaagaccacggaaaactgcgagaatcttcagccccagattgatgccattacaaatgatctgagacggattcaggatgaaaaggcattatgtgaaggcgaaataattgataagcgaagagagagggaaactctagagaaggagaaaaagagtgtggacgatcatattgtacgttttgacaatcttatgaatcagaaggaagataagctaagacagagattccgtgacacgtatgatgctgttttatggctaagaaataacagagacaaatttaaacaaagagtctgtgagcccataatgctcacgatcaatatgaaagataataaaaatgccaaatatattgaaaatcatattccatcaaatgacttaagagcctttgtatttgaaagtcaagaagatatggaggttttcctcaaagaggttcgtgacaataaaaaattaagagtaaatgctgttattgctcccaagagttcatatgcagacaaagcaccttcaagatctttgaatgaacttaaacaatacggatttttctcttatttgagagaattatttgatgcacctgatcctgtaatgagttacctttgctgtcagtatcatattcatgaagttcctgtaggaactgaaaagaccagagaaagaattgaacgggtaatacaagaaacccgattaaaacagatttatacagcagaagaaaagtatgtggtgaaaacttctttttattcaaacaaagttatttctagtaacacatctctaaaagtagcgcagtttctcactgtcactgtggacctagagcagagaagacacttagaagaacagctaaaggaaattcatagaaaattgcaagcagtggattcagggttgattgccttacgtgaaacaagcaaacatctggagcacaaagacaatgaacttagacaaaagaagaaggagcttcttgagagaaaaaccaagaaaagacaactggaacaaaaaatcagttccaaactaggaagtttaaagctgatggaacaggatacttgcaatcttgaagaggaagagcgaaaagcaagtaccaaaatcaaagaaataaatgttcaaaaagcgaaacttgttaccgaattaacaaacctaataaagatttgtacttctttgcatatacaaaaagtagatttaattctccaaaatactacagtgatctctgagaagaacaaattagaatcagattatatggccgcatcttcacaactccgtcttacagagcaacatttcattgaattggatgaaaatagacagagattattgcagaaatgcaaggaacttatgaaaagagctaggcaagtatgtaacctgggtgcagagcagactcttcctcaagaataccagacacaagtacccaccattccaaatggacacaactcctcactccccatggttttccaagaccttccaaacacattggatgaaattgatgctttattaactgaagaaagatcaagagcttcctgcttcacgggactgaatcctacaattgttcaggaatatacaaaaagagaagaagaaatagaacagttaactgaggaactaaagggaaagaaagttgaactagatcaatacagggaaaacatttcacaggtaaaagaaaggtggcttaatcctttaaaagagctggtagaaaaaattaatgaaaaattcagcaatttttttagttccatgcagtgtgctggtgaagttgatctccatacagaaaatgaggaagattatgataaatatggaattcgaattagagtcaaatttcgaagtagtactcaactgcatgaattaactcctcatcatcaaagtggaggtgaaagaagtgtttctaccatgttatacttgatggcacttcaggagctaaatagatgtccattcagagtagttgatgaaatcaatcagggaatggacccaatcaatgaacggagagtgtttgaaatggttgtaaatactgcctgtaaagaaaatacatctcaatactttttcataacaccaaagctcctgcaaaatcttccttattctgaaaagatgacagttttgtttgtctacaatggccctcatatgctggaaccaaacacatggaatttaaaggctttccaaaggcggcggcgccgtattacattcactcaaccttcttaataaaagtaaagagagggaacttgggaattttttttgttaaattctgtttataagtatggctcaactgaataaaaggagattcactaaaacgaaaagcagttatttttggaaacctgcttttaaatacaaataggttgataatggaaactataatgacctttccaaaatagcagctggtagtaaaagttaagtcttcttcagtcttggttgaacttgagttcttggcactctgaccatgagtcattcagttctcatgttaaaatgtacttaatattacaaatcaaaggtacagtggaagaagggttaatcacaagaagttacttatatggtagccctgagctttaattgcagagtaactttaattacttttagagcctaaagatgactctagagcctaagtcctagtttctcccaatgttatatttaattttaaaaaattgatatgaaaatgtctaatgtatagtaataatttatgacagatctagtcatttcttcctattaaaaaagattaccttatctccagtaggaaatggaattttatgggcctttaaaagaaagttttatgaaacttgatgctataattttattggtatttcaaggggaaaaaagcactggggttcaaaaatggtagcagaactgctttgaaatgctgcaaggtggccactagatgatgcaaaatacaaccaaaagattgactgagaataaaattaggtgacaagggtttttaaagaataaccttttaaagtgtgggggcaggggttgcttttttttattttatttaaagtcaattatattttacatcttacatttctaaaagcattttataattatttttagtaagatttttcttaaaatttcatatactggtttctacaatttatatttgaaatttctcagtgttatgtaaagagtgatggaaaagcattgatttctttaaaaccgtaatgtttttagaacttaagcctatagggcctttcttacaatgttgatgtacccattatcttagaaaatctagtttaaactgttttctttcaccgcaaaagaattaaatgggaaaatcatttgtttatctctaagttatactaattagtagaaccaaacaaattatcttcttttaaaaaataaatcttataggaaaatagacagtccaaagtcatgtctttgaacagtggattggatctgtgccagtaatgacaaaattatttttttgacttgcttgcctgaataaattgaagaattgctttcagtttgggttttgtatattcttaagtagccattgaaatttatattcttaactaggtcaaaaaataatgagccataagtttatgtcctctcacttagacattttctctttaaaaaggtattttcttctttataaacattttaaaagagccttcccttcttaaactaactccagtgcatgaagtgtgaaaatattttaaaatgacatttttactaatatgagcaagtcatgtaaacattgaagaacttggtaacatattagtaaatggatattaccaaatgttttcatcgttaattactttgcgttccaccaaaatatctttactaaaatgtgcttggtgtagtttgtttattgtctaaattagtaccagtcatcttatttctgcaaaatgagtatcaatgtgaaaaagacacgtgaagattaagcatgtttgaaaataaaatggtcaattacatttcaatttacataggccaacaactgttccatactttgtttgtaaacatttaatttctctactggacaaaattaatatttggctttacattgaattttgagctgtgaagaataaattatgtatcattttagcatattaaacagtagtaagtctagcacatagtctcagccacttaaaacaaaagtttttttgtttgtttgtttgtttgtttttttgagatggagtctcactctgttgcccaggctggagtgcagtggcgtgatctcggcttactgcaacctccgcctcccgggttcaagcgattctcctgcctcagcctcccaagtaactgggacaacaggcgcgtcccaccacacccagctaattttttatacttttagtagagatggggtttcagcatattggccaggctggtctcgaactcctgaccttgtgatccacccgcctcggcctcccaaagtgctgggattataggcgtgagcccctgcacccggccaaaagttgatttttaattacataaaaatcgtaaaaacttctagtaaaaacttgatttggtgaatacagttatatttaaaaaccttaaggtgacaagcattttctatgcctaaatcttcattggtttgcctggaaagagtctctgttaaaagattttccatattcaaagtaaaaggaaagatttcttgctttctaattgtcttttggacacatgcctattttctttgaggtataaacctttagatgtgaaaaatgtaatttcattctgctattgtgtgtgcttgtgtgtgtgtaattgaaaaaactgggaaatcctgctttgttggtaataaatcaatatttttatattcttttggtgtatgtta

SEQ ID NO: 187159 - DNA, 5173 bp, Homo sapiens
  Payload ID: 16848
  Gene Symbol: SMC6
  Gene Name: structural maintenance of chromosomes 6
  Uniprot ID: Q96SB8
  ENST ID: ENST00000351948
  CDS Start-End: 211-3486
ggagggcggggcgcaggcgcggttagtaccgcggtgggcgccggggctcccgggaatctaccttctcctgcggccggcacgcggttcccagggggccagcggcggtcagccgaggtcgagacgcccgcagggtggccttagcggccggtcgtaccacggcagccccgccgatcaggttcctttgggagacttcgacttgttggcgacctgatggccaaaagaaaggaagaaaatttttcctctcctaaaaatgccaaaaggccaagacaagaagaattggaggattttgataaagatggtgacgaagacgaatgtaaaggtactactttgactgcagcagaagttggaataattgagagtattcacctaaaaaacttcatgtgtcattcaatgcttggaccttttaagtttggttctaatgtcaactttgttgttggcaacaatggaagtgggaagagtgcagtactcacagctctcatagtcggtcttggtggaagagcagttgctactaatagaggatcctctttaaaaggttttgtgaaagatggacagaactctgcagatatctcaataacattgaggaacagaggagatgatgcctttaaagccagtgtgtatggtaactctatacttatacagcaacacatcagcatagatggaagtcgatcttataaacttaaaagtgcaacaggctccgtggtttccacgaggaaagaagagctgattgcaattcttgatcattttaacatccaggtggataatccagtttctgttttaacacaagaaatgagcaagcagttcttacagtctaaaaatgaaggagacaaatacaaattcttcatgaaagcaacgcaacttgaacagatgaaggaagattattcatacattatggaaacgaaagaaagaacaaaggagcagatacatcaaggagaagagcggcttactgaactaaagcgccagtgtgtagagaaagaggaacgttttcaaagtattgctggtttaagtacaatgaagactaatttagagtccttgaaacatgaaatggcttgggcagtggtcaatgaaattgaaaaacaattgaatgccatcagagataatatcaaaattggagaagatcgtgctgctagacttgacaggaaaatggaagaacagcaggtcagacttaatgaggcagaacaaaagtacaaggatattcaagacaaactagaaaagattagtgaagagacaaatgcacgagcaccagaatgtatggcattgaaagcagatgttgttgctaagaaaagggcctataatgaagctgaggttttatataaccgatccttaaacgaatataaagcattaaagaaagatgatgagcagctttgtaaacgaattgaagagctgaaaaaaagtactgaccaatctttggaacctgaacggttggaaagacaaaaaaaaatatcttggttaaaagagagagtaaaggcctttcaaaatcaagaaaattcagtcaatcaagagatcgaacagtttcagcaagccatagaaaaggacaaagaagaacatggcaaaattaagagagaagaattagatgtgaagcatgcactgagctacaatcagaggcaactgaaagaattgaaagatagtaaaactgatcgactcaaaagatttggccctaatgttccagctcttcttgaagccatagatgatgcttatagacaaggacattttacctataaacctgtaggccctttaggagcttgcattcatcttcgggacccagaacttgctttggctattgaatcttgcttaaaagggcttctgcaggcctattgttgccataatcatgctgatgaaagggtccttcaggcactcatgaaaaggttttatttaccagggacctcacggccaccgataatagtttctgagtttcggaatgagatatatgatgtaagacacagagctgcttatcatccagactttccaacagttctgacagctttagaaatagataatgcggttgtggcaaatagcctaattgacatgagaggcatagagacagtgctactaatcaaaaataattctgtagctcgtgcagtaatgcagtcccaaaagccacccaaaaattgtagagaagcttttactgctgatggtgatcaagtttttgcaggacgttattattcatctgaaaatacaagacctaagttcctaagcagagatgtggattctgaaataagtgacttggagaatgaggttgaaaataagacggcccagatattaaatcttcagcaacatttatctgcccttgaaaaagatattaaacacaatgaggaacttcttaaaaggtgccaactacattataaagaactaaagatgaaaataagaaaaaatatttctgaaattcgggaacttgagaacatagaagaacaccagtctgtagatattgcaactttggaagatgaagctcaggaaaataaaagcaaaatgaaaatggttgaggaacatatggagcaacaaaaagaaaatatggagcatcttaaaagtctgaaaatagaagcagaaaataagtatgatgcaattaaattcaaaattaatcaactatcggagctagcagacccacttaaggatgaattaaaccttgctgattctgaagtggataaccaaaaacgagggaaacgacattatgaagaaaaacaaaaagaacacttggataccttaaataaaaagaaacgagaactggatatgaaagagaaagaactagaggagaaaatgtcacaagcaagacaaatctgcccagagcgtatagaagtagaaaaatctgcatcaattctggacaaagaaattaatcgattaaggcagaagatacaggcagaacatgctagtcatggagatcgagaggaaataatgaggcagtaccaagaagcaagagagacctatcttgatctggatagtaaagtgaggactttaaaaaagtttattaaattactgggagaaatcatggagcacagattcaagacatatcaacaatttagaaggtgtttgactttacgatgcaaattatactttgacaacttactatctcagcgggcctattgtggaaaaatgaattttgaccacaagaatgaaactctaagtatatcagttcagcctggagaaggaaataaagctgctttcaatgacatgagagccttgtctggaggtgaacgttctttctccacagtgtgttttattctttccctgtggtccatcgcagaatctcctttcagatgcctggatgaatttgatgtctacatggatatggttaataggagaattgccatggacttgatactgaagatggcagattcccagcgttttagacagtttatcttgctcacacctcaaagcatgagttcacttccatccagtaaactgataagaattctccgaatgtctgatcctgaaagaggacaaactacattgcctttcagacctgtgactcaagaagaagatgatgaccaaaggtgatttgtaacttaacatgccttgtcctgatgttgaaggatttgtgaagggaaaaaaaattctggactctttgatataataaaatgagactggaggcattctgaaatgaaagaaactcctttatatatccaaccacaatcaaacatataaataagcctggaaaaccaactacaacctgcaatttaagattactattactttaagaaaatcaatttcatagtattggttttaaatctttttaagtttttttaatacgatctatttttataggttctttttcagaagtaaaattttgtacatatatacatgtacatatctgtttagtttgggttcatttctataacattttgtaagaaaataaaagtttgagcacctgattatatttagttttgcttttccagatattacattctatagttaccaaaaatggttgaagggagggatttctcattgcagagggtggggtgcaagggaataagacacttgtacggaacactgaagctttgccaacttctacacatgccttttttgcagtcctttaactgtccaccctaccaagagcttataaccagtatcagaactggataatgacgcagtttttcactctgacctccatcatgcttgcctgatttaaaagccctcagtttgcagtccagggactgttcaggcttgtcctcagctgagaggacacaggctagagggactgtgcagaaccaggctgggagaagggctgggaaaactgggagtggagggtggatcctcatggagcaggagagtagctcatggctccaggagcctgaggccatgcagttgatggtgagctgacatcaattctaagactcatcctaattgaggggtgttaaaaagtgtgctgcttagaatgaccaaatatagttattgtaaaaaatgatatttatgaactttttattttagaaaacatgaattttattgctccctgtattatttgtttgatactaggattcatgctaaactttttaagaatgtattggatatcaagaagcattccttacattagtagcaataaatattagaataaatatgaaattgaactattttcagaaaaagggcagtatattaagagcagggactgttctctagttattgaggaaaactggactttgtttgtgtttttggtggaggaagaagtttaagatactttagtcttaaattgaggtttgccaaatgagaagttcaaaaacttgggctttctaatcagaatttccaggaggaggaaagtgtgtgctgaatattttaaacatttcccactgatcatacaaagtctgatttttaaatttacacttataatgcctttgtattaaaattatttttaacatgtgcttttccaaattaaaaatgaagtagagtataccaaatgcataaactttcattagctaaggaactcatgtctgaattttgttgtagttttgaatgttgtgctctttcatacagaatgggaaacataatcctcaggtatcccagcatctcttgttgaattgaagattattcattgctttggcctcacaaagttttgatttcaactatcataagtgaaaatatcttcctttaatgttctaagtagtgataatattactagaatgaaagaataaaaagaaattgttcttttaaaatatgtgtaacttctaaaaataaaacttaaaatttatatgta

SEQ ID NO: 187160 - DNA, 1803 bp, Homo sapiens
  Payload ID: 16848
  Gene Symbol: SMC6
  Gene Name: structural maintenance of chromosomes 6
  ENST ID: ENST00000381272
  CDS Start-End: 467-1803
tagaaaccacaatttcacaaaatcttttaccttttgtgagtttagtagtcacaacatttaggtaggcttatactgataaaatcttggctatgaatacctctgaagtaaaatcaactagtatagaatatgcagatgttaaagcaatacaaacttactatcttacgcttctgtggattagaagtccaacacagatctcactgggctaaaatccagatgtcagtagggctatgttctgttttagggcctctaggggaaaatctatttccttgccttttccagcattttttgactcatgtccctcttccttagtgcaagatgcaagactaatttactttaatttttaaggtaaaaatggatggacatagtacctaaagtttaattagccttgttagatttattttgttgagtttaatatatatggaacttgatttacctcattgttactataaatatttgttcagacctgatggccaaaagaaaggaagaaaatttttcctctcctaaaaatgccaaaaggccaagacaagaagaattggaggattttgataaagatggtgacgaagacgaatgtaaaggtactactttgactgcagcagaagttggaataattgagagtattcacctaaaaaacttcatgtgtcattcaatgcttggaccttttaagtttggttctaatgtcaactttgttgttggcaacaatggaagtgggaagagtgcagtactcacagctctcatagtcggtcttggtggaagagcagttgctactaatagaggatcctctttaaaaggttttgtgaaagatggacagaactctgcagatatctcaataacattgaggaacagaggagatgatgcctttaaagccagtgtgtatggtaactctatacttatacagcaacacatcagcatagatggaagtcgatcttataaacttaaaagtgcaacaggctccgtggtttccacgaggaaagaagagctgattgcaattcttgatcattttaacatccaggtggataatccagtttctgttttaacacaagaaatgagcaagcagttcttacagtctaaaaatgaaggagacaaatacaaattcttcatgaaagcaacgcaacttgaacagatgaaggaagattattcatacattatggaaacgaaagaaagaacaaaggagcagatacatcaaggagaagagcggcttactgaactaaagcgccagtgtgtagagaaagaggaacgttttcaaagtattgctggtttaagtacaatgaagactaatttagagtccttgaaacatgaaatggcttgggcagtggtcaatgaaattgaaaaacaattgaatgccatcagagataatatcaaaattggagaagatcgtgctgctagacttgacaggaaaatggaagaacagcaggtcagacttaatgaggcagaacaaaagtacaaggatattcaagacaaactagaaaagattagtgaagagacaaatgcacgagcaccagaatgtatggcattgaaagcagatgttgttgctaagaaaagggcctataatgaagctgaggttttatataaccgatccttaaacgaatataaagcattaaagaaagatgatgagcagctttgtaaacgaattgaagagctgaaaaaaagtactgaccaatctttggaacctgaacggttggaaagacaaaaaaaaatatcttggttaaaagagagagtaaaggcctttcaaaatcaagaaaattcagtcaatcaagagatcgaacagtttcagcaagccatagaaaaggacaaagaagaacatgg

SEQ ID NO: 187161 - DNA, 3729 bp, Homo sapiens
  Payload ID: 16848
  Gene Symbol: SMC6
  Gene Name: structural maintenance of chromosomes 6
  Uniprot ID: Q96SB8
  ENST ID: ENST00000402989
  CDS Start-End: 402-3677
tagctcaaaatgttctaaagataaaatctaatgatttcttataggaaggctaggcttggtgggtacaagtaagaaagccaagcagagagaagcttcctggtccttctccacctttccctttcctccagtctggactttgccttctccacctccttggaagacaggctgctcatcccattgtggtgtctcggctggtgtatgttttctgcctaggcttaatggacagcacgaggaggtagggactgacgttacccatgttttacagtggaagaacctgaggcttaaagagatggagtttcgctcttcttgcccaggctagagtgcaatggcacggtctcagctcactgcaacctccgcctcccgggttcaagtgattctcttgtctcagcctcccaaacctgatggccaaaagaaaggaagaaaatttttcctctcctaaaaatgccaaaaggccaagacaagaagaattggaggattttgataaagatggtgacgaagacgaatgtaaaggtactactttgactgcagcagaagttggaataattgagagtattcacctaaaaaacttcatgtgtcattcaatgcttggaccttttaagtttggttctaatgtcaactttgttgttggcaacaatggaagtgggaagagtgcagtactcacagctctcatagtcggtcttggtggaagagcagttgctactaatagaggatcctctttaaaaggttttgtgaaagatggacagaactctgcagatatctcaataacattgaggaacagaggagatgatgcctttaaagccagtgtgtatggtaactctatacttatacagcaacacatcagcatagatggaagtcgatcttataaacttaaaagtgcaacaggctccgtggtttccacgaggaaagaagagctgattgcaattcttgatcattttaacatccaggtggataatccagtttctgttttaacacaagaaatgagcaagcagttcttacagtctaaaaatgaaggagacaaatacaaattcttcatgaaagcaacgcaacttgaacagatgaaggaagattattcatacattatggaaacgaaagaaagaacaaaggagcagatacatcaaggagaagagcggcttactgaactaaagcgccagtgtgtagagaaagaggaacgttttcaaagtattgctggtttaagtacaatgaagactaatttagagtccttgaaacatgaaatggcttgggcagtggtcaatgaaattgaaaaacaattgaatgccatcagagataatatcaaaattggagaagatcgtgctgctagacttgacaggaaaatggaagaacagcaggtcagacttaatgaggcagaacaaaagtacaaggatattcaagacaaactagaaaagattagtgaagagacaaatgcacgagcaccagaatgtatggcattgaaagcagatgttgttgctaagaaaagggcctataatgaagctgaggttttatataaccgatccttaaacgaatataaagcattaaagaaagatgatgagcagctttgtaaacgaattgaagagctgaaaaaaagtactgaccaatctttggaacctgaacggttggaaagacaaaaaaaaatatcttggttaaaagagagagtaaaggcctttcaaaatcaagaaaattcagtcaatcaagagatcgaacagtttcagcaagccatagaaaaggacaaagaagaacatggcaaaattaagagagaagaattagatgtgaagcatgcactgagctacaatcagaggcaactgaaagaattgaaagatagtaaaactgatcgactcaaaagatttggccctaatgttccagctcttcttgaagccatagatgatgcttatagacaaggacattttacctataaacctgtaggccctttaggagcttgcattcatcttcgggacccagaacttgctttggctattgaatcttgcttaaaagggcttctgcaggcctattgttgccataatcatgctgatgaaagggtccttcaggcactcatgaaaaggttttatttaccagggacctcacggccaccgataatagtttctgagtttcggaatgagatatatgatgtaagacacagagctgcttatcatccagactttccaacagttctgacagctttagaaatagataatgcggttgtggcaaatagcctaattgacatgagaggcatagagacagtgctactaatcaaaaataattctgtagctcgtgcagtaatgcagtcccaaaagccacccaaaaattgtagagaagcttttactgctgatggtgatcaagtttttgcaggacgttattattcatctgaaaatacaagacctaagttcctaagcagagatgtggattctgaaataagtgacttggagaatgaggttgaaaataagacggcccagatattaaatcttcagcaacatttatctgcccttgaaaaagatattaaacacaatgaggaacttcttaaaaggtgccaactacattataaagaactaaagatgaaaataagaaaaaatatttctgaaattcgggaacttgagaacatagaagaacaccagtctgtagatattgcaactttggaagatgaagctcaggaaaataaaagcaaaatgaaaatggttgaggaacatatggagcaacaaaaagaaaatatggagcatcttaaaagtctgaaaatagaagcagaaaataagtatgatgcaattaaattcaaaattaatcaactatcggagctagcagacccacttaaggatgaattaaaccttgctgattctgaagtggataaccaaaaacgagggaaacgacattatgaagaaaaacaaaaagaacacttggataccttaaataaaaagaaacgagaactggatatgaaagagaaagaactagaggagaaaatgtcacaagcaagacaaatctgcccagagcgtatagaagtagaaaaatctgcatcaattctggacaaagaaattaatcgattaaggcagaagatacaggcagaacatgctagtcatggagatcgagaggaaataatgaggcagtaccaagaagcaagagagacctatcttgatctggatagtaaagtgaggactttaaaaaagtttattaaattactgggagaaatcatggagcacagattcaagacatatcaacaatttagaaggtgtttgactttacgatgcaaattatactttgacaacttactatctcagcgggcctattgtggaaaaatgaattttgaccacaagaatgaaactctaagtatatcagttcagcctggagaaggaaataaagctgctttcaatgacatgagagccttgtctggaggtgaacgttctttctccacagtgtgttttattctttccctgtggtccatcgcagaatctcctttcagatgcctggatgaatttgatgtctacatggatatggttaataggagaattgccatggacttgatactgaagatggcagattcccagcgttttagacagtttatcttgctcacacctcaaagcatgagttcacttccatccagtaaactgataagaattctccgaatgtctgatcctgaaagaggacaaactacattgcctttcagacctgtgactcaagaagaagatgatgaccaaaggtgatttgtaacttaacatgccttgtcctgatgttgaaggatttgtgaagggaaaa

SEQ ID NO: 187162 - DNA, 5233 bp, Homo sapiens
  Payload ID: 16848
  Gene Symbol: SMC6
  Gene Name: structural maintenance of chromosomes 6
  Uniprot ID: Q96SB8
  ENST ID: ENST00000448223
  CDS Start-End: 271-3546
accgcggtgggcgccggggctcccgggaatctaccttctcctgcggccggcacgcggttcccagggggccagcggcggtcagccgaggtcgagacgcccgcagggtggccttagcggccggtcgtaccacggcagccccgccgatcaggttcctttgggagacttcgacttgttggcgaaatgaaccggagaagaatcccaattgggaattgcggaaaacaggactctagggtagagaaaggttgtagaaccaatagggtttgagacctgatggccaaaagaaaggaagaaaatttttcctctcctaaaaatgccaaaaggccaagacaagaagaattggaggattttgataaagatggtgacgaagacgaatgtaaaggtactactttgactgcagcagaagttggaataattgagagtattcacctaaaaaacttcatgtgtcattcaatgcttggaccttttaagtttggttctaatgtcaactttgttgttggcaacaatggaagtgggaagagtgcagtactcacagctctcatagtcggtcttggtggaagagcagttgctactaatagaggatcctctttaaaaggttttgtgaaagatggacagaactctgcagatatctcaataacattgaggaacagaggagatgatgcctttaaagccagtgtgtatggtaactctatacttatacagcaacacatcagcatagatggaagtcgatcttataaacttaaaagtgcaacaggctccgtggtttccacgaggaaagaagagctgattgcaattcttgatcattttaacatccaggtggataatccagtttctgttttaacacaagaaatgagcaagcagttcttacagtctaaaaatgaaggagacaaatacaaattcttcatgaaagcaacgcaacttgaacagatgaaggaagattattcatacattatggaaacgaaagaaagaacaaaggagcagatacatcaaggagaagagcggcttactgaactaaagcgccagtgtgtagagaaagaggaacgttttcaaagtattgctggtttaagtacaatgaagactaatttagagtccttgaaacatgaaatggcttgggcagtggtcaatgaaattgaaaaacaattgaatgccatcagagataatatcaaaattggagaagatcgtgctgctagacttgacaggaaaatggaagaacagcaggtcagacttaatgaggcagaacaaaagtacaaggatattcaagacaaactagaaaagattagtgaagagacaaatgcacgagcaccagaatgtatggcattgaaagcagatgttgttgctaagaaaagggcctataatgaagctgaggttttatataaccgatccttaaacgaatataaagcattaaagaaagatgatgagcagctttgtaaacgaattgaagagctgaaaaaaagtactgaccaatctttggaacctgaacggttggaaagacaaaaaaaaatatcttggttaaaagagagagtaaaggcctttcaaaatcaagaaaattcagtcaatcaagagatcgaacagtttcagcaagccatagaaaaggacaaagaagaacatggcaaaattaagagagaagaattagatgtgaagcatgcactgagctacaatcagaggcaactgaaagaattgaaagatagtaaaactgatcgactcaaaagatttggccctaatgttccagctcttcttgaagccatagatgatgcttatagacaaggacattttacctataaacctgtaggccctttaggagcttgcattcatcttcgggacccagaacttgctttggctattgaatcttgcttaaaagggcttctgcaggcctattgttgccataatcatgctgatgaaagggtccttcaggcactcatgaaaaggttttatttaccagggacctcacggccaccgataatagtttctgagtttcggaatgagatatatgatgtaagacacagagctgcttatcatccagactttccaacagttctgacagctttagaaatagataatgcggttgtggcaaatagcctaattgacatgagaggcatagagacagtgctactaatcaaaaataattctgtagctcgtgcagtaatgcagtcccaaaagccacccaaaaattgtagagaagcttttactgctgatggtgatcaagtttttgcaggacgttattattcatctgaaaatacaagacctaagttcctaagcagagatgtggattctgaaataagtgacttggagaatgaggttgaaaataagacggcccagatattaaatcttcagcaacatttatctgcccttgaaaaagatattaaacacaatgaggaacttcttaaaaggtgccaactacattataaagaactaaagatgaaaataagaaaaaatatttctgaaattcgggaacttgagaacatagaagaacaccagtctgtagatattgcaactttggaagatgaagctcaggaaaataaaagcaaaatgaaaatggttgaggaacatatggagcaacaaaaagaaaatatggagcatcttaaaagtctgaaaatagaagcagaaaataagtatgatgcaattaaattcaaaattaatcaactatcggagctagcagacccacttaaggatgaattaaaccttgctgattctgaagtggataaccaaaaacgagggaaacgacattatgaagaaaaacaaaaagaacacttggataccttaaataaaaagaaacgagaactggatatgaaagagaaagaactagaggagaaaatgtcacaagcaagacaaatctgcccagagcgtatagaagtagaaaaatctgcatcaattctggacaaagaaattaatcgattaaggcagaagatacaggcagaacatgctagtcatggagatcgagaggaaataatgaggcagtaccaagaagcaagagagacctatcttgatctggatagtaaagtgaggactttaaaaaagtttattaaattactgggagaaatcatggagcacagattcaagacatatcaacaatttagaaggtgtttgactttacgatgcaaattatactttgacaacttactatctcagcgggcctattgtggaaaaatgaattttgaccacaagaatgaaactctaagtatatcagttcagcctggagaaggaaataaagctgctttcaatgacatgagagccttgtctggaggtgaacgttctttctccacagtgtgttttattctttccctgtggtccatcgcagaatctcctttcagatgcctggatgaatttgatgtctacatggatatggttaataggagaattgccatggacttgatactgaagatggcagattcccagcgttttagacagtttatcttgctcacacctcaaagcatgagttcacttccatccagtaaactgataagaattctccgaatgtctgatcctgaaagaggacaaactacattgcctttcagacctgtgactcaagaagaagatgatgaccaaaggtgatttgtaacttaacatgccttgtcctgatgttgaaggatttgtgaagggaaaaaaaattctggactctttgatataataaaatgagactggaggcattctgaaatgaaagaaactcctttatatatccaaccacaatcaaacatataaataagcctggaaaaccaactacaacctgcaatttaagattactattactttaagaaaatcaatttcatagtattggttttaaatctttttaagtttttttaatacgatctatttttataggttctttttcagaagtaaaattttgtacatatatacatgtacatatctgtttagtttgggttcatttctataacattttgtaagaaaataaaagtttgagcacctgattatatttagttttgcttttccagatattacattctatagttaccaaaaatggttgaagggagggatttctcattgcagagggtggggtgcaagggaataagacacttgtacggaacactgaagctttgccaacttctacacatgccttttttgcagtcctttaactgtccaccctaccaagagcttataaccagtatcagaactggataatgacgcagtttttcactctgacctccatcatgcttgcctgatttaaaagccctcagtttgcagtccagggactgttcaggcttgtcctcagctgagaggacacaggctagagggactgtgcagaaccaggctgggagaagggctgggaaaactgggagtggagggtggatcctcatggagcaggagagtagctcatggctccaggagcctgaggccatgcagttgatggtgagctgacatcaattctaagactcatcctaattgaggggtgttaaaaagtgtgctgcttagaatgaccaaatatagttattgtaaaaaatgatatttatgaactttttattttagaaaacatgaattttattgctccctgtattatttgtttgatactaggattcatgctaaactttttaagaatgtattggatatcaagaagcattccttacattagtagcaataaatattagaataaatatgaaattgaactattttcagaaaaagggcagtatattaagagcagggactgttctctagttattgaggaaaactggactttgtttgtgtttttggtggaggaagaagtttaagatactttagtcttaaattgaggtttgccaaatgagaagttcaaaaacttgggctttctaatcagaatttccaggaggaggaaagtgtgtgctgaatattttaaacatttcccactgatcatacaaagtctgatttttaaatttacacttataatgcctttgtattaaaattatttttaacatgtgcttttccaaattaaaaatgaagtagagtataccaaatgcataaactttcattagctaaggaactcatgtctgaattttgttgtagttttgaatgttgtgctctttcatacagaatgggaaacataatcctcaggtatcccagcatctcttgttgaattgaagattattcattgctttggcctcacaaagttttgatttcaactatcataagtgaaaatatcttcctttaatgttctaagtagtgataatattactagaatgaaagaataaaaagaaattgttcttttaaaatatgtgtaacttctaaaaataaaacttaaaatttatatgta

SEQ ID NO: 187163 - DNA, 2460 bp, Homo sapiens
  Payload ID: 16848
  Gene Symbol: SMC6
  Gene Name: structural maintenance of chromosomes 6
  ENST ID: ENST00000446852
  CDS Start-End: 241-2460
ctaccttctcctgcggccggcacgcggttcccagggggccagcggcggtcagccgaggtcgagacgcccgcagggtggccttagcggccggtcgtaccacggcagccccgccgatcaggttcctttgggagacttcgacttgttggcgaaatgaaccggagaagaatcccaattgggaattgcggaaaacaggactctagggtagagaaaggttgtagaaccaatagggtttgagacctgatggccaaaagaaaggaagaaaatttttcctctcctaaaaatgccaaaaggccaagacaagaagaattggaggattttgataaagatggtgacgaagacgaatgtaaaggtactactttgactgcagcagaagttggaataattgagagtattcacctaaaaaacttcatgtgtcattcaatgcttggaccttttaagtttggttctaatgtcaactttgttgttggcaacaatggaagttggagtgcagtggtgcgatctcggctcaatgcaacctctgcctcccaggttcaagcgattctcctgtttcagccttgtgggaagagtgcagtactcacagctctcatagtcggtcttggtggaagagcagttgctactaatagaggatcctctttaaaaggttttgtgaaagatggacagaactctgcagatatctcaataacattgaggaacagaggagatgatgcctttaaagccagtgtgtatggtaactctatacttatacagcaacacatcagcatagatggaagtcgatcttataaacttaaaagtgcaacaggctccgtggtttccacgaggaaagaagagctgattgcaattcttgatcattttaacatccaggtggataatccagtttctgttttaacacaagaaatgagcaagcagttcttacagtctaaaaatgaaggagacaaatacaaattcttcatgaaagcaacgcaacttgaacagatgaaggaagattattcatacattatggaaacgaaagaaagaacaaaggagcagatacatcaaggagaagagcggcttactgaactaaagcgccagtgtgtagagaaagaggaacgttttcaaagtattgctggtttaagtacaatgaagactaatttagagtccttgaaacatgaaatggcttgggcagtggtcaatgaaattgaaaaacaattgaatgccatcagagataatatcaaaattggagaagatcgtgctgctagacttgacaggaaaatggaagaacagcaggtcagacttaatgaggcagaacaaaagtacaaggatattcaagacaaactagaaaagattagtgaagagacaaatgcacgagcaccagaatgtatggcattgaaagcagatgttgttgctaagaaaagggcctataatgaagctgaggttttatataaccgatccttaaacgaatataaagcattaaagaaagatgatgagcagctttgtaaacgaattgaagagctgaaaaaaagtactgaccaatctttggaacctgaacggttggaaagacaaaaaaaaatatcttggttaaaagagagagtaaaggcctttcaaaatcaagaaaattcagtcaatcaagagatcgaacagtttcagcaagccatagaaaaggacaaagaagaacatggcaaaattaagagagaagaattagatgtgaagcatgcactgagctacaatcagaggcaactgaaagaattgaaagatagtaaaactgatcgactcaaaagatttggccctaatgttccagctcttcttgaagccatagatgatgcttatagacaaggacattttacctataaacctgtaggccctttaggagcttgcattcatcttcgggacccagaacttgctttggctattgaatcttgcttaaaagggcttctgcaggcctattgttgccataatcatgctgatgaaagggtccttcaggcactcatgaaaaggttttatttaccagggacctcacggccaccgataatagtttctgagtttcggaatgagatatatgatgtaagacacagagctgcttatcatccagactttccaacagttctgacagctttagaaatagataatgcggttgtggcaaatagcctaattgacatgagaggcatagagacagtgctactaatcaaaaataattctgtagctcgtgcagtaatgcagtcccaaaagccacccaaaaattgtagagaagcttttactgctgatggtgatcaagtttttgcaggacgttattattcatctgaaaatacaagacctaagttcctaagcagagatgtggattctgaaataagtgacttggagaatgaggttgaaaataagacggcccagatattaaatcttcagcaacatttatctgcccttgaaaaagatattaaacacaatgaggaacttcttaaaaggtgccaactacattataaagaactaaag

SEQ ID NO: 187164 - DNA, 480 bp, Homo sapiens
  Payload ID: 16848
  Gene Symbol: SMC6
  Gene Name: structural maintenance of chromosomes 6
  ENST ID: ENST00000430591
  CDS Start-End: 1-69
tatgatgtaagacacaggaccaaagagaatagtcctggccattctggtggggcctgctctgtgaactgacacaaagactctgaagaagagtgcctggcactgccttgctggcacattgtgtgtcccagcctgtgcttctaatcacttagccacgaaacacatgtgacaaaggatccagtgtatgtgtcataatgccagttttcttggaagtagagctgcttatcatccagactttccaacagttctgacagctttagaaatagataatgcggttgtggcaaatagcctaattgacatgagaggcatagagacagtgctactaatcaaaaataattctgtagctcgtgcagtaatgcagtcccaaaagccacccaaaaattgtagagaagcttttactgctgatggtgatcaagtttttgcaggacgttattattcatctgaaaatacaagacctaagttcctaagcagagatgtggattc

SEQ ID NO: 187165 - DNA, 544 bp, Homo sapiens
  Payload ID: 16848
  Gene Symbol: SMC6
  Gene Name: structural maintenance of chromosomes 6
  ENST ID: ENST00000428868
  CDS Start-End: 374-544
gataatgactgtgcctgtatgtatggacacgatgttctttcttctcatagctcaaaatgttctaaagataaaatctaatgatttcttataggaaggctaggcttggtgggtacaagtaagaaagccaagcagagagaagcttcctggtccttctccacctttccctttcctccagtctggactttgccttctccacctccttggaagacaggctgctcatcccattgtggtgtctcggctggtgtatgttttctgcctaggatggagtttcgctcttcttgcccaggctagagtgcaatggcacggtctcagctcactgcaacctccgcctcccgggttcaagtgattctcttgtctcagcctcccaaacctgatggccaaaagaaaggaagaaaatttttcctctcctaaaaatgccaaaaggccaagacaagaagaattggaggattttgataaagatggtgacgaagacgaatgtaaaggtactactttgactgcagcagaagttggaataattgagagtattcacctaaaaaacttcatg

SEQ ID NO: 187166 - DNA, 500 bp, Homo sapiens
  Payload ID: 16848
  Gene Symbol: SMC6
  Gene Name: structural maintenance of chromosomes 6
  ENST ID: ENST00000621152
  CDS Start-End: 273-500
gagggcggggcgcaggcgcggttagtaccgcggtgggcgccggggctcccgggaatctaccttctcctgcggccggcacgcggttcccagggggccagcggcggtcagccgaggtcgagacgcccgcagggtggccttagcggccggtcgtaccacggcagccccgccgatcaggttcctttgggagacttcgacttgttggcgaaatgaaccggagaagaatcccaattgggaattgcggaaaacaggactctagggtagagaaagacctgatggccaaaagaaaggaagaaaatttttcctctcctaaaaatgccaaaaggccaagacaagaagaattggaggattttgataaagatggtgacgaagacgaatgtaaaggtactactttgactgcagcagaagttggaataattgagagtattcacctaaaaaacttcatgtgtcattcaatgcttggaccttttaagtttggttctaatgtcaactttgttgttggc

SEQ ID NO: 187167 - DNA, 8821 bp, Homo sapiens
  Payload ID: 16849
  Gene Symbol: SMCHD1
  Gene Name: structural maintenance of chromosomes flexible hinge domain containing 1
  Uniprot ID: A6NHR9
  ENST ID: ENST00000320876
  CDS Start-End: 339-6356
gcggcgctggtcgcgggtcgcaccgtgaggctcgcgtgggcggcgataggcgctgggcccgggcccggtgaggagcgcgccgcgcgtccccttctcctcaggagtggcgggccgcggaagtgacgtggtgcacgggcaggagcgcgtttgaatcggttcccgggtgatcctcgcgcctgccgctgctcggccgccgccgctgacgaggagctgcagcgcgccgggccgaggcctcgagccgccccgggagctggagctgaaggcgccgcgcggagcgcgcacctcagccctgagcccggcggcggcaggcgtcgctgtcttttctccttttccccaatatggcagcggcggacggcggcgggcctggtggggcctctgtggggactgaggaggatggcggaggcgtcggccacaggacggtgtacttgtttgatcggcgcgaaaaggagtccgagctcggggaccggcctctgcaggtcggggagcgctcggactacgcgggatttcgcgcgtgtgtgtgtcagacacttggcatttcacctgaagaaaaatttgttattacaacaacaagtaggaaagaaattacctgtgataattttgatgaaactgttaaagatggagtcaccttatacctgctacagtcggtcaatcagttactactgacagctacgaaagaacgaattgacttcttacctcactatgacacactggttaaaagtggcatgtatgaatattatgccagtgaaggacaaaatcctttgccatttgctcttgcggaattaattgacaattcattgtctgctacttctcgtaacattggggttagaagaatacagatcaaattgctttttgatgaaacacaaggaaaacctgctgttgcagtgatagataatggaagaggaatgacctctaaacagcttaacaactgggccgtgtataggttgtcaaaattcacaaggcaaggtgactttgaaagtgatcattcaggatatgttcgtccagtaccagtgccacgcagtttaaatagtgatatttcctattttggtgttgggggcaagcaagctgtcttctttgttggacaatcagccagaatgataagcaaacctgcagattcccaagatgttcacgagcttgtgctttctaaagaagattttgagaagaaggagaaaaataaagaggcaatatatagtggatatattagaaacagaaagccctctgattctgttcacattacaaatgatgatgaaagatttctacatcatcttatcatagaggagaaggaaaaagatagctttactgctgtggttatcacaggggtacaaccagaacacatacagtacttgaaaaattatttccacctttggacacgacagttagcgcatatttatcactactatattcatggcccaaaaggaaatgaaatacgaacatcaaaagaagttgaacctttcaacaatattgatattgaaatttctatgtttgaaaaagggaaggtacctaagattgtcaacctaagggaaatacaagacgacatgcagacgttgtatgtaaacacagcagctgatagttttgaattcaaagctcatgttgaaggagatggtgtagtggaagggattatccgttatcatccattcttatatgatagagaaacttaccctgatgatccatgctttccatcaaaattaaaagatgaagatgatgaagatgattgtttcatacttgagaaagcagctagagggaaaaggcctatttttgaatgtttttggaatggacgattaataccatatacatcagttgaagactttgactggtgtactcctcctaagaagagagggcttgcaccaattgaatgctacaataggatatctggtgcattattcactaatgacaaattccaggtcagcacaaataaattgacgtttatggatcttgagctaaaattgaaagataagaacaccctttttacaaggattttaaatggacaggaacagcgaatgaaaattgacagagaatttgctttgtggctgaaggactgtcatgagaagtatgataaacaaataaaatttacactttttaagggagtaattacacgtcctgatcttccttctaaaaagcaaggtccctgggcaacatatgcagcaatagaatgggatggaaagatatacaaagcaggacagctggtcaagacaatcaagacacttcccctcttttatggaagcatagtaagattttttctttatggcgatcatgatggagaagtatatgctacaggaggagaggttcaaattgcaatggaacctcaggcactatatgatgaagtaagaactgtgccaattgcaaagctggataggacagttgctgagaaagctgttaaaaaatatgtagaagatgaaatggcaaggctccctgatagattgtcagtaacttggcctgaaggagatgaattattgcctaatgaggttaggcctgctggaacccctattggtgcgttaagaattgaaatactgaataaaaaaggggaagcaatgcaaaagcttccaggaacaagccatggagggtcaaagaaactcctggttgagctcaaagttattttacattcttcaagtggaaataaagagattatttcgcatattagtcaacatggaggaaaatggccttactggtttaaaaaaatggaaaatattcagaagttggggaattataccttgaaattacaagttgtgttgaatgaaagtaatgcagacacttatgcaggaagaccactaccatctaaagcaattaagttttctgttaaagagggtaagccagagaaattttcatttggtcttctggatcttccttttcgtgttggagttccatttaatatccctctggagtttcaggatgaatttggtcataccagtcaactagtaactgatattcagccagttcttgaagcaagtggtttatctttacattatgaagaaataaccaaaggaccaaattgtgtaattcgaggtgttacagccaagggccctgtaaactcttgtcaaggcaagaattataatctgaaggttactctgcctggcttaaaagaagactcacagattttgaaaattagattactacctggtcaccctcgtcgactgaaagtgaaacctgattctgaaattttagttatagaaaatggaacagctttcccatttcaggtggaagttttagatgaatcagacaacataacagcacaaccaaaattgattgttcattgtaagttttcaggtgctccaaaccttccagtctatgttgtagattgcagtagttctggaaccagtattttaacaggatctgcaattcaagttcagaatattaaaaaagaccagacgcttaaagcaagaattgaaatacctagttgtaaagatgtggcacctgtggagaagactattaagttgcttcccagtagccatgttgcaagactacaaatattcagtgtagaaggacaaaaggcaattcagatcaaacatcaggatgaggttaattggatagcgggtgatattatgcataatcttatttttcaaatgtatgatgaaggagaaagagaaatcaatataacatcagctttagcagaaaaaattaaagttaattggactcctgagattaacaaagaacacttgctacagggtctgcttcctgatgtgcaagtaccaacatctgtaaaagatatgcgctattgccaggtttcattccaagatgatcatgtgtctttggaaagtgcgtttacagtaagaccacttcctgatgaacctaaacatttaaaatgtgaaatgaaaggaggaaaaacagtacagatgggccaagagcttcaaggagaagtagttataataattacagatcagtacggaaatcagattcaagcattttcaccaagttctttatcttctttgtcaattgctggggttggacttgatagctcaaatttgaaaacaacctttcaggaaaacacacagagtataagtgtaagaggcatcaaatttattccaggtcctcctggaaataaggatctttgttttacttggcgtgagttttctgactttattcgagtgcaactaatttctggacctcctgctaaacttctccttatagactggccagaactaaaggagtccattccagtgattaatggaagagatttacagaaccctattattgttcaactttgtgatcagtgggataatccagcaccggtacaacatgttaaaataagtcttacaaaagctagcaatttaaagctcatgccttcaaaccaacagcataaaacagatgagaaaggcagggctaatttgggagtattcagtgtttttgcccctaggggagagcatactcttcaggttaaagccatctataacaaaagtatcatagaaggacctataattaagttaatgattcttccagacccagaaaaacccgttcgtctcaatgttaaatatgacaaagatgcatccttcttagcagggggtcttttcactgattttatgattagtgttatttctgaagatgacagtatcattaaaaacattaatccagcacgtatttccatgaaaatgtggaagctgtctaccagtgggaaccgacccccagcaaatgcagaaacatttagttgtaataaaataaaagataatgacaaagaagatggctgcttctatttcagggataaagtaattcctaataaagtggggacatattgtatccagtttggttttatgatggataaaacaaatattctcaacagtgaacaggttatagttgaagtcctgcctaatcaacctgtgaagttagtacctaaaattaaaccacctacaccagctgtttcaaatgttcgctcagttgccagtaggaccttggtcagagatctacatcttagtatcacggatgactacgacaaccatactggaattgatttggttggcactataatagccaccattaaaggctctaatgaggaagatactgataccccactttttattgggaaagttagaacacttgaattccccttcgtgaatggttcggctgaaatcatgagtctggtgctggcagaaagtagtcctggaagggatagtactgaatattttattgtatttgagccccggctaccacttttatcaagaaccttagaaccatatatcctaccgttcatgttttacaatgatgttaagaagcagcaacaaatggcagcacttacaaaagaaaaggaccaattatctcagtctattgttatgtataaaagtttatttgaagccagccaacagcttcttaatgaaatgaaatgtcaagttgaagaagcaagattaaaagaggcccaattgcgaaatgaactaaaaatacataatattgacattcctacaacacaacaggtgccacacattgaagcacttctgaaaagaaagctatcagaacaagaagaactgaagaaaaaacctagaagatcgtgtactcttccaaactatactaaaggcagtggagatgttttgggaaagattgcacatctagcacaaattgaagatgatagagctgcgatggttatttcttggcatctggcaagtgacatggactgtgtagtcaccctaaccactgacgctgcacgtcgtatctatgatgaaacccaaggtcgtcagcaggtgttgccccttgattctatttacaagaagactcttccagattggaaaagatctctacctcatttccgaaatggaaaattgtattttaaacccattggagatccagtctttgctcgagacttgttaacatttccagataatgtagaacattgtgaaacagtatttggtatgctgttaggagacaccattattttggataatctggatgcggccaatcattatagaaaagaggttgttaaaattacacactgtcctacactgctgaccagagatggagatcgaattcgaagtaatggaaagtttgggggccttcagaataaagctcctccaatggataaacttcggggaatggtatttggagctccagttccaaaacagtgtctgatcttaggggaacaaatagatcttcttcagcagtatcgttctgctgtgtgcaaactagacagtgtgaataaggatcttaacagtcaattagagtaccttcgcactccggatatgaggaagaaaaagcaagaacttgatgaacatgagaaaaatctcaaactaatagaggaaaaactaggtatgactcccatacgtaagtgtaatgactcattgcgtcattcaccaaaggttgagacgacagattgtccagttcctcctaaaagaatgagacgagaagctacaagacaaaataggattataaccaaaacagatgtatgagaggtgacagagagaagaggccattggtctcagtaagaatgccctgctttctgcatctctgtttcagaagaccaagagggtgacttaccagactgagtatttctggggacaatacaagtacctgggcatgaatttccatttcgattcagatgggactggaaacaaccattcaattttatgaatcttactggacattatggatttactggaattattccagacattatgccctttggttgtcactaccttgcaaatgtgtaagaggaaaatgtgctaatgtggcagtgactgtaaaactggcacatggcatttattaatcctgaagaaaagtacatgtactatttttcagtataaatataatgaacatgtcagaactatttcttgaaaacctttttattacttttgcgtgaatttatttaacaaagatgttttgtcttttgtgtaagggaggttctagaggctagatgtttaattgtaaatatgtgaggaaactcaatgcagaattcaggataaaaattttaaaagcacaggtatttgggaattgaaatgttaagatacccagaacaacattaaatcaatgagtgaacttgtgacagtggtagcatttcaaatttcaaaagacttatcctgtgtgtgtgtgtgtgtgtatatatatatatatatataaatatatatatataaaatattcagcagcaccaagttttataactattgtttgtttgactttattaatactagaatatgtagtctcagccttaattttacatttacattattttgtaattttttattactatttttaaggggttaaagagaacatacattctcacattagtgtactttctggtagaaagttgctgcaaaaacatttgaaatgtatattaacctaatgtatgtcatatatatgtctttgtgtaagttcaagactattgatctgtgaagttattttgtaaggacatacatttggtaagtaagtttgtgtcccaggaaatgtatgtgtttttaaaccctttctaaatatgcaggccattaataaataagattgtttcttccctactgaatagataagtgtttttcttttttaaaattggaagcttcataaaagttatcttgttaaaaaacgatgatgatgttaacctatctatctttataattggaaattatttaaactgtttgttgttacagaagaaacaaaatggtaattacagaattagctgtggggaagattggctcccatggtactacaggttgagtatcccttattcaaaatggttgggacctgaagtgttttggattttggttttttgtggggtttttaaattattattttggaatatttgcattatatttaccaatttagcatccctaatccaaaaatctttcattagaaattggaaatgcttcaatgagcatttcccttatgtgtcatatctgcgctcaaatgttttgaattttggaacatttcttgtttctgacttttagattagggatactcaccccgtaccaatatttggagtccttagacattagattatatgaaaatgattgattgataggtaagaaaggttaaagagaaatgactttttaggaactagacttgaacgtataattaatatgtggaactagtttgcttttataattcattgtatcaagaaggagtcatgttttaaatccaaggcattgagactatctagaagcaaaaaagttggttttaaaaattctttttattagaagtgtgtttaaaaacatgtctttttttcccttgagcgacagtggcctcactacattgcccaggctagtcttgaactcctgggttcaagcagtcttcctgccttggcctcctaagtagcagggattacaggcatgcacccacatgccaatttttattgcttaaaatggcgagttctatggatattatctagccccaagcccatatctgtacacttttgttcattttataataccagaaagaatgttctatcagtaaaagaaggtttttaagtatgaatctccatttttgtggagtttttctaccctgtaaaaattaactttgtggttcccagtaattacagtaaggagtttttctatattttcacagttggatttatctaaggatatttctcagcatattaaggaatccttttctacatttgagcaaatactgaggttcatgttgtaccaaataataataaattgcttttgtgtttaatatgtaacacgtaagaacaattgaaattttcttctaagatttaatactagtcttttagtataaaggaatgtaactggagaaaaaaattaatgctacagccatttatcctgtgttatgtgttatataatctgaaatttgtcacaatgttacaatcaggaagttttttttctggtttcttcttccaaaggaaaataatagcctacttgtattttgaagtaactgaaataaaactctctccaagcctttttgcacatta

SEQ ID NO: 187168 - DNA, 555 bp, Homo sapiens
  Payload ID: 16849
  Gene Symbol: SMCHD1
  Gene Name: structural maintenance of chromosomes flexible hinge domain containing 1
  ENST ID: ENST00000585229
  CDS Start-End: 1-148
aattgaatgctacaataggatatctggtgcattattcactaatgacaaattccaggtcagcacaaataaattgacgtttatggatcttgagctaaaattgaaagataagaacaccctttttacaaggattttaaatggacaggtatgatttttaaatataaagttgtgaatatttgcaaatgttttatttttaagtaaaagaagacactagcagtgtaggtttttattgatattttgcatcaaaagactatgatgtataaatttttttatgagcagtcaagtgttcacattactaaaaaatttaaagctaattttttagtaatgactaaacctacctagtaaagactaggtttggatagaatttacatatcttcattagttttttttgtttttttttttttaagacaggagtttcactctgtttcccaggctggattgcagtggctcaatctcagctcactgcaacctctgcctcccaggctgaggcaggaggatggcttgaggccaggagttcaagaccagcgtgtgcaatacagtgagacaccttctgtattt

SEQ ID NO: 187169 - DNA, 865 bp, Homo sapiens
  Payload ID: 16849
  Gene Symbol: SMCHD1
  Gene Name: structural maintenance of chromosomes flexible hinge domain containing 1
  ENST ID: ENST00000583800
  CDS Start-End: 1-146
aaaaactaggtatgactcccatacgtaagtgtaatgactcattgcgtcattcaccaaaggttgagacgacagattgtccagttcctcctaaaagaatgagacgagaagctacaagacaaaatagagatggggtcttgctgtgttgaccaggctggtctcaagctcctgggcttaagctactctcctgccgcggcctcccaaagtactgagattacaggcctgagtcaccatgctcggcccaacatccacatgtttaaagcaaaacctgtggacccatgacgttgatttgccctatcccagttatagttaccatcaagtcccactcggagaagagacttgttggtaaaacagttctatttttataatagtagaagaaattccagctagcaatgtaatcctctttcttaaatgtaattgtacaactaacagtcatcacacatatgagggtagccagcaacgtgagagacaaaattcaagattaagttccaaaatcaacatggaggacaatttagtaaagagactagacctcttttataaaattataattactatgtagcagaaaggagccaggacaagaatgaataaacagattacaaatattgttgctgaaataaaaatgttcaataggaggattaaagtccaaaaagaaaacttccccaatacaaaaagagatagaagacatagagaaccaattcagactattaggaatctagaaagaagaaaatggagaaggaaatgctatcatgtggaagaggatttcctagggatgaataaaattcattgaatgcccagcaacagtgactgacaaaatactcactaagatacttcatagtaatactgtatcatatcaaggagagggagaaag

SEQ ID NO: 187170 - DNA, 4951 bp, Homo sapiens
  Payload ID: 16849
  Gene Symbol: SMCHD1
  Gene Name: structural maintenance of chromosomes flexible hinge domain containing 1
  ENST ID: ENST00000577880
  CDS Start-End: 1-4167
gatcttgagctaaaattgaaagataagaacaccctttttacaaggattttaaatggacaggaacagcgaatgaaaattgacagagaatttgctttgtggctgaaggactgtcatgagaagtatgataaacaaataaaatttacactttttaagggagtaattacacgtcctgatcttccttctaaaaagcaaggtccctgggcaacatatgcagcaatagaatgggatggaaagatatacaaagcaggacagctggtcaagacaatcaagacacttcccctcttttatggaagcatagtaagattttttctttatggcgatcatgatggagaagtatatgctacaggaggagaggttcaaattgcaatggaacctcaggcactatatgatgaagtaagaactgtgccaattgcaaagctggataggacagttgctgagaaagctgttaaaaaatatgtagaagatgaaatggcaaggctccctgatagattgtcagtaacttggcctgaaggagatgaattattgcctaatgaggttaggcctgctggaacccctattggtgcgttaagaattgaaatactgaataaaaaaggggaagcaatgcaaaagcttccaggaacaagccatggagggtcaaagaaactcctggttgagctcaaagttattttacattcttcaagtggaaataaagagattatttcgcatattagtcaacatggaggaaaatggccttactggtttaaaaaaatggaaaatattcagaagttggggaattataccttgaaattacaagttgtgttgaatgaaagtaatgcagacacttatgcaggaagaccactaccatctaaagcaattaagttttctgttaaagagggtaagccagagaaattttcatttggtcttctggatcttccttttcgtgttggagttccatttaatatccctctggagtttcaggatgaatttggtcataccagtcaactagtaactgatattcagccagttcttgaagcaagtggtttatctttacattatgaagaaataaccaaaggaccaaattgtgtaattcgaggtgttacagccaagggccctgtaaactcttgtcaaggcaagaattataatctgaaggttactctgcctggcttaaaagaagactcacagattttgaaaattagattactacctggtcaccctcgtcgactgaaagtgaaacctgattctgaaattttagttatagaaaatggaacagctttcccatttcaggtggaagttttagatgaatcagacaacataacagcacaaccaaaattgattgttcattgtaagttttcaggtgctccaaaccttccagtctatgttgtagattgcagtagttctggaaccagtattttaacaggatctgcaattcaagttcagaatattaaaaaagaccagacgcttaaagcaagaattgaaatacctagttgtaaagatgtggcacctgtggagaagactattaagttgcttcccagtagccatgttgcaagactacaaatattcagtgtagaaggacaaaaggcaattcagatcaaacatcaggatgaggttaattggatagcgggtgatattatgcataatcttatttttcaaatgtatgatgaaggagaaagagaaatcaatataacatcagctttagcagaaaaaattaaagttaattggactcctgagattaacaaagaacacttgctacagggtctgcttcctgatgtgcaagtaccaacatctgtaaaagatatgcgctattgccaggtttcattccaagatgatcatgtgtctttggaaagtgcgtttacagtaagaccacttcctgatgaacctaaacatttaaaatgtgaaatgaaaggaggaaaaacagtacagatgggccaagagcttcaaggagaagtagttataataattacagatcagtacggaaatcagattcaagcattttcaccaagttctttatcttctttgtcaattgctggggttggacttgatagctcaaatttgaaaacaacctttcaggaaaacacacagagtataagtgtaagaggcatcaaatttattccaggtcctcctggaaataaggatctttgttttacttggcgtgagttttctgactttattcgagtgcaactaatttctggacctcctgctaaacttctccttatagactggccagaactaaaggagtccattccagtgattaatggaagagatttacagaaccctattattgttcaactttgtgatcagtgggataatccagcaccggtacaacatgttaaaataagtcttacaaaagctagcaatttaaagctcatgccttcaaaccaacagcataaaacagatgagaaaggcagggctaatttgggagtattcagtgtttttgcccctaggggagagcatactcttcaggttaaagccatctataacaaaagtatcatagaaggacctataattaagttaatgattcttccagacccagaaaaacccgttcgtctcaatgttaaatatgacaaagatgcatccttcttagcagggggtcttttcactgattttatgattagtgttatttctgaagatgacagtatcattaaaaacattaatccagcacgtatttccatgaaaatgtggaagctgtctaccagtgggaaccgacccccagcaaatgcagaaacatttagttgtaataaaataaaagataatgacaaagaagatggctgcttctatttcagggataaagtaattcctaataaagtggggacatattgtatccagtttggttttatgatggataaaacaaatattctcaacagtgaacaggttatagttgaagtcctgcctaatcaacctgtgaagttagtacctaaaattaaaccacctacaccagctgtttcaaatgttcgctcagttgccagtaggaccttggtcagagatctacatcttagtatcacggatgactacgacaaccatactggaattgatttggttggcactataatagccaccattaaaggctctaatgaggaagatactgataccccactttttattgggaaagttagaacacttgaattccccttcgtgaatggttcggctgaaatcatgagtctggtgctggcagaaagtagtcctggaagggatagtactgaatattttattgtatttgagccccggctaccacttttatcaagaaccttagaaccatatatcctaccgttcatgttttacaatgatgttaagaagcagcaacaaatggcagcacttacaaaagaaaaggaccaattatctcagtctattgttatgtataaaagtttatttgaagccagccaacagcttcttaatgaaatgaaatgtcaagttgaagaagcaagattaaaagaggcccaattgcgaaatgaactaaaaatacataatattgacattcctacaacacaacaggtgccacacattgaagcacttctgaaaagaaagctatcagaacaagaagaactgaagaaaaaacctagaagatcgtgtactcttccaaactatactaaaggcagtggagatgttttgggaaagattgcacatctagcacaaattgaagatgatagagctgcgatggttatttcttggcatctggcaagtgacatggactgtgtagtcaccctaaccactgacgctgcacgtcgtatctatgatgaaacccaaggtcgtcagcaggtgttgccccttgattctatttacaagaagactcttccagattggaaaagatctctacctcatttccgaaatggaaaattgtattttaaacccattggagatccagtctttgctcgagacttgttaacatttccagataatgtagaacattgtgaaacagtatttggtatgctgttaggagacaccattattttggataatctggatgcggccaatcattatagaaaagaggttgttaaaattacacactgtcctacactgctgaccagagatggagatcgaattcgaagtaatggaaagtttgggggccttcagaataaagctcctccaatggataaacttcggggaatggtatttggagctccagttccaaaacagtgtctgatcttaggggaacaaatagtgcatgcctgtgttcccagctactcaggaggctaagacaagagtgtcgcttgagcccaggagtttgaggtcagcctgggcaacgtagcaagactccatctcttaaaaaaaaaaaaagaagaaatttctgtcattattgaataaatcttcttcagcagtatcgttctgctgtgtgcaaactagacagtgtgaataaggatcttaacagtcaattagagtaccttcgcactccggatatgaggaagaaaaagcaagaacttgatgaacatgagaaaaatctcaaactaatagaggaaaaactaggtatgactcccatacgtaagtgtaatgactcattgcgtcattcaccaaaggttgagacgacagattgtccagttcctcctaaaagaatgagacgagaagctacaagacaaaataggattataaccaaaacagatgtatgagaggtgacagagagaagaggccattggtctcagtaagaatgccctgctttctgcatctctgtttcagaagaccaagagggtgacttaccagactgagtatttctggggacaatacaagtacctgggcatgaatttccatttcgattcagatgggactggaaacaaccattcaattttatgaatcttactggacattatggatttactggaattattccagacattatgccctttggttgtcactaccttgcaaatgtgtaagaggaaaatgtgctaatgtggcagtgactgtaaaactggcacatggcatttattaatcctgaagaaaagtacatgtactatttttcagtataaatataatgaacatgtcagaacta

SEQ ID NO: 187171 - DNA, 4143 bp, Homo sapiens
  Payload ID: 16849
  Gene Symbol: SMCHD1
  Gene Name: structural maintenance of chromosomes flexible hinge domain containing 1
  ENST ID: ENST00000584897
  CDS Start-End: 1-452
aaaaatatgtagaagatgaaatggcaaggctccctgatagattgtcagtaacttggcctgaaggagatgaattattgcctaatgaggttaggcctgctggaacccctattggtgcgttaagaattgaaatactgaataaaaaaggggaagcaatgcaaaagcttccaggaacaagccatggagggtcaaagaaactcctggttgagctcaaagttattttacattcttcaagtggaaataaagagattatttcgcatattagtcaacatggaggaaaatggccttactggtttaaaaaaatggaaaatattcagaagttggggaattataccttgaaattacaagttgtgttgaatgaaagtaatgcagacacttatgcaggaagaccactaccatctaaagcaattaagttttctgttaaagtggtttatctttacattatgaagaaataaccaaaggaccaaattgtgtaattcgaggtgttacagccaagggccctgtaaactcttgtcaaggcaagaattataatctgaaggttactctgcctggcttaaaagaagactcacagattttgaaaattagattactacctggtcaccctcgtcgactgaaagtgaaacctgattctgaaattttagttatagaaaatggaacagctttcccatttcaggtggaagttttagatgaatcagacaacataacagcacaaccaaaattgattgttcattgtaagttttcaggtgctccaaaccttccagtctatgttgtagattgcagtagttctggaaccagtattttaacaggatctgcaattcaagttcagaatattaaaaaagaccagacgcttaaagcaagaattgaaatacctagttgtaaagatgtggcacctgtggagaagactattaagttgcttcccagtagccatgttgcaagactacaaatattcagtgtagaaggacaaaaggcaattcagatcaaacatcaggatgaggttaattggatagcgggtgatattatgcataatcttatttttcaaatgtatgatgaaggagaaagagaaatcaatataacatcagctttagcagaaaaaattaaagttaattggactcctgagattaacaaagaacacttgctacagggtctgcttcctgatgtgcaagtaccaacatctgtaaaagatatgcgctattgccaggtttcattccaagatgatcatgtgtctttggaaagtgcgtttacagtaagaccacttcctgatgaacctaaacatttaaaatgtgaaatgaaaggaggaaaaacagtacagatgggccaagagcttcaaggagaagtagttataataattacagatcagtacggaaatcagattcaagcattttcaccaagttctttatcttctttgtcaattgctggggttggacttgatagctcaaatttgaaaacaacctttcaggaaaacacacagagtataagtgtaagaggcatcaaatttattccaggtcctcctggaaataaggatctttgttttacttggcgtgagttttctgactttattcgagtgcaactaatttctggacctcctgctaaacttctccttatagactggccagaactaaaggagtccattccagtgattaatggaagagatttacagaaccctattattgttcaactttgtgatcagtgggataatccagcaccggtacaacatgttaaaataagtcttacaaaagctagcaatttaaagctcatgccttcaaaccaacagcataaaacagatgagaaaggcagggctaatttgggagtattcagtgtttttgcccctaggggagagcatactcttcaggttaaagccatctataacaaaagtatcatagaaggacctataattaagttaatgattcttccagacccagaaaaacccgttcgtctcaatgttaaatatgacaaagatgcatccttcttagcagggggtcttttcactgattttatgattagtgttatttctgaagatgacagtatcattaaaaacattaatccagcacgtatttccatgaaaatgtggaagctgtctaccagtgggaaccgacccccagcaaatgcagaaacatttagttgtaataaaataaaagataatgacaaagaagatggctgcttctatttcagggataaagtaattcctaataaagtggggacatattgtatccagtttggttttatgatggataaaacaaatattctcaacagtgaacaggttatagttgaagtcctgcctaatcaacctgtgaagttagtacctaaaattaaaccacctacaccagctgtttcaaatgttcgctcagttgccagtaggaccttggtcagagatctacatcttagtatcacggatgactacgacaaccatactggaattgatttggttggcactataatagccaccattaaaggctctaatgaggaagatactgataccccactttttattgggaaagttagaacacttgaattccccttcgtgaatggttcggctgaaatcatgagtctggtgctggcagaaagtagtcctggaagggatagtactgaatattttattgtatttgagccccggctaccacttttatcaagaaccttagaaccatatatcctaccgttcatgttttacaatgatgttaagaagcagcaacaaatggcagcacttacaaaagaaaaggaccaattatctcagtctattgttatgtataaaagtttatttgaagccagccaacagcttcttaatgaaatgaaatgtcaagttgaagaagcaagattaaaagaggcccaattgcgaaatgaactaaaaatacataatattgacattcctacaacacaacaggtgccacacattgaagcacttctgaaaagaaagctatcagaacaagaagaactgaagaaaaaacctagaagatcgtgtactcttccaaactatactaaaggcagtggagatgttttgggaaagattgcacatctagcacaaattgaagatgatagagctgcgatggttatttcttggcatctggcaagtgacatggactgtgtagtcaccctaaccactgacgctgcacgtcgtatctatgatgaaacccaaggtcgtcagcaggtgttgccccttgattctatttacaagaagactcttccagattggaaaagatctctacctcatttccgaaatggaaaattgtattttaaacccattggagatccagtctttgctcgagacttgttaacatttccagataatgtagaacattgtgaaacaggttgttaaaattacacactgtcctacactgctgaccagagatggagatcgaattcgaagtaatggaaagtttgggggccttcagaataaagctcctccaatggataaacttcggggaatggtatttggagctccagttccaaaacagtgtctgatcttaggggaacaaatagatcttcttcagcagtatcgttctgctgtgtgcaaactagacagtgtgaataaggatcttaacagtcaattagagtaccttcgcactccggatatgaggaagaaaaagcaagaacttgatgaacatgagaaaaatctcaaactaatagaggaaaaactaggtatgactcccatacgtaagtgtaatgactcattgcgtcattcaccaaaggttgagacgacagattgtccagttcctcctaaaagaatgagacgagaagctacaagacaaaataggattataaccaaaacagatgtatgagaggtgacagagagaagaggccattggtctcagtaagaatgccctgctttctgcatctctgtttcagaagaccaagagggtgacttaccagactgagtatttctggggacaatacaagtacctgggcatgaatttccatttcgattcagatgggactggaaacaaccattcaattttatgaatcttactggacattatggatttactggaattattccagacattatgccctttggttgtcactaccttgcaaatgtgtaagaggaaaatgtgctaatgtggcagtgactgtaaaactggcacatggcatttattaatcctgaagaaaagtacatgtactatttttcagtataaatataatgaacatgtcagaact

SEQ ID NO: 187172 - DNA, 2819 bp, Homo sapiens
  Payload ID: 16850
  Gene Symbol: SSRP1
  Gene Name: structure specific recognition protein 1
  Uniprot ID: Q08945
  ENST ID: ENST00000278412
  CDS Start-End: 268-2397
gtacggcttccggtggcgggacgcggggccgcgcacgcgggaaaagcttccccggtgtccccccatccccctccccgcgccccccccgcgtccccccagcgcgcccacctctcgcgccggggccctcgcgaggccgcagcctgaggagattcccaacctgctgagcatccgcacacccactcaggagttggggcccagctcccagtttacttggtttcccttgtgcagcctggggctctgcccaggccaccacaggcaggggtcgacatggcagagacactggagttcaacgacgtctatcaggaggtgaaaggttccatgaatgatggtcgactgaggttgagccgtcagggcatcatcttcaagaatagcaagacaggcaaagtggacaacatccaggctggggagttaacagaaggtatctggcgccgtgttgctctgggccatggacttaaactgcttacaaagaatggccatgtctacaagtatgatggcttccgagaatcggagtttgagaaactctctgatttcttcaaaactcactatcgccttgagctaatggagaaggacctttgtgtgaagggctggaactgggggacagtgaaatttggtgggcagctgctttcctttgacattggtgaccagccagtctttgagatacccctcagcaatgtgtcccagtgcaccacaggcaagaatgaggtgacactggaattccaccaaaacgatgacgcagaggtgtctctcatggaggtgcgcttctacgtcccacccacccaggaggatggtgtggaccctgttgaggcctttgcccagaatgtgttgtcaaaggcggatgtaatccaggccacgggagatgccatctgcatcttccgggagctgcagtgtctgactcctcgtggtcgttatgacattcggatctaccccacctttctgcacctgcatggcaagacctttgactacaagatcccctacaccacagtactgcgtctgtttttgttaccccacaaggaccagcgccagatgttctttgtgatcagcctggatcccccaatcaagcaaggccaaactcgctaccacttcctgatcctcctcttctccaaggacgaggacatttcgttgactctgaacatgaacgaggaagaagtggagaagcgctttgagggtcggctcaccaagaacatgtcaggatccctctatgagatggtcagccgggtcatgaaagcactggtaaaccgcaagatcacagtgccaggcaacttccaagggcactcaggggcccagtgcattacctgttcctacaaggcaagctcaggactgctctacccgctggagcggggcttcatctacgtccacaagccacctgtgcacatccgcttcgatgagatctcctttgtcaactttgctcgtggtaccactactactcgttcctttgactttgaaattgagaccaagcagggcactcagtataccttcagcagcattgagagggaggagtacgggaaactgtttgattttgtcaacgcgaaaaagctcaacatcaaaaaccgaggattgaaagagggcatgaacccaagctacgatgaatatgctgactctgatgaggaccagcatgatgcctacttggagaggatgaaggaggaaggcaagatccgggaggagaatgccaatgacagcagcgatgactcaggagaagaaaccgatgagtcattcaacccaggtgaagaggaggaagatgtggcagaggagtttgacagcaacgcctctgccagctcctccagtaatgagggtgacagtgaccgggatgagaagaagcggaaacagctcaaaaaggccaagatggccaaggaccgcaagagccgcaagaagcctgtggaggtgaagaagggcaaagaccccaatgcccccaagaggcccatgtctgcatacatgctgtggctcaatgccagccgagagaagatcaagtcagaccatcctggcatcagcatcacggatctttccaagaaggcaggcgagatctggaagggaatgtccaaagagaagaaagaggagtgggatcgcaaggctgaggatgccaggagggactatgaaaaagccatgaaagaatatgaagggggccgaggcgagtcttctaagagggacaagtcaaagaagaagaagaaagtaaaggtaaagatggaaaagaaatccacgccctctaggggctcatcatccaagtcgtcctcaaggcagctaagcgagagcttcaagagcaaagagtttgtgtctagtgatgagagctcttcgggagagaacaagagcaaaaagaagaggaggaggagcgaggactctgaagaagaagaactagccagtactccccccagctcagaggactcagcgtcaggatccgatgagtagaaacggaggaaggttctctttgcgcttgccttctcacaccccccgactccccacccatattttggtaccagtttctcctcatgaaatgcagtccctggattctgtgccatctgaacatgctctcctgttggtgtgtatgtcactagggcagtggggagacgtcttaactctgctgcttcccaaggatggctgtttataatttggggagagatagggtgggaggcagggcaatgcaggatccaaatcctcatcttactttcccgaccttaaggatgtagctgctgcttgtcctgttcaagttgctggagcaggggtcatgtgaggccaggcctgtagctcctacctggggcctatttctactttcattttgtatttctggtctgtgaaaatgatttaataaagggaactgactttggaaacca

SEQ ID NO: 187173 - DNA, 948 bp, Homo sapiens
  Payload ID: 16850
  Gene Symbol: SSRP1
  Gene Name: structure specific recognition protein 1
  ENST ID: ENST00000526696
  CDS Start-End: 430-948
tcccgccggagcggccagagcgggcgtcgggttgggtgtcagcggtattccgggcccggttctccacccaggcctggacctggaccctcgggcactgcagcgtccgtctgtaggtttccaggcagaggaaatcctgagacatccaggcgcagctgggagttgctacctggctccatccgtgagcacagcgagaatgatggtcgactgaggttgagccgtcagggcatcatcttcaagaatagcaagacaggcaaagtggacaacatccaggctggggagttaacagaaggtatctggcgccgtgttgctctgggccatggacttaaactgcttacaaagaatggccatgtctacaagtatgatggcttccgagaatcggagtttgagaaactctctgatttcttcaaaactcactatcgccttgagctaatggagaaggacctttgtgtgaagggctggaactgggggacagtgaaatttggtgggcagctgctttcctttgacattggtgaccagccagtctttgagatacccctcagcaatgtgtcccagtgcaccacaggcaagaatgaggtgacactggaattccaccaaaacgatgacgcagaggtgtctctcatggaggtgcgcttctacgtcccacccacccaggaggatggtgtggaccctgttgaggcctttgcccagaatgtgttgtcaaaggcggatgtaatccaggccacgggagatgccatctgcatcttccgggagctgcagtgtctgactcctcgtggtcgttatgacattcggatctaccccacctttctgcacctgcatggcaagacctttgactacaagatcccctacaccacagtactgcgtctgtttttgttaccccacaaggaccagcgccagatgttctttgtgatcagcctggatcccccaatcaagcaaggccaaactcgctac

SEQ ID NO: 187174 - DNA, 648 bp, Homo sapiens
  Payload ID: 16850
  Gene Symbol: SSRP1
  Gene Name: structure specific recognition protein 1
  ENST ID: ENST00000529002
  CDS Start-End: 382-648
ggcttccggtggcgggacgcggggccgcgcacgcgggaaaagcttccccggtgtccccccatccccctccccgcgccccccccgcgtccccccagcgcgcccacctctcgcgccggggccctcgcgaggccgcagcctgaggagaatgatggtcgactgaggttgagccgtcagggcatcatcttcaagaatagcaagacaggcaaagtggacaacatccaggctggggagttaacagaaggtatctggcgccgtgttgctctgggccatggacttaaactgcttacaaagaatggccatgtctacaagtatgatggcttccgagaatcggagtttgagaaactctctgatttcttcaaaactcactatcgccttgagctaatggagaaggacctttgtgtgaagggctggaactgggggacagtgaaatttggtgggcagctgctttcctttgacattggtgaccagccagtctttgagatacccctcagcaatgtgtcccagtgcaccacaggcaagaatgaggtgacactggaattccaccaaaacgatgacgcagaggtgtctctcatggaggtgcgcttctacgtcccacccacccaggaggatggtgtggaccctgttgaggcctttgcccagaatgtgttg

SEQ ID NO: 187175 - DNA, 675 bp, Homo sapiens
  Payload ID: 16850
  Gene Symbol: SSRP1
  Gene Name: structure specific recognition protein 1
  ENST ID: ENST00000635721
  CDS Start-End: 1-675
ggaggagtacgggaaactgtttgattttgtcaacgcgaaaaagctcaacatcaaaaaccgaggattgaaagagaaaaaagagggcatgaacccaagctacgatgaatatgctgactctgatgaggaccagcatgatgcctacttggagaggatgaaggaggaaggcaagatccgggaggagaatgccaatgacagcagcgatgactcaggagaagaaaccgatgagtcattcaacccaggtgaagaggaggaagatgtggcagaggagtttgacagcaacgcctctgccagctcctccagtaatgagggtgacagtgaccgggatgagaagaagcggaaacagctcaaaaaggccaagatggccaaggaccgcaagagccgcaagaagcctgtggaggtgaagaagggcaaagaccccaatgcccccaagaggcccatgtctgcatacatgctgtggctcaatgccagccgagagaagatcaagtcagaccatcctggcatcagcatcacggatctttccaagaaggcaggcgagatctggaagggaatgtccaaagagaagaaagaggagtgggatcgcaaggctgaggatgccaggagggactatgaaaaagccatgaaagaatatgaagggggccgaggcgagtcttctaagagggacaagtcaaagaagaa

SEQ ID NO: 187176 - DNA, 4558 bp, Homo sapiens
  Payload ID: 16851
  Gene Symbol: STT3A
  Gene Name: STT3A, subunit of the oligosaccharyltransferase complex (catalytic)
  Uniprot ID: P46977
  ENST ID: ENST00000392708
  CDS Start-End: 160-2277
attggcctggagccagccaacgggggagcggtccgggaggcggacccggctcctgccagggttgggtgcgccgctgaacggatggctgagggagccccgcggatcgtttaggaaagccggccagctgatcgtcgtgtgttgccacccattcatgtcaagatgactaagtttggatttttgcgattgtcctatgagaagcaggacacacttttgaagcttctcattctgtcaatggctgctgtattatccttctccactcgtctgtttgctgtcctgagatttgaaagtgttatccatgagtttgatccgtactttaattatcggactaccaggttcctggctgaggaggggttttataaattccataactggtttgatgaccgagcctggtaccctttgggacgaatcattggaggaacaatttacccaggtttaatgatcacctctgctgcaatctaccatgtactccattttttccacatcaccatcgacattcggaatgtctgtgtgttcctggcccctctcttctcctccttcaccaccatcgtcacgtaccaccttaccaaagagctcaaggatgcaggggctgggcttcttgctgctgccatgattgctgtagttcctggatatatctcccgatctgtggctggctcctatgataatgaagggattgccatcttttgcatgctactcacctactacatgtggatcaaggcagtaaagactggttccatctgttgggcagctaagtgtgcccttgcttatttctacatggtctcgtcatggggaggttatgtgttcctgatcaacttaattcctctccacgtcctcgtgctgatgctcacaggccgtttctctcaccggatctatgtggcctactgtactgtttactgcctgggcactatactttctatgcagatctcctttgtgggtttccagcctgtcctttcatcagagcacatggcagcctttggggtctttggtctctgccagatccatgcctttgtggattacctgcgcagcaagttgaatccacaacaatttgaagttcttttccggagcgtcatctctctggtaggctttgtccttctcaccgtgggagctctcctcatgctgacaggaaaaatatctccctggacggggcgtttctactcgctgctggatccctcttatgctaagaacaacatccccatcattgcttctgtgtctgagcatcagcccacaacctggtcctcatactattttgacctgcagctcctcgtcttcatgtttccagttggcctctattactgctttagcaacctgtctgatgcccggatttttatcatcatgtatggtgtgaccagcatgtacttttcagctgtaatggtgcgtctaatgctagtgttggcacctgttatgtgcattctctctggcattggagtctcccaggtgctgtccacatacatgaagaatctggacataagtcgtccagacaagaagagcaagaagcaacaggattccacctaccctattaagaatgaagtggcaagtgggatgatactggtcatggctttctttctcatcacctacacctttcattcaacctgggtgaccagtgaggcctactcttctccgtccattgtactatctgcccgtggtggggatggcagtaggatcatatttgatgacttccgagaagcatattattggcttcgtcataatactccagaggatgcgaaggtcatgtcctggtgggattatggctatcagattacagctatggcaaaccgaacaattttagtggacaataacacatggaataatacccatatttctcgagtagggcaggcaatggcgtccacagaggaaaaagcctatgagatcatgagggagctcgatgtcagctatgtgctggtcatttttggaggcctcactgggtattcctctgatgatatcaacaagtttctttggatggtccggattggagggagcacagatacaggcaaacatatcaaggagaatgactattatactccaactggggagttccgtgtggaccgtgaaggttctccagtgctgctcaactgcctcatgtacaagatgtgttactatcgctttggacaggtttacacagaagccaagcgtcctccaggctttgaccgtgtccgaaatgctgagattgggaataaagactttgagcttgatgtcctggaggaagcatataccacagaacattggctggtcaggatatacaaggtaaaggacctggataatcgaggcttgtcaaggacataaatgtcacgtccagctctgatatgcttcgcactgagcacatcacatttaggacgttgaagatttttttttttttttttttttaatatgcagtttgtaagaacaaaactggatggcatcagaattgtctggaagttttgtcttgggcagtatgggctgggccaaatgaaatgatttttataattctaaacaggttaccaaatgaaatgtcatggctttactttggtcaattaaaggggggaatttttttaaaaaatgtgccttatttgttttgacttataactgatttgagggaggcaaaagctatgctaggctgccagaaggacataagcagaccttgtccattctcttagctccctaaattagccaaatagagacttctttctcaaatcaggaaaactatcaaagaccaattcagatcctacatttacagacagttttgtcataaccctttgcattgcagcacctagtacaattccttggaaacagcgtggctcaataaatttttattgaatgaataaatgtgggaccagaagagtgctagaagagtgcctttctgggctactatgtctctgttctcaatgtcttttatccttagacgctctttgactttataaatcagcagttttgaagactcaagacaaacagtgaaattattggtttatcaatggagaggaagaaactcttccagcattacatatagagcttgatggtcagtaggtgtttttgaatcagcttaaatataatcatacatatcaatttgaaatggagcttttcagtactctcacttattcatgacacaggaatgaccctttactcaaaactcttgtggttgttcaaaggtgagcttctttttcccttagtcttagcctatgtgttgctgttgtatattgttaccaagttcaactacctaattttgaagctctttccaaataagatacaaattaaaaggggaagcattgccagtaacaggtccctagagagcagtgccagcctgcctgcaagaaaagaggagaaacttcttaaaaagttttaagcctgggcaacataaggagattgtttctatgaaaaataaaaattagccaggtatggtggtgtacacctgtagtcccagctactcgggaagatgagattggaggatcacttgggcctgggaggttgaggctacagtgaactgtgattgtgccactgtactccagtctgggcgacagtgaaatcttgtctaaacaaaaacaatttaactgggaagcacagtggtccttgaggacatttaatatcaggacaaagagcctatgaatatatcactgatgtatataaaccctaaggcgttaataaaagctaactgtttagtgttatccatttaagggaacaggaggaattgcataacttttagattagtcatagtggtgctcctaagggatatgctgttgtatatttgtatagccagggcacttagccttccaaaccaatttatataccatgttcttcaactgtgggtgagatttagcctcaagatttgatttactatatgtaagtacattacttgatttctataaagaatctttagtggaagaggttattctgaattatttatcaatatgattaataccagttagaaattattaatgatcttcctttatactatacataggataacttttaacttgtcgctacagttgttgctctgaggatcttaattttgttactttctaggctacatgaagctatctttttaaaaagtgtactcttcattttcactgttattgtgtacttagcataaaaaactcaaatctaggccaggtgcagtggctcatgcctgtaatcccagcactttgggaggctgaagcatgcggatcacttgagcccaggagttcaagaccagcctgggcaacatggctaatgaacactaagcatagttttgatgtctttcatattaaagactttctcaaattcttgctagtctgctcctctttaagagtgggaccctaggcagggcgcagtggatcatgcctgtaatcccagcactttgggaggccgaggcaggcagatcacttgaggccaggagtttgagaccggcctggcaacgtgggaaaactctgtctctactaaaaatacaaaaattagctgggtgtggggtacacaccctgtaatctcagctactggggaggctgaggcatgagaattgcccaggaggtggaggttgcagtgagcagacatcatgccactgcactccaacctgggagacagagcaagactgtctcaaaaaaaaaaaaaaaaaaaaaaa

SEQ ID NO: 187177 - DNA, 2160 bp, Homo sapiens
  Payload ID: 16851
  Gene Symbol: STT3A
  Gene Name: STT3A, subunit of the oligosaccharyltransferase complex (catalytic)
  Uniprot ID: P46977
  ENST ID: ENST00000531491
  CDS Start-End: 241-2082
gctgaacggatggctgagggagccccgcggatcgtttaggaaagccggccagccttctccactcgtctgtttgctgtcctgagatttgaaagtgttatccatgagtttgatccgtactttaattatcggactaccaggttcctggctgaggaggggttttataaattccataactggtttgatgaccgagcctggtaccctttgggacgaatcattggaggaacaatttacccaggtttaatgatcacctctgctgcaatctaccatgtactccattttttccacatcaccatcgacattcggaatgtctgtgtgttcctggcccctctcttctcctccttcaccaccatcgtcacgtaccaccttaccaaagagctcaaggatgcaggggctgggcttcttgctgctgccatgattgctgtagttcctggatatatctcccgatctgtggctggctcctatgataatgaagggattgccatcttttgcatgctactcacctactacatgtggatcaaggcagtaaagactggttccatctgttgggcagctaagtgtgcccttgcttatttctacatggtctcgtcatggggaggttatgtgttcctgatcaacttaattcctctccacgtcctcgtgctgatgctcacaggccgtttctctcaccggatctatgtggcctactgtactgtttactgcctgggcactatactttctatgcagatctcctttgtgggtttccagcctgtcctttcatcagagcacatggcagcctttggggtctttggtctctgccagatccatgcctttgtggattacctgcgcagcaagttgaatccacaacaatttgaagttcttttccggagcgtcatctctctggtaggctttgtccttctcaccgtgggagctctcctcatgctgacaggaaaaatatctccctggacggggcgtttctactcgctgctggatccctcttatgctaagaacaacatccccatcattgcttctgtgtctgagcatcagcccacaacctggtcctcatactattttgacctgcagctcctcgtcttcatgtttccagttggcctctattactgctttagcaacctgtctgatgcccggatttttatcatcatgtatggtgtgaccagcatgtacttttcagctgtaatggtgcgtctaatgctagtgttggcacctgttatgtgcattctctctggcattggagtctcccaggtgctgtccacatacatgaagaatctggacataagtcgtccagacaagaagagcaagaagcaacaggattccacctaccctattaagaatgaagtggcaagtgggatgatactggtcatggctttctttctcatcacctacacctttcattcaacctgggtgaccagtgaggcctactcttctccgtccattgtactatctgcccgtggtggggatggcagtaggatcatatttgatgacttccgagaagcatattattggcttcgtcataatactccagaggatgcgaaggtcatgtcctggtgggattatggctatcagattacagctatggcaaaccgaacaattttagtggacaataacacatggaataatacccatatttctcgagtagggcaggcaatggcgtccacagaggaaaaagcctatgagatcatgagggagctcgatgtcagctatgtgctggtcatttttggaggcctcactgggtattcctctgatgatatcaacaagtttctttggatggtccggattggagggagcacagatacaggcaaacatatcaaggagaatgactattatactccaactggggagttccgtgtggaccgtgaaggttctccagtgctgctcaactgcctcatgtacaagatgtgttactatcgctttggacaggtttacacagaagccaagcgtcctccaggctttgaccgtgtccgaaatgctgagattgggaataaagactttgagcttgatgtcctggaggaagcatataccacagaacattggctggtcaggatatacaaggtaaaggacctggataatcgaggcttgtcaaggacataaatgtcacgtccagctctgatatgcttcgcactgagcacatcacatttaggacgttgaagatttttttttttttttttt

SEQ ID NO: 187178 - DNA, 542 bp, Homo sapiens
  Payload ID: 16851
  Gene Symbol: STT3A
  Gene Name: STT3A, subunit of the oligosaccharyltransferase complex (catalytic)
  ENST ID: ENST00000529886
  CDS Start-End: 190-542
cagttacagagaagccttgagacagatgattggaagcgggtatagatctgagcagtcgttacagtctgatatatgggatgagaacacagtggatctgtgtttgggtacctccacctctttttgagtgcatgattgtacctgcattagttatcagctgatcgtcgtgtgttgccacccattcatgtcaagatgactaagtttggatttttgcgattgtcctatgagaagcaggacacacttttgaagcttctcattctgtcaatggctgctgtattatccttctccactcgtctgtttgctgtcctgagatttgaaagtgttatccatgagtttgatccgtactttaattatcggactaccaggttcctggctgaggaggggttttataaattccataactggtttgatgaccgagcctggtaccctttgggacgaatcattggaggaacaatttacccaggtttaatgatcacctctgctgcaatctaccatgtactccattttttccacatcaccatcgacattcggaatgtctgtgtgtt

SEQ ID NO: 187179 - DNA, 607 bp, Homo sapiens
  Payload ID: 16851
  Gene Symbol: STT3A
  Gene Name: STT3A, subunit of the oligosaccharyltransferase complex (catalytic)
  ENST ID: ENST00000525652
  CDS Start-End: 300-607
atggaggggaaggcgcgtaggatgctggggtgatgagtgtcccgcgctgaggggtatcagaggtggtcagttctttgagggtgggaagaagagggaggtgggacccgctggaacgaccggaagggagaagagagtaaaagatcgtgagagggtgtggaaacgtgtgtaggaaaacggggctggggaaattgcagtctgggaaactagaggcagggtggcaggagatgccacagcttgcagggcacagttgaggagagcaggttgctgatcgtcgtgtgttgccacccattcatgtcaagatgactaagtttggatttttgcgattgtcctatgagaagcaggacacacttttgaagcttctcattctgtcaatggctgctgtattatccttctccactcgtctgtttgctgtcctgagatttgaaagtgttatccatgagtttgatccgtactttaattatcggactaccaggttcctggctgaggaggggttttataaattccataactggtttgatgaccgagcctggtaccctttgggacgaatcattggaggaacaatttacccaggtttaatgatcacctctgctgcaatctaccatgtact

SEQ ID NO: 187180 - DNA, 582 bp, Homo sapiens
  Payload ID: 16851
  Gene Symbol: STT3A
  Gene Name: STT3A, subunit of the oligosaccharyltransferase complex (catalytic)
  ENST ID: ENST00000526726
  CDS Start-End: 1-582
tttactgcctgggcactatactttctatgcagatctcctttgtgggtttccagcctgtcctttcatcagagcacatggcagcctttggggtctttggtctctgccagatccatgcctttgtggattacctgcgcagcaagttgaatccacaacaatttgaagttcttttccggagcgtcatctctctggaaaaatatctccctggacggggcgtttctactcgctgctggatccctcttatgctaagaacaacatccccatcattgcttctgtgtctgagcatcagcccacaacctggtcctcatactattttgacctgcagctcctcgtcttcatgtttccaggtgcgtctaatgctagtgttggcacctgttatgtgcattctctctggcattggagtctcccaggtgctgtccacatacatgaagaatctggacataagtcgtccagacaagaagagcaagaagcaacaggattccacctaccctattaagaatgaagtggcaagtgggatgatactggtcatggctttctttctcatcacctacacctttcattcaacctgggtgaccagtgaggcct

SEQ ID NO: 187181 - DNA, 569 bp, Homo sapiens
  Payload ID: 16851
  Gene Symbol: STT3A
  Gene Name: STT3A, subunit of the oligosaccharyltransferase complex (catalytic)
  ENST ID: ENST00000527606
  CDS Start-End: 212-569
agcagtgatttaaataatgacctttcaataagtggtgggttccgttcatgggagaataggaaactgcgtgagtggtagaggcaacaagttcgaagagctgcgagacgttcccactctctctggtgtagccttggctcaccgaggcgcgcagggagtggaagtgcctgaggataaagctgatcgtcgtgtgttgccacccattcatgtcaagatgactaagtttggatttttgcgattgtcctatgagaagcaggacacacttttgaagcttctcattctgtcaatggctgctgtattatccttctccactcgtctgtttgctgtcctgagatttgaaagtgttatccatgagtttgatccgtactttaattatcggactaccaggttcctggctgaggaggggttttataaattccataactggtttgatgaccgagcctggtaccctttgggacgaatcattggaggaacaatttacccaggtttaatgatcacctctgctgcaatctaccatgtactccattttttccacatcaccatcgacattcggaatgtctgtgtgttcctgg

SEQ ID NO: 187182 - DNA, 2402 bp, Homo sapiens
  Payload ID: 16851
  Gene Symbol: STT3A
  Gene Name: STT3A, subunit of the oligosaccharyltransferase complex (catalytic)
  Uniprot ID: P46977
  ENST ID: ENST00000529196
  CDS Start-End: 207-2324
ggacccggctcctgccagggttgggtgcgccgctgaacggatggctgagggagccccgcggatcgtttaggaaagccggccaggcattccagaaaacagctgcaaaccctgagagatatggctggattgttgacctcctggagtagttaggcctttatttttagttgcaaactgatcgtcgtgtgttgccacccattcatgtcaagatgactaagtttggatttttgcgattgtcctatgagaagcaggacacacttttgaagcttctcattctgtcaatggctgctgtattatccttctccactcgtctgtttgctgtcctgagatttgaaagtgttatccatgagtttgatccgtactttaattatcggactaccaggttcctggctgaggaggggttttataaattccataactggtttgatgaccgagcctggtaccctttgggacgaatcattggaggaacaatttacccaggtttaatgatcacctctgctgcaatctaccatgtactccattttttccacatcaccatcgacattcggaatgtctgtgtgttcctggcccctctcttctcctccttcaccaccatcgtcacgtaccaccttaccaaagagctcaaggatgcaggggctgggcttcttgctgctgccatgattgctgtagttcctggatatatctcccgatctgtggctggctcctatgataatgaagggattgccatcttttgcatgctactcacctactacatgtggatcaaggcagtaaagactggttccatctgttgggcagctaagtgtgcccttgcttatttctacatggtctcgtcatggggaggttatgtgttcctgatcaacttaattcctctccacgtcctcgtgctgatgctcacaggccgtttctctcaccggatctatgtggcctactgtactgtttactgcctgggcactatactttctatgcagatctcctttgtgggtttccagcctgtcctttcatcagagcacatggcagcctttggggtctttggtctctgccagatccatgcctttgtggattacctgcgcagcaagttgaatccacaacaatttgaagttcttttccggagcgtcatctctctggtaggctttgtccttctcaccgtgggagctctcctcatgctgacaggaaaaatatctccctggacggggcgtttctactcgctgctggatccctcttatgctaagaacaacatccccatcattgcttctgtgtctgagcatcagcccacaacctggtcctcatactattttgacctgcagctcctcgtcttcatgtttccagttggcctctattactgctttagcaacctgtctgatgcccggatttttatcatcatgtatggtgtgaccagcatgtacttttcagctgtaatggtgcgtctaatgctagtgttggcacctgttatgtgcattctctctggcattggagtctcccaggtgctgtccacatacatgaagaatctggacataagtcgtccagacaagaagagcaagaagcaacaggattccacctaccctattaagaatgaagtggcaagtgggatgatactggtcatggctttctttctcatcacctacacctttcattcaacctgggtgaccagtgaggcctactcttctccgtccattgtactatctgcccgtggtggggatggcagtaggatcatatttgatgacttccgagaagcatattattggcttcgtcataatactccagaggatgcgaaggtcatgtcctggtgggattatggctatcagattacagctatggcaaaccgaacaattttagtggacaataacacatggaataatacccatatttctcgagtagggcaggcaatggcgtccacagaggaaaaagcctatgagatcatgagggagctcgatgtcagctatgtgctggtcatttttggaggcctcactgggtattcctctgatgatatcaacaagtttctttggatggtccggattggagggagcacagatacaggcaaacatatcaaggagaatgactattatactccaactggggagttccgtgtggaccgtgaaggttctccagtgctgctcaactgcctcatgtacaagatgtgttactatcgctttggacaggtttacacagaagccaagcgtcctccaggctttgaccgtgtccgaaatgctgagattgggaataaagactttgagcttgatgtcctggaggaagcatataccacagaacattggctggtcaggatatacaaggtaaaggacctggataatcgaggcttgtcaaggacataaatgtcacgtccagctctgatatgcttcgcactgagcacatcacatttaggacgttgaagatttttttttttttttttt

SEQ ID NO: 187183 - DNA, 4248 bp, Homo sapiens
  Payload ID: 16852
  Gene Symbol: STT3B
  Gene Name: STT3B, subunit of the oligosaccharyltransferase complex (catalytic)
  Uniprot ID: Q8TCJ2
  ENST ID: ENST00000295770
  CDS Start-End: 210-2690
gcggccgctgctgaggcggagactccccgccgccgcttcctccacccccagtccgccggcctcgcggcgctgagggcgggagcgcgcagagctcttccctcctcctttttcttcctcctcctcctcctcctccgggtccccgcccagcacccctcgcaccaggcggcggcggcggaggaggagagctagacccgccgccggggcacaacatggcggagccctcggccccggagagcaagcacaagtcgtccctcaactcgtccccgtggagtggcctcatggccctgggaaacagccggcacggccaccacgggcccggggcccagtgcgcgcacaaggcggcgggcggcgcggcgccgccgaagccggccccggcggggctgtccggggggctgtcgcagccggctgggtggcagtcgcttctctccttcaccatcctcttcctggcctggcttgccggcttcagctcgcgcctcttcgccgtcatccgcttcgaaagcatcatccacgagttcgacccgtggtttaactatagatcaacacatcatcttgcatctcatgggttctatgaatttttaaattggtttgatgaaagagcatggtatccactaggaagaatagtaggtggtactgtttacccagggttgatgataaccgctggccttattcattggattttaaatacattgaacataactgttcacataagagacgtatgtgtgttccttgcaccaacttttagcggccttacatctatatctactttcctgcttacaagagaactttggaaccaaggagcaggacttttagctgcttgttttattgctattgtaccaggctacatatctcggtcagtagctggatcctttgataatgaaggcattgctatttttgcacttcagttcacatactatttatgggtaaaatctgtaaaaactgggtcagttttttggacaatgtgctgctgcttatcctatttctatatggtctctgcttggggtggttatgtatttatcatcaatcttattccactgcatgtatttgtgttgttactgatgcagagatacagcaaaagagtctacatagcatatagcactttctacattgtgggtttaatattatcaatgcagataccttttgtgggattccagccaatcagaacaagtgaacacatggcagctgcaggtgtctttgcattgctgcaagcttatgctttcttgcagtatctgagagaccgattaacaaaacaagagttccagacccttttctttttgggtgtatcactagctgcaggtgctgtgttccttagtgtcatctatttgacttatacaggttacattgcaccatggagtggcaggttttattcattgtgggatactgggtatgcaaaaatacacattccaattattgcatcagtgtctgagcatcaacctacgacttgggtgtctttcttctttgatctacatattcttgtatgtaccttcccagcaggcctttggttctgcatcaaaaatatcaacgatgaaagagtatttgttgctctatatgcaatcagtgctgtctactttgctggagtgatggtgcgactgatgttgactttgactccagtcgtgtgtatgctgtctgcaattgccttttcaaatgtttttgagcactatttgggggatgacatgaaaagggaaaatccacctgtggaggacagcagtgatgaggatgacaaaagaaaccaaggaaatttgtatgataaggcaggtaaagtgaggaaacatgcaactgaacaggaaaaaactgaagagggattaggccctaatataaaaagcattgtcaccatgttgatgctgatgctattgatgatgtttgctgtccactgtacctgggtcacaagcaatgcctactctagtccaagtgtagtcctggcctcatacaatcatgatggcaccaggaatatcttagatgattttagagaagcttacttttggctaaggcaaaatacagatgaacatgcacgagtaatgtcttggtgggattatggctatcagatagctggaatggctaatagaactacgttggtggataataacacctggaataacagccacatagcactggtgggaaaagctatgtcttctaatgaaacagcagcctataaaatcatgaggactctagatgtagattatgttttggttatttttggaggggttattggctattctggtgatgatatcaacaaatttctctggatggttaggatagctgaaggagaacatcccaaagacattcgggaaagtgactattttaccccacagggagaattccgtgtagacaaagcaggatcccctactttgttgaattgccttatgtataaaatgtcatactacagatttggagaaatgcagctggattttcgtacacccccaggttttgaccgaacacgtaatgctgagattggaaataaggacattaaattcaaacatttggaagaagcctttacatcagaacactggcttgttaggatatataaagtaaaagcacctgataacagggagacattagatcacaaacctcgagtcaccaacattttcccaaaacagaagtatttgtcaaagaagactaccaaaaggaagcgtggctacattaaaaataagctggtttttaagaaaggcaagaaaatatctaagaagactgtttaaatgcactgttctggttcctaacttgaagcagttgtccttgtgagaaccggtctttgcctttagctcatgtcgtgtttcacagcaaagagggtacagaaccatcactggtccaggttaatgtacaaaattttctggcaatgcctgattaaaaaaataaaattggcttgttgagaacagctgttttcgatttctaatgtgaagcaagacagagcactgctgtaaatgtctagcagcagattttttttttattggtacatattatccttcaaatctgagaatttggactaactgcaccaaagaaccctctaatttggtccctggcacatgcatacttgtcaatgtttttattcttttacaagacctgcattttatttgaattacccgaatagcaatatgtaaaatacaagtgacaaaatgtgatgagagcttcttgaaccggtaaactagtacaggtctgagaaagacatattagaagaatcattatacttccttgaattatatttattttcatgtttctctaatgcaaagaatgtttcatcaaatgtatattttctgttgcttactgtttgctctgagaagaagctgctgtttcaaagatggacctctgagtagctaattgattcaagtagtttttttatgttgacacattattactgctgttagcagtcgttttcaccaggtacttacagagcagatttcatacatcattcattcaagggctaaatttatattttttggaaatcatggcaactacacaggatgttgcttaccaggacggagttttggtatcttagtactgaagttagcactatgtttacatgcaaaagattaaggaaaaaacccttaaagtggacaggtatccaaagttcattttctgtgactcatcaaagtgacaaaagacttgtaacaactttgcctggacttttttcattttacaacagttcatccattcacaatgattttgttctctgctccatattttttaatcccttaagcatttgatgaaacactctttagtgctatatgcattttcttacttttgttaaaaatgtgacagttgtcaaaaaatgcactaaaatgtaaatggagattgaacaagttcactttccagcttataggcaactttatacagacttgaacattttctccagttgtttagtaaaagtgaaagagaaagggtttttcctgccacaggatataacttttttttatataacaagcataacacaccactgcttttggtggaaaagtgcagaatagtatgtaccttttatgaagaaaaatgtaatttacaatattcagtgagaatgttactgctgattttcttttccaaggtgtagaatattctttgatttatagaattcatttttgacccagatgatggttcctttacagaacaataaaatggctgaacattttcacaaatagagtgtaacgaagtctggatttctgataccttgtcatttgggggattttattttactttgttgctttaaaattcaatgcagagaagttgttgactgtaggggaaataaagttaattcaaattttgtgttaa

SEQ ID NO: 187184 - DNA, 3433 bp, Homo sapiens
  Payload ID: 16853
  Gene Symbol: STX16-NPEPL1
  Gene Name: STX16-NPEPL1 readthrough (NMD candidate)
  ENST ID: ENST00000530122
  CDS Start-End: 574-1722
ggttcagacaagtccccagaagggagctgcaggcgccctcgagtccaggccccaagcctggctccggttgtccaaagagggcctaggccaggcctctggtgcggaaactgagtcacagccagacctcagggcacggcctagacgcttacgagccaaagttaggggtagagagcagagacctccggggggtctcagggagtagggggcttcagggcctcccagtctagagccggattggcgagttagacgcttgtagatccaaggttggattggggtggggtctctgggacgttggatcgctacgcaaggattggggggattcaagtgcttagagatcgaagtctgccctgggtagggggagtcagacaattggaaagcctaggtagttatttggggaggggtctctacgccttggcgaagcgcacagctgcatctttttggcttgaggcctgaggccttgtcgagaagcttccgtgaaagggtgggccagccgggccacgagaaagaaagtgaataaatcaggaatataagtgggcggggggcccctgagaggggggtcgcaaagggtgagacatggccaccaggcgtttaaccgacgctttcttgttgttgcggaataattccatccaaaaccggcagctgttagccgagcaagtgagtagtcacatcacctccagccctctgcattcacgtagcattgctgcggagctggacgagcttgctgatgaccgtatggcactggtgtcaggcatcagcttagatccagaagcagcgattggtgtgacaaaacggccacctcctaagtgggtggatggagtggatgaaattcagtatgatgttggccggattaagcagaagatgaaagaattggccagccttcatgacaagcatttaaacagacccaccctggatgacagcagcgaagaggaacatgccattgagataactacccaagagatcactcagctcttccacaggtgccagcgtgccgtgcaggccctgccgagccgggcccgggcctgctccgagcaggaggggcggctgcttgggaacgtggtggcctcgctggcgcaggccctgcaggaactctccaccagcttccggcacgcacagtcaggctacctcaaacgcatgaagaatcgagaggaaagatcccagcattttttcgacacatcagtaccactaatggatgatggagacgataacactctttaccatcggggttttacagaggaccagttagttctggtggagcagaacacactgatggtggaagagcgggaacgagagattcgccagattgtacagtccatttctgacctgaatgaaatattcagggacttaggggcgatgattgtagaacagggtacagtccttgacagaattgactataacgttgaacagtcctgtatcaaaactgaagatggtttgaaacagcttcacaaggacttctcccacgtggaaggccttctttctcaatctcttcgcctgtggaagtcctattacatctgtcagggcatggccttagtctctcaccctctaggaagatcctccagctgtctcagtcctctggagtgccgtgtgcctgtctgcaacgtatttgcaaacagaaaaaagagtgagagatcttcatacacacttgcctgctctgtgccaggaactggaggaaaaaaaaacaacaaaaagtcaaaaagacctgccttcaggatgctgaagctctagtctgtggtgtttccaaggggccagggaccatggctcagagctgagcagacagacctggagcctgtggacagggaaggctggttatgaagaagaaactcaaaataacaggagtggcttatggaactacatggagctctggcaggctgccctgagcacgctcaaccccaaccccacggacagctgtcccctctacctgaactacgccaccgtggctgccctgccctgcagggtgagccggcacaacagcccctcggccgcccacttcatcacgcggctggtgcggacctgcctgccgcccggagcgcatcgctgcattgtgatggtctgcgagcagccggaggtctttgcttccgcctgtgccctggcccgggccttcccgctgttcacccaccgctcaggtgcctctcggcgcttggagaagaagacggtcaccgtggagtttttcctggtgggacaagacaacgggccggtggaggtgtccacattgcagtgcttagcgaatgccacagacggcgtgcggctagcagcccgcatcgtggacacaccctgcaatgagatgaacaccgacaccttcctcgaggagattaacaaagttggaaaggagctggggatcatcccaaccatcatccgggatgaggaactgaagacgagaggatttggaggaatctatggggttggcaaagccgccctgcatcccccagccctggccgtcctcagccacaccccagatggagccacgcagaccatcgcctgggtgggcaaaggcatcgtctatgacactggaggcctcagcatcaaagggaagagggcacggaaacgaatacagtggctcccggacctctttgggactgtggcctgatactccagcacagggggtactaccatgccggggatgaagcgagactgcgggggtgctgcggccgtcctgggggccttcagagccgcaatcaagcagggtttcaaagacaacctccacgctgtgttctgcttggctgagaactcggtggggcccaatgcgacaaggccagatgacatccacctgctgtactcagggaagacggtggaaatcaacaacacggatgccgagggcaggctggtgctggcagatggcgtgtcctatgcttgcaaggacctgggggccgacatcatcctggacatggccaccctgaccggggctcagggcattgccacagggaagtaccacgccgcggtgctcaccaacagcgctgagtgggaggccgcctgtgtgaaggcgggcaggaagtgtggggacctggtgcacccgctggtctactgccccgagctgcacttcagcgagttcacctcagctgtggcggacatgaagaactcagtggcggaccgagacaacagccccagctcctgtgctggcctcttcatcgcctcacacatcggcttcgactggcccggagtctgggtccacctggacattgctgcaccggtgcatgctggtgagcgagccacaggcttcggtgtggccctcctgctggcgctcttcggccgtgcctctgaggaccctctgctgaacctggtgtccccactgggctgtgaggtggatgtcgaggagggggacctggggagggactccaagagacgcaggcttgtgtgagcctcctgcctcggccctgacaaacggggatcttttacctcactttgcactgattaattttaagcaattgaaagattgcccttc

SEQ ID NO: 187185 - DNA, 3507 bp, Homo sapiens
  Payload ID: 16854
  Gene Symbol: SUB1
  Gene Name: SUB1 homolog, transcriptional regulator
  Uniprot ID: P53999
  ENST ID: ENST00000265073
  CDS Start-End: 129-512
gccccatcacgtgaccgcagccccagcgcggcggggccggcgtctcctggctgccgtcacttccggttctctgtcagtcgcgagcgaacgaccaagagggtgttcgactgctagagccgagcgaagcgatgcctaaatcaaaggaacttgtttcttcaagctcttctggcagtgattctgacagtgaggttgacaaaaagttaaagaggaaaaagcaagttgctccagaaaaacctgtaaagaaacaaaagacaggtgagacttcgagagccctgtcatcttctaaacagagcagcagcagcagagatgataacatgtttcagattgggaaaatgaggtacgttagtgttcgcgattttaaaggcaaagtgctaattgatattagagaatattggatggatcctgaaggtgaaatgaaaccaggaagaaaaggtatttctttaaatccagaacaatggagccagctgaaggaacagatttctgacattgatgatgcagtaagaaaactgtaaaattcgagccatataaataaaacctgtactgttctagttgttttaatctgtctttttacattggcttttgttttctaaatgttctccaagctattgtatgtttggattgcagaagaatttgtaagatgaatacttttttttaatgtgcattattaaaaatattgagtgaagctaattgtcaactttattaaggattactttgtctgcccaccacctagtgtaaaataaaatcaagtaatacaatcttaactgttgtggccttttttgatcataagagttggtactgtttaaggccaaaagtaacagtttttatagatcttttagtttcaactcagcttttacaataaaaaggatttgtattgcattgagtttataaacttttggtttgtgaacttcatatttgatcttttctcttccaatcaaatgtctaggcttgtttgacttccacccccaatggtttttcactctttttatttacttcattttcctttaataacttaatctcttcatgttcagtttttacttcactctttattcttttctttgattatggtatgcttatttggaaagtcagtgaaactgtcaaaatgttatctcaataagatacttatatgagaactacaatcaccgaatctactgtattcaatattagcagatctaatttgataaacaacatggcttgtgtgaaaactgagcaggtgtttgtttacccatagtgttctgtgtagttattgcttagtctgcagaaaataatgacttagatgagatgtctgacttgctttcacttattaaacatgttcaccatgggatgatgtctgtaacatcagatattgttcaactagactaggatttaataaaaattgtgaaagcttactggcctaacattttattttataatattgggtatgaattatatgtagccagagatgtcattaagctttactgttatagtaggtaatatggttagtttgtagggaaaagagcatatgagcacatgcttgtgtattttggcctttgccccagtagaacagaccaatggcattctagacttgatgatactaagttttagcagacactagtaagtggtttgtatttaaccatactgatgaagcagacagattgaggcacagattttagtggctttgtggcaataaatagggcatggtgtgccttaggaaaagaatgtttataaagggaattataactgaaattaaaggaggcggcagtgaagaggaaataattctcttctatctaaatgatatacatatgatattttgagatttttataacagcagtggaacacaattctaggtagagtagaaaaaggaaagttttaaagacatataaaagattcttgttgacaaattatttttggtagcaaatctcaaatggttacctgctattaaggtctgccatattagagttttgcactattttgctaccaagtttgattcatacatctaaaacattttgtagttacttgtcaaggacttaatttgaaaatcatttgccaggccacatagttatcaatttttttttctatcagctattctgttgtatttctaaaacattttttagatgactttttaaagtatatttagcagtaaccttatgaggttcaaattggtaaatctcttgtaatttagccttcatcgaataataggtaccagtgtattaaaaatgtgtattttttgcagccccttgaaccagagtaggttcagagaaactcccaaagtttgtactttagacacatcatgcttgattggtaacttccctccttttttggggaacatgtttgtgtcctattaacttaattggatagatttttaaatatttcttatttttggcacacggaaagggtagttcgagtacagaactttgatttttggtgtagatgcagagggaatgatgggtaaatttcctaggtttatgtgaatttagggggtgtatgcattttgaaacaatctactaacagatggtgctgaaatctattacctacatgttttctagttgttcagcattatgttaatgaagcctccatataaggagtgtttctctggcacagttggtaagttgactgctaacttcatttaaatgtgttactggatatgcagtatactgaaattattaatcagtttgtgtataggaaaagagaactgggttaaaagcaaattaacttgttctgaaaagaaagtatagattaattttgttttctgtttaaattttatctccttggtaaagatttttttttcctgggcagaaaacttggcatttttaggcgtagataccttaccttacaatgccaaaatgaatttaattccagtactcaggtttttccctttaacagactctatgtgtatcagggctttctaatgggtttttcctcttcgtttttaaaatgtgagtagcatttgaccaatttccagtgctcttagcattttacttaaagaacaaccactacaaaagaaaatctttgtaatttgattgtcttttgctttgcttcattaatgcctaagaacttaagaatactcctacctcattagctactcaagatgctgtgacgatcaaatctattctacataatgcgtttagaaacaaagacttgggtgaaaaatgaaataagtatattctgacttggctattgaggggaaaattcagtattaagtgttcctcacaggagatatgttagcagaatactataaaagtttgaaatttttaaaaagtaaaagtacttaaatttaggtatctctcctgaaattctttgcagttcattttttatggcagttaatccagtgaaacactcaaaagtttttttttttttaaaagtgtttttccagataaactgtagggtgaacattcacataatcacaaatatgtaattctgtaattgtggaatgcttgtatgctttgttttcgtacatcttccatggagatgtctgaatataatactccatctgtgaatattttaaatgttgaaataaaagtaagaaatgtg

SEQ ID NO: 187186 - DNA, 908 bp, Homo sapiens
  Payload ID: 16854
  Gene Symbol: SUB1
  Gene Name: SUB1 homolog, transcriptional regulator
  Uniprot ID: P53999
  ENST ID: ENST00000506237
  CDS Start-End: 286-669
aaaacagtcctcttagtgcaccagaagggaccttttggcaagtggcatcttgccagaaaattaactcaaaacaaatccctaacagctcagagatggtggaggggaatttcagaaacagtcagcagggcagggccatgcaactgcttacaggaattgcctcactcacactttgatgttgattctctgcagagcttccgctgcttcaaaacggcgtgcaggagtcagagacattacatcaggaagatactgcagagatattctactccatctcattcattgtacaggatgcctaaatcaaaggaacttgtttcttcaagctcttctggcagtgattctgacagtgaggttgacaaaaagttaaagaggaaaaagcaagttgctccagaaaaacctgtaaagaaacaaaagacaggtgagacttcgagagccctgtcatcttctaaacagagcagcagcagcagagatgataacatgtttcagattgggaaaatgaggtacgttagtgttcgcgattttaaaggcaaagtgctaattgatattagagaatattggatggatcctgaaggtgaaatgaaaccaggaagaaaaggtatttctttaaatccagaacaatggagccagctgaaggaacagatttctgacattgatgatgcagtaagaaaactgtaaaattcgagccatataaataaaacctgtactgttctagttgttttaatctgtctttttacattggcttttgttttctaaatgttctccaagctattgtatgtttggattgcagaagaatttgtaagatgaatacttttttttaatgtgcattattaaaaatattgagtgaagctaattgtcaactttattaaggattactttgtctgcccaccacctagtgtaaaataaaatcaagtaat

SEQ ID NO: 187187 - DNA, 684 bp, Homo sapiens
  Payload ID: 16854
  Gene Symbol: SUB1
  Gene Name: SUB1 homolog, transcriptional regulator
  Uniprot ID: P53999
  ENST ID: ENST00000512913
  CDS Start-End: 185-568
gcagagcttccgctgcttcaaaacggcgtgcaggagtcagagacattacatcaggaagatactgcagagatattctactccatctcattcattgtacagattctaaactccctgaaggagacaaattaccagtggacaagaacacagcctctggagtccaataggcctggtgcattcattagggatgcctaaatcaaaggaacttgtttcttcaagctcttctggcagtgattctgacagtgaggttgacaaaaagttaaagaggaaaaagcaagttgctccagaaaaacctgtaaagaaacaaaagacaggtgagacttcgagagccctgtcatcttctaaacagagcagcagcagcagagatgataacatgtttcagattgggaaaatgaggtacgttagtgttcgcgattttaaaggcaaagtgctaattgatattagagaatattggatggatcctgaaggtgaaatgaaaccaggaagaaaaggtatttctttaaatccagaacaatggagccagctgaaggaacagatttctgacattgatgatgcagtaagaaaactgtaaaattcgagccatataaataaaacctgtactgttctagttgttttaatctgtctttttacattggcttttgttttctaaatgttctccaagctattgtatgtttggattgcagaaga

SEQ ID NO: 187188 - DNA, 1658 bp, Homo sapiens
  Payload ID: 16854
  Gene Symbol: SUB1
  Gene Name: SUB1 homolog, transcriptional regulator
  ENST ID: ENST00000511615
  CDS Start-End: 69-323
ttccggttctctgtcagtcgcgagcgaacgaccaagagggtgttcgactgctagagccgagcgaagcgatgcctaaatcaaaggaacttgtttcttcaagctcttctggcagtgattctgacagtgaggttgacaaaaagttaaagaggaaaaagcaagttgctccagaaaaacctgtaaagaaacaaaagacaggtgagacttcgagagccctgtcatcttctaaacagagcagcagcagcagagatgataacatgtttcaggaattattcataacctttatcacaggggtccctcctgcacaggaggtgagcggtgtgtgagtgaacattgcagcccgagctctgcctcctgtcagatcagcagcggcattagattctcataggagcgcgaaccctattgtgaactgcgcatgcaagggatctaggttgtgcgttccttattccttatgagaatctaatgcctgatggtgggataatttttatcctgaaacgatcacctttccccttccctacctgctgtggaaaaattgtcttccgtgagactggtccctggtgccaaaaagattgggaaaatgaggtacgttagtgttcgcgattttaaaggcaaagtgctaattgatattagagaatattggatggatcctgaaggtgaaatgaaaccaggaagaaaaggtatttctttaaatccagaacaatggagccagctgaaggaacagatttctgacattgatgatgcagtaagaaaactgtaaaattcgagccatataaataaaacctgtactgttctagttgttttaatctgtctttttacattggcttttgttttctaaatgttctccaagctattgtatgtttggattgcagaagaatttgtaagatgaatacttttttttaatgtgcattattaaaaatattgagtgaagctaattgtcaactttattaaggattactttgtctgcccaccacctagtgtaaaataaaatcaagtaatacaatcttaactgttgtggccttttttgatcataagagttggtactgtttaaggccaaaagtaacagtttttatagatcttttagtttcaactcagcttttacaataaaaaggatttgtattgcattgagtttataaacttttggtttgtgaacttcatatttgatcttttctcttccaatcaaatgtctaggcttgtttgacttccacccccaatggtttttcactctttttatttacttcattttcctttaataacttaatctcttcatgttcagtttttacttcactctttattcttttctttgattatggtatgcttatttggaaagtcagtgaaactgtcaaaatgttatctcaataagatacttatatgagaactacaatcaccgaatctactgtattcaatattagcagatctaatttgataaacaacatggcttgtgtgaaaactgagcaggtgtttgtttacccatagtgttctgtgtagttattgcttagtctgcagaaaataatgacttagatgagatgtctgacttgctttcacttattaaacatgttcaccatgggatgatgtctgtaacatcagatattgttcaactagactaggatttaataaaaattgtgaaagcttactggcctaacattttattttataatattggg

SEQ ID NO: 187189 - DNA, 580 bp, Homo sapiens
  Payload ID: 16854
  Gene Symbol: SUB1
  Gene Name: SUB1 homolog, transcriptional regulator
  ENST ID: ENST00000510442
  CDS Start-End: 384-580
gttcgactgctagagccgagcgaagcgtgagtgcgcgggaccccctacccctactcctcggggcccccaccctcccagccgggccgtgagctgccttcggccctccactcctctcgccggcaatggccgcgggaaatggcggctctgccttacctcccccttcccctcggcgtccccggcccccttctccgtttctgactccacgcctgacgcgctgtgggcccttccgcggtagactcctgtccccggggagccgagtcgaggcggcgggcgctgcggcccggggcggtagattgagggcggccggggagtgaggagtcgcggggagagagtcgcggcgtccccgggacaatgcggcggcggcctgcctaggctcattaaggatgcctaaatcaaaggaacttgtttcttcaagctcttctggcagtgattctgacagtgaggttgacaaaaagttaaagaggaaaaagcaagttgctccagaaaaacctgtaaagaaacaaaagacaggtgagacttcgagagccctgtcatcttctaaacagagcagcagcagcagagatgataacatgtttcaggt

SEQ ID NO: 187190 - DNA, 771 bp, Homo sapiens
  Payload ID: 16854
  Gene Symbol: SUB1
  Gene Name: SUB1 homolog, transcriptional regulator
  Uniprot ID: P53999
  ENST ID: ENST00000515355
  CDS Start-End: 190-573
gtcagtcgcgagcgaacgaccaagagggtgttcgactgctagagccgagcgaagccaaaggctgaagatttcgtttctctttttaaagttgcgttttgtataaattctacaatagtggtttcagtatcagttacttgaattacaagctgcttctccccccacccccacattggaacaggctcattaaggatgcctaaatcaaaggaacttgtttcttcaagctcttctggcagtgattctgacagtgaggttgacaaaaagttaaagaggaaaaagcaagttgctccagaaaaacctgtaaagaaacaaaagacaggtgagacttcgagagccctgtcatcttctaaacagagcagcagcagcagagatgataacatgtttcagattgggaaaatgaggtacgttagtgttcgcgattttaaaggcaaagtgctaattgatattagagaatattggatggatcctgaaggtgaaatgaaaccaggaagaaaaggtatttctttaaatccagaacaatggagccagctgaaggaacagatttctgacattgatgatgcagtaagaaaactgtaaaattcgagccatataaataaaacctgtactgttctagttgttttaatctgtctttttacattggcttttgttttctaaatgttctccaagctattgtatgtttggattgcagaagaatttgtaagatgaatacttttttttaatgtgcattattaaaaatattgagtgaagctaattgtcaactttattaaggattac

SEQ ID NO: 187191 - DNA, 562 bp, Homo sapiens
  Payload ID: 16854
  Gene Symbol: SUB1
  Gene Name: SUB1 homolog, transcriptional regulator
  Uniprot ID: P53999
  ENST ID: ENST00000502897
  CDS Start-End: 113-496
gaccaagagggtgttcgactgctagagccgagcgaagctggtttcagtatcagttacttgaattacaagctgcttctccccccacccccacattggaacaggctcattaaggatgcctaaatcaaaggaacttgtttcttcaagctcttctggcagtgattctgacagtgaggttgacaaaaagttaaagaggaaaaagcaagttgctccagaaaaacctgtaaagaaacaaaagacaggtgagacttcgagagccctgtcatcttctaaacagagcagcagcagcagagatgataacatgtttcagattgggaaaatgaggtacgttagtgttcgcgattttaaaggcaaagtgctaattgatattagagaatattggatggatcctgaaggtgaaatgaaaccaggaagaaaaggtatttctttaaatccagaacaatggagccagctgaaggaacagatttctgacattgatgatgcagtaagaaaactgtaaaattcgagccatataaataaaacctgtactgttctagttgttttaatctgtctttttacattggct

SEQ ID NO: 187192 - DNA, 665 bp, Homo sapiens
  Payload ID: 16855
  Gene Symbol: SMR3A
  Gene Name: submaxillary gland androgen regulated protein 3A
  Uniprot ID: Q99954
  ENST ID: ENST00000226460
  CDS Start-End: 97-501
acctttattttctgtctttcaactggcaagagtcattttgaccagcaggttaatcaactctaagacagatcctcacgcaaagaggcaactgaaaggatgaaatcactgacttggatcttgggcctttgggctcttgcagcgtgtttcacacctggtgagagtcaaagaggccccaggggaccatatccacctggaccactggctcctcctcctccaccatgttttccttttggaacaggatttgttccaccaccccatcctccaccctatggtccagggagatttccaccacccctttctccaccctatggtccagggagaatcccaccatcccctcctccaccctatggtccagggagaattcaatcacactctcttcctcctccttatggcccaggttatccacagccaccttcccaaccaagaccctatccacctggacctccatttttccctgtaaattctccaactgatcctgccctccctactcctgcaccctaaatacagacaactgcaacaggtgccaccacccacaaaagacaacactaccctcgtaactactgcttctactacccaaaaataagaatttcaacactacttccaagagacttttagataaaatcacttccatttttggatgagaataaagatttccaaagcactga

SEQ ID NO: 187193 - DNA, 785 bp, Homo sapiens
  Payload ID: 16856
  Gene Symbol: SMR3B
  Gene Name: submaxillary gland androgen regulated protein 3B
  Uniprot ID: P02814
  ENST ID: ENST00000304915
  CDS Start-End: 150-389
gccaacagaaatccattacaatatataagagctaagatttcttgtcccttttcacctttatttgccgtctttcaactggcaagagtcattttgaccagcagattaatcaactgtaagacagatcctcacacaaagaggcaactgaaaggatgaaatcactgacttggatcttgggcctttgggctcttgcagcgtgtttcacacctggtgagagtcaaagaggccccaggggaccatatccacctggaccgctggctcctcctcaaccttttggcccaggatttgttccaccacctcctcctccaccctatggtccagggagaatcccacctcctcctcccgcaccctatggtccagggatatttccaccaccccctcctcaaccctaaggtccaccactccatcctgatgccccaggttatccacagcctccttcccgaccaagaccctatccacctggacctccatttttccctgtaaattctccaactgatcctaccctccctactcctgcaccccaaatatgaacaactgcagcaggtgccaccaccaccacaaaagacaccactacccttgtaactactgcttctactacccaaaatatgaattccaacactgcttccaagagacatttacataaaattgcttccatttttggatgagaatgaaaaattccaaaagtgctgagctttggggagaaataatcttagaaagaaattgtagaaaaaacccatgcagacataacatttataccaatgaggcaaaaataaagaattgagcaccaa

SEQ ID NO: 187194 - DNA, 489 bp, Homo sapiens
  Payload ID: 16856
  Gene Symbol: SMR3B
  Gene Name: submaxillary gland androgen regulated protein 3B
  Uniprot ID: P02814
  ENST ID: ENST00000504825
  CDS Start-End: 192-431
aacagaaacaagttgctgtgaattactcaacaaggtcctgtgtacttagctgacatgtggtgatggggtgaaaagaatgagtatgtgtgattcttcttaatattgttatttcaccctgattcaagagtcattttgaccagcagattaatcaactgtaagacagatcctcacacaaagaggcaactgaaaggatgaaatcactgacttggatcttgggcctttgggctcttgcagcgtgtttcacacctggtgagagtcaaagaggccccaggggaccatatccacctggaccgctggctcctcctcaaccttttggcccaggatttgttccaccacctcctcctccaccctatggtccagggagaatcccacctcctcctcccgcaccctatggtccagggatatttccaccaccccctcctcaaccctaaggtccaccactccatcctgatgccccaggttatccacagcctccttcccgaccaagac

SEQ ID NO: 187195 - DNA, 783 bp, Homo sapiens
  Payload ID: 16856
  Gene Symbol: SMR3B
  Gene Name: submaxillary gland androgen regulated protein 3B
  Uniprot ID: P02814
  ENST ID: ENST00000614072
  CDS Start-End: 150-389
gccaacagaaatccattacaatatataagagctaagatttcttgtcccttttcacctttatttgccgtctttcaactggcaagagtcattttgaccagcagattaatcaactgtaagacagatcctcacacaaagaggcaactgaaaggatgaaatcactgacttggatcttgggcctttgggctcttgcagcgtgtttcacacctggtgagagtcaaagaggccccaggggaccatatccacctggaccgctggctcctcctcaaccttttggcccaggatttgttccaccacctcctcctccaccctatggtccagggagaatcccacctcctcctcccgcaccctatggtccagggatatttccaccaccccctcctcaaccctaaggtccaccactccatcctgatgccccaggttatccacagcctccttcccgaccaagaccctatccacctggacctccatttttccctgtaaattctccaactgatcctaccctccctactcctgcaccccaaatatgaacaactgcagcaggtgccaccaccaccacaaaagacaccactacccttgtaactactgcttctactacccaaaatatgaattccaacactgcttccaagagacatttacataaaattgcttccatttttggatgagaatgaaaaattccaaaagtgctgagctttggggagaaataatcttagaaagaaattgtagaaaaaacccatgcagacataacatttataccaatgaggcaaaaataaagaattgagcacc

SEQ ID NO: 187196 - DNA, 1117 bp, Homo sapiens
  Payload ID: 16857
  Gene Symbol: SDHAF1
  Gene Name: succinate dehydrogenase complex assembly factor 1
  Uniprot ID: A6NFY7
  ENST ID: ENST00000378887
  CDS Start-End: 77-424
ctttggcctttgctggctgtgtggcggctccgcggttcgcaggtcgttcgctgagcgtctctgcttagccgcggtcatgagccggcacagccggctgcagaggcaggttctgagcctgtaccgcgatctgctgcgcgccgggcgtgggaagccgggcgccgaggcgcgagtgcgggcagagttccggcagcatgcgggcctgccgcggtccgacgtgctgcgcatcgagtacctgtaccgccgcgggcggcgccagctgcagctgctacgctcgggccacgccaccgccatgggcgccttcgtacgcccgcgggccccgaccggggagcctggcggcgtgggttgccagcctgacgacggcgacagtccaaggaacccccacgacagcacgggggcaccggagacccgccccgacggacggtgacaggcgaagagccgaactcgctcgatggcgtggtggagccaggaggctcgcctgactgcatggggggactggggaacccgcctaaggtgagaggtcttaagagactagcttgacgaattggggatgtcagagactcctccttggcgacgcagggggcctagagagccccgtgatggacggcaagggaggcccgccttttccgatgcttggagacaggtcggtgctcctcccccatgagggcttggggcggcctgggacgctggcgggctggacagtgtcaagccaagagctacttgcccgaaggtacggggagccaggacgacccccggtggacagggagagcctgagacgcccttctcttgacccctgagaacatacccacttctggctcctcaaggagtctcccctctcctgtatttaactctgagaagtgcagactttttgctgagaacgttttgggaaggtgccctgatgagcggtgagaagcccggaatccccttctggaaaactttcccccattaattgtgacaagccaggaccatgaggaaggggtaggggtctatcaccctggttgatcaactgaagacccccaaaggcccctacttgatggttttgaggggcaacattgactcatttgccccttccctctcggaatgttggacaaagggaataaaattggggatatgtctactt

SEQ ID NO: 187197 - DNA, 2033 bp, Homo sapiens
  Payload ID: 16858
  Gene Symbol: SDHAF2
  Gene Name: succinate dehydrogenase complex assembly factor 2
  Uniprot ID: Q9NX18
  ENST ID: ENST00000301761
  CDS Start-End: 75-575
cgtggtcggctggccgggcggctaggagttcccggaagtgcccgcgcagccggtttccggtgcaggtggggaaaatggcggtgtctacagtgttctcgacttcgtcgctgatgcttgctctgtcaaggcacagcctattgtctcctttgctcagtgtgacatcattcagacgcttctacagaggtgacagcccaacagattcccaaaaggacatgattgaaatccctttgcctccatggcaggagagaactgatgaatccatagaaaccaaaagagcccgcctgctctatgagagcagaaagaggggaatgttggaaaactgcattcttcttagtctttttgctaaagaacatctgcagcacatgacagaaaagcagctgaacctctatgaccgcctgattaacgagcctagtaatgactgggatatttactactgggccacagaagctaaaccagccccagaaatatttgaaaatgaagtcatggccctgctgagagactttgctaaaaacaaaaacaaagagcagagactgcgtgccccagatcttgagtacctctttgaaaagccacgttgagctgtgctccacggcctggcatgggggttcagtctgtggatggtaactacttatgatggacgttagccttgcttccggcttcttagatgcccagctgccctaccccagaccactggtcctgcctcaagtgatggacataaccctctcctaggacatacatgtaaatgcacaatgtgactcattctcatacttttttgttcagctctgagcctcaaaagtgatttgtcagcagcgctggcatgcaggctttgcctggctgctatctctagaggcaagtctgccacgagagggcactgcaggcgaagcagttgtgcttgctcattgcctcagcccaagtgtactcaaagaaaagaggcagccagctgtgcgtgctgtatggaaagcctcccgccctccctgcagctccccgccctcagtggcccagggctttgttgaagtggaactccccacttccaacctggtatggctccttctgcgaagggaagctgatcccagcctcctgagctgaatccttcaaaggcacagcaggcagaatgagggccacaggcaggagtggtgtgggcacactgcttaggagtcaacatcttcatcattgggctttctttaaaacgtgcactttgtaatttgaaagagaattattaaagcatactgaaaaaaggaaatttacaatttcccagccctcacaattaattttaattttgtctattttcatataacccatagtcatgtttatagagttttacaagttcacaattacaggttttattttcatgtagcactatagaaaactttccccctcattcctacagtcttcacaattagttgactaaataataatacataagaaataatatattagaatgaattagttagaagtgtttttaaaagctctagggctgtgtgacttctgtgttgctagtggtgccctccctggaggggttttgccctcagagctgtaatctaggcagtagaatcagtcacccagactggaccaggtgcatctaaaggtgttgactagaagaaggtcggccagatttgatgagcaggtggttggtgattataggagccgcacacagggactacacacgcacatgtttccagcattgttgagctccagggttcctacagagccacctcatggttcctgcctgctcttcagtatccctggtggctcaggagggaagggaagagatctagcctttacgtaatcacagttaagcctcacagcactctagactagtggtgttacctgtattttatacataagaaagtgggctcagagagaggaagtaatttgtccaaggtcaggtagctattgagtcgaaaaagcagaatttagtatagctcagtctgcctccaaagctcttgaactttctactagaacacactgccttactgctggaaatttaatagaagtctctgtttgggaaagctgtggcaaatagatgtgacagttct

SEQ ID NO: 187198 - DNA, 555 bp, Homo sapiens
  Payload ID: 16858
  Gene Symbol: SDHAF2
  Gene Name: succinate dehydrogenase complex assembly factor 2
  ENST ID: ENST00000359614
  CDS Start-End: 23-412
gtttccggtgcaggtggggaaaatggcggtgtctacagtgttctcgacttcgtcgctgatgcttgctctgtcaaggcacagcctattgtctcctttgctcagtgtgacatcattcagacgcttctacagaggtgacagcccaacagattcccaaaaggacatgattgaaatccctttgcctccatggcaggagagaactgatgaatccatagaaaccaaaagagcccgcctgctctatgagagcagaaagaggggaatgttggaaaactgcattcttcttagtctttttgctaaagaacatctgcagcacatgacagaaaagcagctgaacctctatgaccgcctgattaacgagcctagtaatgactgggatatttactactgggccacaggctggagtgcaatggcatgatctcggctcactgcaacctctaccttccaggttcaagcgattctccagcctcagcctcctgagtacctgggattacagaagctaaaccagccccagaaatatttgaaaatgaagtcatggccctgctgagagactttgctaaa

SEQ ID NO: 187199 - DNA, 1077 bp, Homo sapiens
  Payload ID: 16858
  Gene Symbol: SDHAF2
  Gene Name: succinate dehydrogenase complex assembly factor 2
  ENST ID: ENST00000542794
  CDS Start-End: 106-303
gcaccttccggctcagctcctccgtggctgccgtggtcggctggccgggcggctaggagttcccggaagtgcccgcgcagccggtttccggtgcaggtggggaaaatggcggtgtctacagtgttctcgacttcgtcgctgggaattggtttgtttgttgctgttggctcagtgtctccatcggggaaggaggatctggggtttcctactccaccatcttcacctcttgctgaggtcaccaccttgacatcatatcttgataagttgtcaacttctctggattgggagcctttgggggattagggatcatgctgtctctgtgtgctcaggatttgacacagatgcttgctctgtcaaggcacagcctattgtctcctttgctcagtgtgacatcattcagacgcttctacagaggtgacagcccaacagattcccaaaaggacatgattgaaatccctttgcctccatggcaggagagaactgatgaatccatagaaaccaaaagagcccgcctgctctatgagagcagaaagaggggaatgttggaaaactgcattcttcttagtctttttgctaaagaacatctgcagcacatgacagaaaagcagctgaacctctatgaccgcctgattaacgagcctagtaatgactgggatatttactactgggccacagaagctaaaccagccccagaaatatttgaaaatgaagtcatggccctgctgagagactttgctaaaaacaaaaacaaagagcagagactgcgtgccccagatcttgagtacctctttgaaaagccacgttgagctgtgctccacggcctggcatgggggttcagtctgtggatggtaactacttatgatggacgttagccttgcttccggcttcttagatgcccagctgccctaccccagaccactggtcctgcctcaagtgatggacataaccctctcctaggacatacatgtaaatgcacaatgtgactcattctcatacttttttgttcagctctgagcctcaaaagtgatttgtcagcagcgctggcatgcaggctttgcctggctgctatctctagag

SEQ ID NO: 187200 - DNA, 438 bp, Homo sapiens
  Payload ID: 16858
  Gene Symbol: SDHAF2
  Gene Name: succinate dehydrogenase complex assembly factor 2
  ENST ID: ENST00000543265
  CDS Start-End: 4-270
aaaatggcggtgtctacagtgttctcgacttcgtcgctgatgcttgctctgtcaaggcacagcctattgtctcctttgctcagtgtgacatcattcagacgcttctacagaggtgacagcccaacagattcccaaaaggacatgattgaaatccctttgcctccatggcaggagagaactgatgaatccatagaaaccaaaagagcccgcctgctctatgagagcagaaagaggggaatgttggaaaactgcattcttcttagaagctaaaccagccccagaaatatttgaaaatgaagtcatggccctgctgagagactttgctaaaaacaaaaacaaagagcagagactgcgtgccccagatcttgagtacctctttgaaaagccacgttgagctgtgctccacggcctggcatgggggttcagtctgtggatggt

SEQ ID NO: 187201 - DNA, 835 bp, Homo sapiens
  Payload ID: 16858
  Gene Symbol: SDHAF2
  Gene Name: succinate dehydrogenase complex assembly factor 2
  ENST ID: ENST00000542074
  CDS Start-End: 43-129
cggaagtgcccgcgcagccggtttccggtgcaggtggggaaaatggcggtgtctacagtgttctcgacttcgtcgctgaagctaaaccagccccagaaatatttgaaaatgaagtcatggccctgctgagagactttgctaaaaacaaaaacaaagagcagagactgcgtgccccagatcttgagtacctctttgaaaagccacgttgagctgtgctccacggcctggcatgggggttcagtctgtggatggtaactacttatgatggacgttagccttgcttccggcttcttagatgcccagctgccctaccccagaccactggtcctgcctcaagtgatggacataaccctctcctaggacatacatgtaaatgcacaatgtgactcattctcatacttttttgttcagctctgagcctcaaaagtgatttgtcagcagcgctggcatgcaggctttgcctggctgctatctctagaggcaagtctgccacgagagggcactgcaggcgaagcagttgtgcttgctcattgcctcagcccaagtgtactcaaagaaaagaggcagccagctgtgcgtgctgtatggaaagcctcccgccctccctgcagctccccgccctcagtggcccagggctttgttgaagtggaactccccacttccaacctggtatggctccttctgcgaagggaagctgatcccagcctcctgagctgaatccttcaaaggcacagcaggcagaatgagggccacaggcaggagtggtgtgggcacactgcttaggagtcaacatcttcatcattgggctttctttaaaacgtgcactttgtaattt

SEQ ID NO: 187202 - DNA, 559 bp, Homo sapiens
  Payload ID: 16858
  Gene Symbol: SDHAF2
  Gene Name: succinate dehydrogenase complex assembly factor 2
  ENST ID: ENST00000537782
  CDS Start-End: 23-424
gtttccggtgcaggtggggaaaatggcggtgtctacagtgttctcgacttcgtcgctgatgcttgctctgtcaaggcacagcctattgtctcctttgctcagtgtgacatcattcagacgcttctacagaggtgacagcccaacagattcccaaaaggacatgattgaaatccctttgcctccatggcaggagagaactgatgaatccatagaaaccaaaagagcccgcctgctctatgagagcagaaagaggggaatgttggaaaactgcattcttcttagtctttttgctaaagaacatctgcagcacatgacagaaaagcagctgaacctctatgaccgcctgattaacgagcctagtaatgactgggatatttactactgggccacaggttcaagcgattctccagcctcagcctcctgagtacctgggattacagaagctaaaccagccccagaaatatttgaaaatgaagtcatggccctgctgagagactttgctaaaaacaaaaacaaagagcagagactgcgtgccccagatcttgagtacctctttgaa

SEQ ID NO: 187203 - DNA, 523 bp, Homo sapiens
  Payload ID: 16858
  Gene Symbol: SDHAF2
  Gene Name: succinate dehydrogenase complex assembly factor 2
  ENST ID: ENST00000534878
  CDS Start-End: 24-449
ggtttccggtgcaggtggggaaaatggcggtgtctacagtgttctcgacttcgtcgctgatgcttgctctgtcaaggcacagcctattgtctcctttgctcagtgtgacatcattcagacgcttctacagaggtgacagcccaacagattcccaaaaggacatgattgaaatccctttgcctccatggcaggagagaactgatgaatccatagaaaccaaaagagcccgcctgctctatgagagcagaaagaggggaatgttggaaaactgcattcttcttagtctttttgctaaagaacatctgcagcacatgacagaaaagcagctgaacctctatgaccgcctgattaacgagcctagtaatgactgggatatttactactgggccacaggtactgggtatgataagcagcataatgtgaaaataggacagtttaggctgatttgagtctagaattgtatcctagataatttttttctttcttttttttttttgagactgagtttcactctcgttgccca

SEQ ID NO: 187204 - DNA, 659 bp, Homo sapiens
  Payload ID: 16858
  Gene Symbol: SDHAF2
  Gene Name: succinate dehydrogenase complex assembly factor 2
  ENST ID: ENST00000536250
  CDS Start-End: 17-214
ggtgcaggtggggaaaatggcggtgtctacagtgttctcgacttcgtcgctgggaattggtttgtttgttgctgttggctcagtgtctccatcggggaaggaggatctggggtttcctactccaccatcttcacctcttgctgaggtcaccaccttgacatcatatcttgataagttgtcaacttctctggattgggagcctttgggggattagggatcatgctgtctctgtgtgctcaggatttgacacagatgcttgctctgtcaaggcacagcctattgtctcctttgctcagtgtgacatcattcagacgcttctacagaggtgacagcccaacagattcccaaaaggacatgattgaaatccctttgcctccatggcaggagagaactgatgaatccatagaaaccaaaagagcccgcctgctctatgagagcagaaagaggggaatgttggaaaactgcattcttcttagtctttttgctaaagaacatctgcagcacatgacagaaaagcagctgaacctctatgaccgcctgattaacgagcctagtaatgactgggatatttactactgggccacaggtactgggtatgataagcagcataatgtgaaaataggacagtttaggctgatttgagtctagaattgtatcct

SEQ ID NO: 187205 - DNA, 731 bp, Homo sapiens
  Payload ID: 16859
  Gene Symbol: SDHAF3
  Gene Name: succinate dehydrogenase complex assembly factor 3
  ENST ID: ENST00000360382
  CDS Start-End: 2-208
tatgccggggcggcacgtttctcgagtccgggcattgtacaagcgcgtcttgcagctgcaccgtgttctgcccccggacctcaaatccctgggcgaccagtacgtgaaagacgaatttaggagacataagaccgttggttctgacgaggcacagcgtttcttgcaagaatgggagggtatgtccagaaatcttgatgcatgtatctgaaaagaaaatttctgtttcatgtgaagaattccgatttggtactttcagtgtatgcaacagcgttattgcaacaggctaacgaaaacagacaaaattcaactggaaaagcatgttttggcaccttcctcccagaagaaaaacttaatgactttcgtgatgaacaaattggacagttgcaggagctgatgcaagaagccacaaaacccaataggcaatttagtatttctgagtctatgaaaccaaaattttagtctatacaacaaagcttaataagacatgcaaaaatttagaacccctactttaactgtcattggtttttgaaatatatttaagctttgaaaacacctgttattaatgaaatactcttttattttggatattatgattgcagtatatggatcaagatcactagtgacaattgaaaaaaactattggaataatagcacttgtatgaaattcagttttggaactaaacagcaaatttctagaattttgctgaaaatgttttaaaatgctattctca

SEQ ID NO: 187206 - DNA, 2060 bp, Homo sapiens
  Payload ID: 16859
  Gene Symbol: SDHAF3
  Gene Name: succinate dehydrogenase complex assembly factor 3
  Uniprot ID: Q9NRP4
  ENST ID: ENST00000432641
  CDS Start-End: 1135-1512
agcctgtgattggctgaagctcagctacttgtcacaagaatatactctcagttgcagttaatttacatactaagttaggttgcagttccctacatagcaactcagagtagggaggaaattttaggccaaatttaatttaaattatgttggagcatgaccaaagttggtcatgaccagaagctgaacacagatatggaagctaacacaatatccagtggagagagattgtggtagagtacatggggcgaaatggttgatttctgcatttttgttggtgacgccatcaggatttgctgaagaaccaaacgtgtgacaggaaaggacaacacaaggagctgccagctttggaaaccagttctactctcagtattaccttcgcaaaagatagagctttgtaaatttctagattcctcgttcttattatcctagactatttaaccagaatctccagggtcgtggtcctggaaacaatacgtttaaaactcttcccaaggatccttcagcagccaacttgactttggctaaggagtccgccagctctgggctcacttgggttgtttgcaaggaagagcccatgcccagagtataaattgggagaacagcgctgtgcaaagagcgtgggttggtgagctagtggatggcgagattaatctcactctgatccctaaagcagggtgcagtaatactctaaatgcctcaaatgggttgggaaccatggaaggaatcccggaggagcccgatcttaacgaagcttttctcaggcctttggtaggaggacagaaacgaagttgaatgaaaaagacagtggagtgggactgagaaatgacaacggcccaccacagacctctctctttcaaggcctgtgtcgtcaggacgcaggccagaagaagccacgacgaggcgcaggcgcgactccacgagggccacgcccctcctagagaaggaccgacccgttttccgcccgcagcggagcttgggtttccgggaggacctgattgtgcaagggaccaaaccggatagaggtcgcgcgccctctttcgtctgccttccggttcactaatacgcaagttcgcagaagtgcgggaacgcgccgtccctctgcgcaggcgcagtcggcggtcggcgtggggcgctatgccggggcggcacgtttctcgagtccgggcattgtacaagcgcgtcttgcagctgcaccgtgttctgcccccggacctcaaatccctgggcgaccagtacgtgaaagacgaatttaggagacataagaccgttggttctgacgaggcacagcgtttcttgcaagaatgggaggtgtatgcaacagcgttattgcaacaggctaacgaaaacagacaaaattcaactggaaaagcatgttttggcaccttcctcccagaagaaaaacttaatgactttcgtgatgaacaaattggacagttgcaggagctgatgcaagaagccacaaaacccaataggcaatttagtatttctgagtctatgaaaccaaaattttagtctatacaacaaagcttaataagacatgcaaaaatttagaacccctactttaactgtcattggtttttgaaatatatttaagctttgaaaacacctgttattaatgaaatactcttttattttggatattatgattgcagtatatggatcaagatcactagtgacaattgaaaaaaactattggaataatagcacttgtatgaaattcagttttggaactaaacagcaaatttctagaattttgctgaaaatgttttaaaatgctattctcatccagccatattagtcttctggcttttctttagcttcatcaaataagcatgttgtgataatgatagatgtacaattccaacaaggttattattttttaaatacattgtcattctgaacattttatcacttctagtttaataatacatacatgatttttcttctgaatgtctcttctccctgcatcactgttcattcacaatgaaaggttaggaagaagctttaaaattcactattttactatcaatcatttgtataataaactatacaaagtataa

SEQ ID NO: 187207 - DNA, 1196 bp, Homo sapiens
  Payload ID: 16860
  Gene Symbol: SDHAF4
  Gene Name: succinate dehydrogenase complex assembly factor 4
  Uniprot ID: Q5VUM1
  ENST ID: ENST00000370474
  CDS Start-End: 25-351
gcggaggctcggggagtcggcgccatgaccccatcgaggcttccctggttgcttagctgggtctcggccacggcgtggagagcggcaagatcaccccttctgtgtcattctctgaggaaaacaagttcttctcaaggaggaaagtctgaacttgtcaaacagtcccttaagaagccgaagttaccagaaggtcgttttgatgcaccagaggattcccatttagagaaagaaccactggaaaaatttccagatgatgttaatccagtgaccaaagaaaaaggtggacccaggggcccagaacctacccgatatggagattgggaacgaaaaggacgctgtattgatttttaagtcgcatattctttaacttcaatattgttttctgaatatgtacatctgaattaacttatttctgattattttctttctttatatcctttatgtcgtgtagtttgtataatgtgtttaaatatatatatatatgatggctttggaagaaaatatgctgctgtaaattaggaaagggagaccagcctgaccaatatggagaaatctcgcctttactaaaaatacaaaattagccaggcgtggtggcatgcacctgtaatcccaactactctggaggctgaggcaggagaatggcttaaacccaggaggtggaggttgcggtgagctgaggtcgcgccattgcactccagcctgggcaacaagagcgaaactccgtctcaaaaaaaaagataggaaagggaaaatattttttcattaacatatattaatttaatgagtatagaaatgattcttgtttttttgagacagagtctctctctctcacccaggctggagtggagtggcactatcccaactcactgcaacttccgccccgccaggttcaagcaattctcctgcctcagcctcctgagtagctgggattacagacacccaccattgcgcctggctaatttttgtatttttagtaaagacaaggtttcaccatgttagccaggctggtctcgaactcctgacctcagttgatccacctgcctcagcctcccaaagtgctgggattgcaggtgtgagccaccacgcccagcctagaaatgattcttagagctgtaggcctttacttcatcatttttcagtttaaattaatcagttgcttataaaatgcatacataaataaaataatttttaaaaaa

SEQ ID NO: 187208 - DNA, 2390 bp, Homo sapiens
  Payload ID: 16861
  Gene Symbol: SDHA
  Gene Name: succinate dehydrogenase complex, subunit A, flavoprotein (Fp)
  Uniprot ID: P31040
  ENST ID: ENST00000264932
  CDS Start-End: 116-2110
tccggcgtggtgcgcaggcgcggtatcccccctcccccgccagctcgaccccggtgtggtgcgcaggcgcagtctgcgcagggactggcgggactgcgcggcggcaacagcagacatgtcgggggtccggggcctgtcgcggctgctgagcgctcggcgcctggcgctggccaaggcgtggccaacagtgttgcaaacaggaacccgaggttttcacttcactgttgatgggaacaagagggcatctgctaaagtttcagattccatttctgctcagtatccagtagtggatcatgaatttgatgcagtggtggtaggcgctggaggggcaggcttgcgagctgcatttggcctttctgaggcagggtttaatacagcatgtgttaccaagctgtttcctaccaggtcacacactgttgcagcacagggaggaatcaatgctgctctggggaacatggaggaggacaactggaggtggcatttctacgacaccgtgaagggctccgactggctgggggaccaggatgccatccactacatgacggagcaggcccccgccgccgtggtcgagctagaaaattatggcatgccgtttagcagaactgaagatgggaagatttatcagcgtgcatttggtggacagagcctcaagtttggaaagggcgggcaggcccatcggtgctgctgtgtggctgatcggactggccactcgctattgcacaccttatatggaaggtctctgcgatatgataccagctattttgtggagtattttgccttggatctcctgatggagaatggggagtgccgtggtgtcatcgcactgtgcatagaggacgggtccatccatcgcataagagcaaagaacactgttgttgccacaggaggctacgggcgcacctacttcagctgcacgtctgcccacaccagcactggcgacggcacggccatgatcaccagggcaggccttccttgccaggacctagagtttgttcagttccaccctacaggcatatatggtgctggttgtctcattacggaaggatgtcgtggagagggaggcattctcattaacagtcaaggcgaaaggtttatggagcgatacgcccctgtcgcgaaggacctggcgtctagagatgtggtgtctcggtccatgactctggagatccgagaaggaagaggctgtggccctgagaaagatcacgtctacctgcagctgcaccacctacctccagagcagctggccacgcgcctgcctggcatttcagagacagccatgatcttcgctggcgtggacgtcacgaaggagccgatccctgtcctccccaccgtgcattataacatgggcggcattcccaccaactacaaggggcaggtcctgaggcacgtgaatggccaggatcagattgtgcccggcctgtacgcctgtggggaggccgcctgtgcctcggtacatggtgccaaccgcctcggggcaaactcgctcttggacctggttgtctttggtcgggcatgtgccctgagcatcgaagagtcatgcaggcctggagataaagtccctccaattaaaccaaacgctggggaagaatctgtcatgaatcttgacaaattgagatttgctgatggaagcataagaacatcggaactgcgactcagcatgcagaagtcaatgcaaaatcatgctgccgtgttccgtgtgggaagcgtgttgcaagaaggttgtgggaaaatcagcaagctctatggagacctaaagcacctgaagacgttcgaccggggaatggtctggaacacggacctggtggagaccctggagctgcagaacctgatgctgtgtgcgctgcagaccatctacggagcagaggcacggaaggagtcacggggcgcgcatgccagggaagactacaaggtgcggattgatgagtacgattactccaagcccatccaggggcaacagaagaagccctttgaggagcactggaggaagcacaccctgtcctatgtggacgttggcactgggaaggtcactctggaatatagacccgtgatcgacaaaactttgaacgaggctgactgtgccaccgtcccgccagccattcgctcctactgatgagacaagatgtggtgatgacagaatcagcttttgtaattatgtataatagctcatgcatgtgtccatgtcataactgtcttcatacgcttctgcactctggggaagaaggagtacattgaagggagattggcacctagtggctgggagcttgccaggaacccagtggccagggagcgtggcacttacctttgtcccttgcttcattcttgtgagatgataaaactgggcacagctcttaaataaaatataaatgaacaaactttcttttatttccaaa

SEQ ID NO: 187209 - DNA, 630 bp, Homo sapiens
  Payload ID: 16861
  Gene Symbol: SDHA
  Gene Name: succinate dehydrogenase complex, subunit A, flavoprotein (Fp)
  ENST ID: ENST00000509564
  CDS Start-End: 1-306
ggaatggtctggaacacggacctggtggagaccctggagctgcagaacctgatgctgtgtgcgctgcagaccatctacggagcagaggcacggaaggagtcacggggcgcgcatgccagggaagactacaagagtaataagaaacgtgatggtgtttctggcctcaggtgcggattgatgagtacgattactccaagcccatccaggggcaacagaagaagccctttgaggagcactggaggaagcacaccctgtcctatgtggacgttggcactgggaaggtcactctggaatatagacccgtgatcgacaaaactttgaacgaggctgactgtgccaccgtcccgccagccattcgctcctactgatgagacaagatgtggtgatgacagaatcagcttttgtaattatgtataatagctcatgcatgtgtccatgtcataactgtcttcatacgcttctgcactctggggaagaaggagtacattgaagggagattggcacctagtggctgggagcttgccaggaacccagtggccagggagcgtggcacttacctttgtcccttgcttcattcttgtgagatgataaaactgggcacagctcttaaataaaatataaatgaacaaa

SEQ ID NO: 187210 - DNA, 704 bp, Homo sapiens
  Payload ID: 16861
  Gene Symbol: SDHA
  Gene Name: succinate dehydrogenase complex, subunit A, flavoprotein (Fp)
  ENST ID: ENST00000515815
  CDS Start-End: 1-380
ccaaccgcctcggggcaaactcgctcttggacctggttgtctttggtcgggcatgtgccctgagcatcgaagagtcatgcaggcctggagataaagtccctccaattaaaccaaacgctggggaagaatctgtcatgaatcttgacaaattgagatttgctgatggaagcataagaacatcggaactgcgactcagcatgcagaagagtaataagaaacgtgatggtgtttctggcctcaggtgcggattgatgagtacgattactccaagcccatccaggggcaacagaagaagccctttgaggagcactggaggaagcacaccctgtcctatgtggacgttggcactgggaaggtcactctggaatatagacccgtgatcgacaaaactttgaacgaggctgactgtgccaccgtcccgccagccattcgctcctactgatgagacaagatgtggtgatgacagaatcagcttttgtaattatgtataatagctcatgcatgtgtccatgtcataactgtcttcatacgcttctgcactctggggaagaaggagtacattgaagggagattggcacctagtggctgggagcttgccaggaacccagtggccagggagcgtggcacttacctttgtcccttgcttcattcttgtgagatgataaaactgggcacagctcttaaataaaatataaatgaacaaa

SEQ ID NO: 187211 - DNA, 583 bp, Homo sapiens
  Payload ID: 16861
  Gene Symbol: SDHA
  Gene Name: succinate dehydrogenase complex, subunit A, flavoprotein (Fp)
  ENST ID: ENST00000509632
  CDS Start-End: 30-299
ggcgggactgcgcggcggcaacagcagacatgtcgggggtccggggcctgtcgcggctgctgagcgctcggcgcctggcgctggccaaggcgtgcactgacacagcttgcaaactgttcgaaagcagtttaatcagaggaaaaagaaaaccaagaaacttcaatagttactggttaactgcttacttcagtggccaacagtgttgcaaacaggaacccgaggttttcacttcactgttgatgggaacaagagggcatctgctaaagtttcagattccatttctgctcagtatccagtagtggatcatgaatttgatgcagtggtggtaggcgctggaggggcaggcttgcgagctgcatttggcctttctgaggcagggtttaatacagcatgtgttaccaagctgtttcctaccaggtcacacactgttgcagcacagggaggaatcaatgctgctctggggaacatggaggaggacaactggaggtggcatttctacgacaccgtgaagggctccgactggctgggggaccaggatgccatccactacatgacggagcaggcccccgccgccgtggtcgag

SEQ ID NO: 187212 - DNA, 2067 bp, Homo sapiens
  Payload ID: 16861
  Gene Symbol: SDHA
  Gene Name: succinate dehydrogenase complex, subunit A, flavoprotein (Fp)
  ENST ID: ENST00000504309
  CDS Start-End: 54-1805
gcaggcgcagtctgcgcagggactggcgggactgcgcggcggcaacagcagacatgtcgggggtccggggcctgtcgcggctgctgagcgctcggcgcctggcgctggccaaggcgtggccaacagtgttgcaaacaggaacccgaggttttcacttcactgttgatgggaacaagagggcatctgctaaagtttcagattccatttctgctcagtatccagtagtggatcatgaatttgatgcagtggtggtaggcgctggaggggcaggcttgcgagctgcatttggcctttctgaggcagggtttaatacagcatgtgttaccaagctgtttcctaccaggtcacacactgttgcagcacagggaggaatcaatgctgctctggggaacatggaggaggacaactggaggtggcatttctacgacaccgtgaagggctccgactggctgggggaccaggatgccatccactacatgacggagcaggcccccgccgccgtggtcgagctagaaaattatggcatgccgtttagcagaactgaagatgggaagatttatcagcgtgcatttggtggacagagcctcaagtttggaaagggcgggcaggcccatcggtgctgctgtgtggctgatcggactggccactcgctattgcacaccttatatggaaggtctctgcgatatgataccagctattttgtggagtattttgccttggatctcctgatggagaatggggagtgccgtggtgtcatcgcactgtgcatagaggacgggtccatccatcgcataagagcaaagaacactgttgttgccacaggaggctacgggcgcacctacttcagctgcacgtctgcccacaccagcactggcgacggcacggccatgatcaccagggcaggccttccttgccaggacctagagtttgttcagttccaccctacaggcatatatggtgctggttgtctcattacggaaggatgtcgtggagagggaggcattctcattaacagtcaaggcgaaaggtttatggagcgatacgcccctgtcgcgaaggacctggcgtctagagatgtggtgtctcggtccatgactctggagatccgagaaggaagaggctgtggccctgagaaagatcacgtctacctgcagctgcaccacctacctccagagcagctggccacgcgcctgcctggcatttcagagacagccatgatcttcgctggcgtggacgtcacgaaggagccgatccctgtcctccccaccgtgcattataacatgggcggcattcccaccaactacaaggggcaggtcctgaggcacgtgaatggccaggatcagattgtgcccggcctgtacgcctgtggggaggccgcctgtgcctcggtacatggtgccaaccgcctcggggcaaactcgctcttggacctggttgtctttggtcgggcatgtgccctgagcatcgaagagtcatgcaggcctggagataaagtccctccaattaaaccaaacgctggggaagaatctgtcatgaatcttgacaaattgagatttgctgatggaagcataagaacatcggaactgcgactcagcatgcagaaggtgcggattgatgagtacgattactccaagcccatccaggggcaacagaagaagccctttgaggagcactggaggaagcacaccctgtcctatgtggacgttggcactgggaaggtcactctggaatatagacccgtgatcgacaaaactttgaacgaggctgactgtgccaccgtcccgccagccattcgctcctactgatgagacaagatgtggtgatgacagaatcagcttttgtaattatgtataatagctcatgcatgtgtccatgtcataactgtcttcatacgcttctgcactctggggaagaaggagtacattgaagggagattggcacctagtggctgggagcttgccaggaacccagtggccagggagcgtggcacttacctttgtcccttgcttcattcttgtgagatgataaaactgggcacagctcttaaataaaatataaatgaacaaa

SEQ ID NO: 187213 - DNA, 2148 bp, Homo sapiens
  Payload ID: 16861
  Gene Symbol: SDHA
  Gene Name: succinate dehydrogenase complex, subunit A, flavoprotein (Fp)
  Uniprot ID: P31040
  ENST ID: ENST00000510361
  CDS Start-End: 39-1889
gcagggactggcgggactgcgcggcggcaacagcagacatgtcgggggtccggggcctgtcgcggctgctgagcgctcggcgcctggcgctggccaaggcgtggccaacagtgttgcaaacaggaacccgaggttttcacttcactgttgatgggaacaagagggcatctgctaaagtttcagattccatttctgctcagtatccagtagtggatcatgaatttgatgcagtggtggtaggcgctggaggggcaggcttgcgagctgcatttggcctttctgaggcagggtttaatacagcatgtgttaccaagctgtttcctaccaggtcacacactgttgcagcacagctagaaaattatggcatgccgtttagcagaactgaagatgggaagatttatcagcgtgcatttggtggacagagcctcaagtttggaaagggcgggcaggcccatcggtgctgctgtgtggctgatcggactggccactcgctattgcacaccttatatggaaggtctctgcgatatgataccagctattttgtggagtattttgccttggatctcctgatggagaatggggagtgccgtggtgtcatcgcactgtgcatagaggacgggtccatccatcgcataagagcaaagaacactgttgttgccacaggaggctacgggcgcacctacttcagctgcacgtctgcccacaccagcactggcgacggcacggccatgatcaccagggcaggccttccttgccaggacctagagtttgttcagttccaccctacaggcatatatggtgctggttgtctcattacggaaggatgtcgtggagagggaggcattctcattaacagtcaaggcgaaaggtttatggagcgatacgcccctgtcgcgaaggacctggcgtctagagatgtggtgtctcggtccatgactctggagatccgagaaggaagaggctgtggccctgagaaagatcacgtctacctgcagctgcaccacctacctccagagcagctggccacgcgcctgcctggcatttcagagacagccatgatcttcgctggcgtggacgtcacgaaggagccgatccctgtcctccccaccgtgcattataacatgggcggcattcccaccaactacaaggggcaggtcctgaggcacgtgaatggccaggatcagattgtgcccggcctgtacgcctgtggggaggccgcctgtgcctcggtacatggtgccaaccgcctcggggcaaactcgctcttggacctggttgtctttggtcgggcatgtgccctgagcatcgaagagtcatgcaggcctggagataaagtccctccaattaaaccaaacgctggggaagaatctgtcatgaatcttgacaaattgagatttgctgatggaagcataagaacatcggaactgcgactcagcatgcagaagtcaatgcaaaatcatgctgccgtgttccgtgtgggaagcgtgttgcaagaaggttgtgggaaaatcagcaagctctatggagacctaaagcacctgaagacgttcgaccggggaatggtctggaacacggacctggtggagaccctggagctgcagaacctgatgctgtgtgcgctgcagaccatctacggagcagaggcacggaaggagtcacggggcgcgcatgccagggaagactacaaggtgcggattgatgagtacgattactccaagcccatccaggggcaacagaagaagccctttgaggagcactggaggaagcacaccctgtcctatgtggacgttggcactgggaaggtcactctggaatatagacccgtgatcgacaaaactttgaacgaggctgactgtgccaccgtcccgccagccattcgctcctactgatgagacaagatgtggtgatgacagaatcagcttttgtaattatgtataatagctcatgcatgtgtccatgtcataactgtcttcatacgcttctgcactctggggaagaaggagtacattgaagggagattggcacctagtggctgggagcttgccaggaacccagtggccagggagcgtggcacttacctttgtcccttgcttcattcttgtgagatgataaaactgggcacagctcttaaataaaatataaatgaac

SEQ ID NO: 187214 - DNA, 1952 bp, Homo sapiens
  Payload ID: 16861
  Gene Symbol: SDHA
  Gene Name: succinate dehydrogenase complex, subunit A, flavoprotein (Fp)
  ENST ID: ENST00000617470
  CDS Start-End: 116-1675
tccggcgtggtgcgcaggcgcggtatcccccctcccccgccagctcgaccccggtgtggtgcgcaggcgcagtctgcgcagggactggcgggactgcgcggcggcaacagcagacatgtcgggggtccggggcctgtcgcggctgctgagcgctcggcgcctggcgctggccaaggcgtggccaacagtgttgcaaacaggaacccgaggttttcacttcactgttgatgggaacaagagggcatctgctaaagtttcagattccatttctgctcagtatccagtagtggatcatgaatttgatgcagtggtggtaggcgctggaggggcaggcttgcgagctgcatttggcctttctgaggcagggtttaatacagcatgtgttaccaagctgtttcctaccaggtcacacactgttgcagcacagggaggaatcaatgctgctctggggaacatggaggaggacaactggaggtggcatttctacgacaccgtcactggcgacggcacggccatgatcaccagggcaggccttccttgccaggacctagagtttgttcagttccaccctacaggcatatatggtgctggttgtctcattacggaaggatgtcgtggagagggaggcattctcattaacagtcaaggcgaaaggtttatggagcgatacgcccctgtcgcgaaggacctggcgtctagagatgtggtgtctcggtccatgactctggagatccgagaaggaagaggctgtggccctgagaaagatcacgtctacctgcagctgcaccacctacctccagagcagctggccacgcgcctgcctggcatttcagagacagccatgatcttcgctggcgtggacgtcacgaaggagccgatccctgtcctccccaccgtgcattataacatgggcggcattcccaccaactacaaggggcaggtcctgaggcacgtgaatggccaggatcagattgtgcccggcctgtacgcctgtggggaggccgcctgtgcctcggtacatggtgccaaccgcctcggggcaaactcgctcttggacctggttgtctttggtcgggcatgtgccctgagcatcgaagagtcatgcaggcctggagataaagtccctccaattaaaccaaacgctggggaagaatctgtcatgaatcttgacaaattgagatttgctgatggaagcataagaacatcggaactgcgactcagcatgcagaagtcaatgcaaaatcatgctgccgtgttccgtgtgggaagcgtgttgcaagaaggttgtgggaaaatcagcaagctctatggagacctaaagcacctgaagacgttcgaccggggaatggtctggaacacggacctggtggagaccctggagctgcagaacctgatgctgtgtgcgctgcagaccatctacggagcagaggcacggaaggagtcacggggcgcgcatgccagggaagactacaaggtgcggattgatgagtacgattactccaagcccatccaggggcaacagaagaagccctttgaggagcactggaggaagcacaccctgtcctatgtggacgttggcactgggaaggtcactctggaatatagacccgtgatcgacaaaactttgaacgaggctgactgtgccaccgtcccgccagccattcgctcctactgatgagacaagatgtggtgatgacagaatcagcttttgtaattatgtataatagctcatgcatgtgtccatgtcataactgtcttcatacgcttctgcactctggggaagaaggagtacattgaagggagattggcacctagtggctgggagcttgccaggaacccagtggccagggagcgtggcacttacctttgtcccttgcttcattcttgtgagatgataaaactgggcacagctcttaaataaaatataaatgaacaaactttcttttatttcc

SEQ ID NO: 187215 - DNA, 1153 bp, Homo sapiens
  Payload ID: 16862
  Gene Symbol: SDHB
  Gene Name: succinate dehydrogenase complex, subunit B, iron sulfur (Ip)
  Uniprot ID: P21912
  ENST ID: ENST00000375499
  CDS Start-End: 152-994
acccgggaaaccggaagccgcctcccacttggttgctcgtacgcggctagtgggtcctcagtggatgtaggctgggcgccgcgatgttcgacgggacaccggcggagagcgacctcggggttaaggggtggggctgacgtcaggagccaagatggcggcggtggtcgccctctccttgaggcgccggttgccggccacaacccttggcggagcctgcctgcaggcctcccgaggagcccagacagctgcagccacagctccccgtatcaagaaatttgccatctatcgatgggacccagacaaggctggagacaaacctcatatgcagacttatgaagttgaccttaataaatgtggccccatggtattggatgctttaatcaagattaagaatgaagttgactctactttgaccttccgaagatcatgcagagaaggcatctgtggctcttgtgcaatgaacatcaatggaggcaacactctagcttgcacccgaaggattgacaccaacctcaataaggtctcaaaaatctaccctcttccacacatgtatgtgataaaggatcttgttcccgatttgagcaacttctatgcacagtacaaatccattgagccttatttgaagaagaaggatgaatctcaggaaggcaagcagcagtatctgcagtccatagaagagcgtgagaaactggacgggctctacgagtgcattctctgtgcctgctgtagcaccagctgccccagctactggtggaacggagacaaatatctggggcctgcagttcttatgcaggcctatcgctggatgattgactccagagatgacttcacagaggagcgcctggccaagctgcaggacccattctctctataccgctgccacaccatcatgaactgcacaaggacctgtcctaagggtctgaatccagggaaagctattgcagagatcaagaaaatgatggcaacctataaggagaagaaagcttcagtttaactgtttccatgctaaacatgatttataaccagctcagagctgaacataatttatatctaatttgagttcctttaaagatcttggttttccatgaatacagcatgtataataaaaattttaagaaataaatgttattctactttattaacaaaaaaaaaa

SEQ ID NO: 187216 - DNA, 649 bp, Homo sapiens
  Payload ID: 16862
  Gene Symbol: SDHB
  Gene Name: succinate dehydrogenase complex, subunit B, iron sulfur (Ip)
  ENST ID: ENST00000491274
  CDS Start-End: 50-649
agagctccctgtactttcccaacagtatcgctctttatattcatcgtgaatgtttaatttaactcttgttcactacaaagcctcccgaggagcccagacagctgcagccacagctccccgtatcaagaaatttgccatctatcgatgggacccagacaaggctggagacaaacctcatatgcagacttatgaagttgaccttaataaatgtggccccatggtattggatgctttaatcaagattaagaatgaagttgactctactttgaccttccgaagatcatgcagagaaggcatctgtggctcttgtgcaatgaacatcaatggaggcaacactctagcttgcacccgaaggattgacaccaacctcaataaggtctcaaaaatctaccctcttccacacatgtatgtgataaaggatcttgttcccgatttgagcaacttctatgcacagtacaaatccattgagccttatttgaagaagaaggatgaatctcaggaaggcaagcagcagtatctgcagtccatagaagagcgtgagaaactggacgggctctacgagtgcattctctgtgcctgctgtagcaccagctgccccagctactggtggaacggagacaaatatctggggcctgcagttcttatgcag

SEQ ID NO: 187217 - DNA, 702 bp, Homo sapiens
  Payload ID: 16862
  Gene Symbol: SDHB
  Gene Name: succinate dehydrogenase complex, subunit B, iron sulfur (Ip)
  ENST ID: ENST00000463045
  CDS Start-End: 334-702
ataggtcatttttgtaattccaggcaaggtctttgcagggcctcctgagggcaacagaaaatagaagagccccaaggcctccccttccttgtgggaatgtacatgtatacccacaaaagccacctcaaaagaattcagtaatgagcttggtgtgttacctgtgggtaacattcaggttcaggttctgaattctttttatgcttatagtctgaccactgaaccacaattctgcctgcctcccgaggagcccagacagctgcagccacagctccccgtatcaagaaatttgccatctatcgatgggacccagacaaggctggagacaaacctcatatgcagacttatgaagttgaccttaataaatgtggccccatggtattggatgctttaatcaagattaagaatgaagttgactctactttgaccttccgaagatcatgcagagaaggcatctgtggctcttgtgcaatgaacatcaatggaggcaacactctagcttgcacccgaaggattgacaccaacctcaataaggtctcaaaaatctaccctcttccacacatgtatgtgataaaggatcttgttcccgatttgagcaacttctatgcacagtacaaatccattgagccttatttgaagaagaaggatgaatctcaggaaggcaagcagcagtatctgcagtccatagaagagcgtgagaaactg

SEQ ID NO: 187218 - DNA, 1127 bp, Homo sapiens
  Payload ID: 16863
  Gene Symbol: SDHC
  Gene Name: succinate dehydrogenase complex, subunit C, integral membrane protein, 15kDa
  Uniprot ID: Q99643
  ENST ID: ENST00000342751
  CDS Start-End: 26-478
acttccgtccagaccggaacccaagatggctgcgctgttgctgagacacgttggtcgtcattgcctccgagcccactttagccctcagctctgtatcagaaatgctgttcctttgggaaccacggccaaagaagagatggagcggttctggaataagaatataggttcaaaccgtcctctgtctccccacattactatctacagttggtctcttcccatggcgatgtccatctgccaccgtggcactggtattgctttgagtgcagatgtgggacctaggaaaaggcctgaagattccccagctataccagtctggagtggttgtcctggttcttactgtgttgtcctctatggggctggcagccatgtgaagaaaggaggctcccagcatcatcttcctacacattattacattcacccatctttctgtttgtcattcttatctccagcctgggaaaagttctccttatttgtttagatccttttgtattttcagatctccttggagcagtagagtacctggtagaccataatagtggaaaagggtctagttttccccttgtttctaaagatgaggtggctgcaaaaactccccttttttgcccacagcttgcctactctcggcctagaagcagttattctctctccatattgggctttgatttgtgctgagggtcagcttttggctccttcttcctgagacagtggaaacaatgccagctctgtggcttctgccctggggatgggccgggttggggggtgggttggtgaggctttgggtgccactgcctgtgggttgctggcttaaaggacaattctcttcattggtgagagcccaggccattaacacctacacagtgttattgaaagaagagaggtgggggtggaggggaattagtctgtcccagctagagggagataaagagggctagttagttcttggagcagctgcttttgaggagaaaatatatagctttggacacgaggaagatctagaaaattatcattgaacatattaatggttatttctttttcttggatttccagaaaagcctcttaattttatgctttctcatcgaagtaatgtaccctttttttctgaaactgaattaaatactcattttatc

SEQ ID NO: 187219 - DNA, 13566 bp, Homo sapiens
  Payload ID: 16863
  Gene Symbol: SDHC
  Gene Name: succinate dehydrogenase complex, subunit C, integral membrane protein, 15kDa
  Uniprot ID: Q99643
  ENST ID: ENST00000367975
  CDS Start-End: 150-659
agctaggcagagctgagcggagaagctccagagccttttaaagagactctcgtcacatgacacccccaaccccgacccccagccggcgcgcctccgccctcgggtggcggggccgcctggcgtcacttccgtccagaccggaacccaagatggctgcgctgttgctgagacacgttggtcgtcattgcctccgagcccactttagccctcagctctgtatcagaaatgctgttcctttgggaaccacggccaaagaagagatggagcggttctggaataagaatataggttcaaaccgtcctctgtctccccacattactatctacagttggtctcttcccatggcgatgtccatctgccaccgtggcactggtattgctttgagtgcaggggtctctctttttggcatgtcggccctgttactccctgggaactttgagtcttatttggaacttgtgaagtccctgtgtctggggccagcactgatccacacagctaagtttgcacttgtcttccctctcatgtatcatacctggaatgggatccgacacttgatgtgggacctaggaaaaggcctgaagattccccagctataccagtctggagtggttgtcctggttcttactgtgttgtcctctatggggctggcagccatgtgaagaaaggaggctcccagcatcatcttcctacacattattacattcacccatctttctgtttgtcattcttatctccagcctgggaaaagttctccttatttgtttagatccttttgtattttcagatctccttggagcagtagagtacctggtagaccataatagtggaaaagggtctagttttccccttgtttctaaagatgaggtggctgcaaaaactccccttttttgcccacagcttgcctactctcggcctagaagcagttattctctctccatattgggctttgatttgtgctgagggtcagcttttggctccttcttcctgagacagtggaaacaatgccagctctgtggcttctgccctggggatgggccgggttggggggtgggttggtgaggctttgggtgccactgcctgtgggttgctggcttaaaggacaattctcttcattggtgagagcccaggccattaacacctacacagtgttattgaaagaagagaggtgggggtggaggggaattagtctgtcccagctagagggagataaagagggctagttagttcttggagcagctgcttttgaggagaaaatatatagctttggacacgaggaagatctagaaaattatcattgaacatattaatggttatttctttttcttggatttccagaaaagcctcttaattttatgctttctcatcgaagtaatgtaccctttttttctgaaactgaattaaatactcattttatctttgactctccttgaaatctagagaaaccaagaaaatggctgttgggaaggaaccaatttcctcctcttccctcgggtctcaggcatttacatcctccctctccccgcaatctgacctttaccaggagggaaacagttctcctacatctcatcattggaaaagttttcagggaatcagatagaacttagccagagatttaaatatcacagaaaagcctcagagaaggaaggagaaaaagaaaagaagtgacgcatgtagagtgcttttgggttataggcaccaaaatcccattaaggactgattataagcttcatggtacagttcagcaaattatgattcattgaggggcacagaggaccagtgttggtgacagctaggggatgatgacctgaggttataggcttggggtgaatgaagcatagagtttttttttaaaaaagaagggattgttgaaaacctggcaaaaatgtataatttaatgagaaaacttgctgcttttaaaatccatataggccaggctttagcaggcatgctgttttgatagtttttgggaactctggaataagagacttatctcatctgtcacttcgagttgttggccagccagttaaagctgtgggtcgaagaggggaaatgttaactggctggtgtcaattggataggaagaccttagttaaggtggggacccgctgttttaacagtcttcattcagggtcccaaatagtatttggctttaagtaatgattggttttccctttttactagaggggccctgggaagtccttgtacctttcctccattttaaaccagctgttctctactttgtccttggaatgagggacaagtgatcatgacagaacactttgtcattgggactgggaaaggtttggcaagggcattaaatttaacagccagtgccaggaaaatataaaatggggtcaatgataaacagctgttagaggctggaaaatgggtagggcagttgaattttttggtggtttcgtaccatttgggtgattgaagcatggtagtgggtgggtggggggtgtgacagagcatcatgtttgttattctgccttaaatttctacttactgtctttttcttctctgtcttccaatcactttaatatcttcaattttcaaactatatttgtacttgggcttagatagaaagtcttacacaagcatagtatcttctactttggttttccctaccttttcttccccaccttctccaaacacacatatacatactctactcaattctatttctgattttgtagttgttagttgtccatgctcaggataaaaaatgagtgggtagggttgagggactggttctttgaggttctgccctttttccatgattcagaccaactttctcttggtcatttctggagtataactgactcaattcttgtaaaaatgtgttccacccaaaccactgtatgttcttttccctactttattttctcctaccttccttctcctaattgtgttacaagaggcagccatagcaagaatggaaaatccagatcagtaaaagattcaacaaaaaaaagtttattttccaaatttgcttttactcccaccccaaaatttccctgtttcacagttctgactgggggctcttgtttatttcactgagtcgctatacgggtttttcagtgtgtggccacttggtccatatgaagttccaggtttgtatttctggacctcagctagattaggccctgcccagagttctagcatacgtggacttccaggtgggctcttaggatttggctggtctttggggacctggagtatgacctgcagaggggtgtgagctttggagttcatctggggaattgaggttggcagctggggagcttggaattatggttggacttcgtgcttgttgtacagtctttgtgatagacttctttctgagtttcttctgactgtctggatcatggggctgtcagtgataagagtgggagagatagtcatgtctctggtcaggcccggatcattcctaatgcacctcaggattctaactccctttctccccataccatgggcagtagatcaagtttcaaataagaaaagttaaatttgatttctctaaccaccctcccccaccttgagattagatcattttctactgttgggggtatgatgtccttagcccatcccttcaggcctcagaaggtgattaaggactagtcaagataagacaaattggttagaggtcccccatgctgggatagtggtggcataacaatagacattttttgaggttgaaaagaaattgagactacagggttttgggttagatgggaagaatagataccttgcctaagatttcaggacacagcccattggaggccttgagtaaatcaggatttttctgtatccatttggtgagggaggcagcaccagcagttgtacgggaggtcagggtcacccgagcagggggtatcttcagaggcatttgccaggtgcccatgaaggaaccccaaggatttgcctaaaaatgaaaagggattcctcagtagggcttctcactcccagtaactgacttagacctctgtattatttcctttctttacctttaggaatgcatggttatgaaacaagactgaaagcataatcttcccacccttccttatccccctccctcatttaggctttgcaggcctaattttttcatcccctttactctgccaacttaaattccacatccttaggccgagtgtggcaaaggagtacccactgcacaaatgtcatcacctgaaggctttcatttatacagatcattgatcaatttaagaacttctgaagggtgctaaacacaactctatcctgctgggtaagctggccggaagttcaggggctctcacattacaacatgaattagattaaactttaattttcccgataatggctgtgagagactgcacatctcccagttctgtgccttaattatttgactttcttgataggagtgaagatagtatctcaccttggaacggggcacagaaggcagtagatgaccacgatcgttggcaataatttgagtgtagccttcatgagaagagatgctctggggtacaagtgggagagataaaggtttgtgaggggaaaaagggaagtatttggggagcttggtcagagaaggatatgggagtttagagaatgctaaaaggagttaattgacagggagagcatgaggctatcttgtaggtgcactgaacatggaatacctcttttgttggcttagtgggagaccagttctgcagatacttggatgagaaagccttttcatactgtggagagaaagataagtagccctatgagacttcaaggccccaaacccaggaaatgaagactaggcacaattctttagatttgaagaccaaaggcctgaccaaccatgtaggctttaagtcactatgacaagggtgtaatttgtttggtctagatgtgtgctgtccagcatggagccgggagccacatggagctgttgagcacctgaaatatgactagttcaaattgaggtgctttgtaaatatgaaatatgctgaatttttaagtttttttcttttctttttttttttgagataggatcttggtctgccacctgggttggagtcagtggcatgatcctagctcactgcagccttggacacctgggttcaagcgatcctcctccctcagactcacaggtagctgggactacaggtgcatgccaccatgtccagctaatttttaaatttacttgtagagacgaggtctcaccatattgcccagggtggtctcaaacccctggcctcaagcgatccttgtgcctcagcctcccaaagtgttgggattacagacgtgagctacaacacccagcaggttttggagatttagtacaaaaaaagaacgtaaaatgtctgattataattttttaaatactgattaaatgttgaaataatatttggatttattgggttaaattcaatatatttaaattttatgttttaattttttcatgtagctactagaaaatttaaaattacatttgtgggtcgcactctttttgttgggcagcactggtctagatcaggagttggtaaactatggcctatgggccatatccatattgctgcctgtttggggatggcctgagagtaagggtgatttttatagatgaacatttacaattgattcagtcaaatggaacactaactttgaatcccagttaagtgaaatgttttctcaacccccaaaattccattattttcattagtagtacaaaaaattgtactcagttatattttgaatttgtcaaaaatgttatggaaaaatgtttttctttaattatgcaagtagctacagaatatttttgactttgccacttggcctgcaaagcctaaaatttttacactccgcccttttacagaaaaaaaattgccaacttctggtttacaccctacaaatttaaccaagagatacctttggatcgcccctgggctctctctatccctgaggaggtaaaatattatctcactccactctcagctatctgttcaaagatcagaatcctatgagaggggacagtccaaagatagaatctgaaaaacaaaagtaaacgttaaagaaatggagaatgggaacttacctggttggcactgtagttagtggccatgatcttgtgctgtttacactcgttgcttggcaactgcagaaggccgacctcctgggactaccaatgagcagaggctgcctttctcttctgcttattattattcacttccttggctcacactgcccccatttgttttctctggaacttagattcatttttattttacagacgggaaagactgagtaaatgtgagaaaattagctgaatagccactactttttttctggcataacctacccctgcttaagaacttccacgggcctttgattggggtttttaaccactttaacaaaccatgtaaccctgagagctatgcttgttggacaacatggtgtaatgtaccacaggctgtagagccagatactggggtttgaatccttattcaacatgggaacataggagctatatgacattaaacaactgtcttgtcttcactaaatttctatcaactcatttgtattgtggggataatagagcctgcttttacagggtaagtgagataaaatgaataaagtgtctagacaatatcatagcatagtaggtattcaatcctggtgagatcctgtttataaggcccactactttgtcttatcaggcagaataacaaaggaacaatatttaaaaagcaactagctcaaatctgtccccagaaggaaaaacatatcttgtccttggtccttaaaaaatttcctctgtcactgtctagaatcagcacctaagaacacaggcgtttagtgttgactggaataaaatggaatcgggtgctggtgcagggagattgagcagggatgaagagagaaaatcacagagtggaaaggatcaggtttggagagttcaatggggggctgccaggacataagcctaatatgtgtgggacaaggaaacccctctgaaactcataaaatggtattgtaatacccatctatgaggtggttaggagaattaataagtaagtagaactgtgctttgtgaattgtaaagtgaatttatatataaggtgtcaagatgaaagggaaaaactaagaaataagttgcccaaagatatcattaggaccaggagaccattataaagtatatccaggccgggcacggtggctcatgcctgtaatcccagcactttgggtggccgaagcagacggatcacaaggtcaggagttcgagaccagcctggccaacatggagaaaccctgtctctactaaaaatacaaaaaattagccaggcatggtggtgcatgcctctaatcccagctactcgggaggctgaggcaggagaattgcttgaacccgggaggcggaggttgcaatgagcagagatcatgctactactgcacttcagcctgggcgacagcgtgagactccgtctcaaaaaataaaaaataaataaagtatatccatcagtcccttctcttttccttcttcccccaaaatcctcatcttaaccaacacaccaagtataagagcactcctatgcttctgcagatggagggaagaacagctcttgttttataggctctggagttaatacctggataatgtgagatctggaaagataactcatgagcttagtccctgtggttcttatcactctctagagaagagttctttaaggaccaaggactatctttgctctaggatatccattttggccctttaatctgcaatgataggctagcattatttctcttagaatttgtcttcagttggtatgcctccctctgcctttctgataggaatgtaatgataaatgatgactgcactcatttttaaaagttaaccagtttttgttcaattgaaaaagtaatgtacatggaaaaaatttcatgtttacaggatgttcagtgaaaagcaaatctccatttgatttcaactctcagtcttgctcctcagggcaactgctgttactcatttcttgtgtctccttccagaaatcttctctgcatacaaacactaatgagagagctgtccacattgctttttgatttgctttttgactatcttggggattatgtttttatcataatattccattttgggatgcaccatagtttgttcagacccatatggatgaccatttagtttatttatagtcttttgctaataaggacattgctgtaatgaaaaatccctatgtatctttatgaatatgtatgtatgtatttttatgtacatatgtgatctgtaggataaatgttttaaagtacattgcaaagtcaaaagggtttgtgcatttaaaataagtagataggccgggtgcggtggctcacatctgtaatcccagcactttgggaggctgaggcgggcgatcacgaggtcaggagatcgagaccatcctggctaacatggtgaaaccccatctctactaaaaatacaaaacattagctgggcgtgtggcgggggcctgtagtcccagctactcaggaggctgaggcaggagaatggcgtgaacccaggaggcggagcttgcagtgagccacgatcgcgccactgcagtccagcctgggagacagagcgagactccgtctcaaaaataaataaataaataaaataaaataagtagataatgtcaaattaccactgaaagacattgtgccagtttgtacttctaccagtggtgtatgatggcgtatgagtgcctagttctctgctttcttttcaacatcatcgttttttctttttttttcagtttaaaccaattttaattgaactaatagaattgaactaatagaactaattgattgaactagtagaactaatgttaactgagcagttactatatacatgccaggcacagttctaattgctttactacattttctcatttagttctcaacccaaccaaggaaactggagaatacacagtgaggagtagagccaggatttaatcccaagtattctgactctagagccagcagttttaaccattatatcatattgcttgttaagctgtaggttaaacatggtatataattttattttttgtttttgttttgagacggtctccctgccgcctaagctctggagtgcagtggttccatcaatatcctgaggtcaagcaatcctcccaccttagcctcccaagtagttgggagtataggcatgagctaccatgcccagctaatttaaaaaaacaaattttttttaagagatagggtcttaactatattgttcctcttgtcttgaattcatggcctcaagtgattcttcgacctctggaagtgttgagattacaggcacgagccaccacacccacccaacatggtatatcattgttttaaatttgcatttctttaattagggtgtttttatatgtgtataaactgtttttattttaatttttttccctgaaaatggcctttaatgtattttgccacttactattgggctgttgacttttttttttgaaaccagtcctccctctgtcacccaggctggagtgcagtggcatcatcttggttcactgtaacttctgcctctcaggtccaaacaatcctcccacctcagcctcccgaataactggaactacagggatgcaccaccacacccagctgattttttaattttttttgtagagatgggattttgccatgttgcccaggctggttttgaactcctgggctcaagccatctgcccacctcagcttcccaaaaagctgggattacaggcttgagccactgcacccagcctgttgatcatgttcattaatctgtttgaactccatatattaaggaaattagtcctttgtcaaatatgttgcaaatattccctccaatttgtcacttactttcattttgttggtggtttttctgttttgttgttgtttttctgtgggtttttttttttttttttgccatggacatgtttttagtacttatgtagtagtcagatgtattactcattttttctgtgctctggatcttatgctttgaatggctttttgtgaattccaatattttaaaaataatttacccctagcttcagttcttacatttaaatatttgttccttctggaattttagtgaatgtggacaaggttatgcttcagttgccttaactagttgccttggcatcattaataagttttcttttcctctactgatttgaaatgccatttttaatgtattccctaacatatttgggtctgtttctggatcctctaacccactgttctagagagaaaggtgatcgttttagattatttgtctctctgtaatctaaaatccaaggtacacgctgggcacagtggctcacacgtgtaatcctagcactttcggaggctgaggcaggtggaacagttgaggacagaagttcgagaccagcctgaccaacatggcgaaactctgtttctactaaaaatacaaaaattagctgggcatggtgacacgtgcctgtagtcccagctactcgggaggctgaggcaagagaatcgcttgaacccgggaggtggaggttgcagtgagccgagattgcgccactgcactccatcccccgggcgacagagtgagactccatctcaaaaaaaagaaaaaaaaaggccaggcgcggtgactcacgcctgtaatcccagtactttgagaggctgagacgggaggatcacgagatcaagagatggagaccatcctggccaacatggtgaaaccccgtctctactaaaaatacaaaaattagctgggcgtagtggcgcgcgcctgtagtcccagctactccagaggctgaggcagaagaatcgcttgaacccgggaggcggaggttgcagtgagccgagattgcgccactgtgctccagcctggcgacagagtgagactccgtctaaaaaaaaaaaaaaaaaaatccaaggtggagtcctggcttgatcctatgtgaattctaatatttaagatttcaggccgggcgcggtggctcaggcctgtaatcccagcactttgggaggcccaggggggtggatcacaaggtcaggaaatcgagagcatgctggctaacacggtgaaactccgtctctgctaaaaatacaaaaaattagcccggcgtggtggggggtgcctgtagtcccagctactcgggaggctgaggcaggagaatggcgtgaacccgggaggtggagctggcagtgagccgagatcgcgccactgcactccagcctgggcgacagagcgagactccgtctcaacaaaaaaaagatttcactaggaaattgtaatatcagtagtaacaggcaattttaagcttctaataaaagtgtattgaattttagcctttcttcagatgaactggttgacttcaggtacagcagatggtcttttactaggaccagatttacttcttccaaagttggaagggctctttaaaggccccatcctttacgtatgccttaagatacttttttccattcacttaaattctttgatgactgaaactaaaccattaggaaatcttttatttggactgagattatctgctattgaagtacaagtttaacctgtactctataggcgatgtgtacattggacctacgtgaaggcaaccaccagcataagtactagagtcacattgcctggattaaattctggctttgcctaaatgtgtggccttacacaagttaatctttctgggtctcagtacccttacatgtaaaatggggataatcttagttttgagcattaaatatatgtaacatgctaatagggtgcaagatgcataatgaatgctcaattattttagcattattattggcttaagactgccaagtaagaagtactcattcaggttaccttaaacaaaaaaggggaagtggggaaattataattaataggagtatttaacagattccaaaggtaggaagtatagtttgggcttcaaaggatactagaatttcaaagatagaacatgatcagaaagattttctgtttcttctttatcatctctgtttctcactgcctttattcttttcttttctttttttttttttttttgagatggagtttcgctcttgttgcccaggctggagtgcaatgtgcgatctcggctcaccgcaacctccgcctcccgggttcaagcgagcgattctcctgcctcagcctcccgagtagctgagattttaggcatgcaccaccacacccggctaattttgtatttttagtagagacagggtttctccatgttggtcaggctggtctcgaatgcctgacctcagttgatccgcccacctcagcctcccaaagtgctgggattacaggcgtgagccaccgcgcccggcctcccatggcaatttttaaaaccagaaaaaattattagtaaccccttcatagtaaaaatggggcatttatctcatctattacacagtgtaaccacctgaatcactgtctctagttataccatcagctctctactaaggtttcttctaagtagctccaaggtgccctccatgtcacctcactgggtcaggtgttgatgggtcttggataggagacctggcttttgccccatttcctgggctaacaggatttcatccaaccaagctactggccaaattttgaactattcaaacaccctggtttttgtagatttccttataggaaatgaaggcgtagttctgacccctgaagagatgcatggctacaaatgtaaaagctatagtttcaaaacttctctatagagttaaaatagctgatccagttttctttcctgagactaaggctccctctctcggagactgctgttacatctctcctttccactgacaataccacaaaagaataatattcttgataagatccccttcctgaggagccaaagaacaagctttgtatactccccacacactgcctatggggtagccctctctgcagcattcatagagctatttaacactatttctttttcttttctttcattcctttttttttttttttttttttgagacagaatcttgctctgttgcccaggctggagtgcagtggcaccatctcagctcactgcaacctccgcctcccaggttcaagtgatcctcctgcttcagcccccctccatagctgggattataggcacacaccagcatgccctgctaattttagtatttttagtagagacagggtttcgccatgttggccaggctggtctggaactcctgacgtcaggtgatccacctgccttggcctcccaaagtcgttggattacaggcgtgagccactgtgcctggcctataacactatttcttaaaacaaaacaaaaagaccaaagaacaagctttaaacaaccaaaatgactgaaaagacatcagtatctctcactagtggtgtgaattaagtttgtttacttgcataactaagaataaatgatggttataatggcaccagtataggatatcttggctatgtgctttaacaatatacaggttgaccatgaagtctggaaatagatactattattttatcatgtatttaaatatattaataaaccattaatatgtattcattaa

SEQ ID NO: 187220 - DNA, 369 bp, Homo sapiens
  Payload ID: 16863
  Gene Symbol: SDHC
  Gene Name: succinate dehydrogenase complex, subunit C, integral membrane protein, 15kDa
  Uniprot ID: Q99643
  ENST ID: ENST00000392169
  CDS Start-End: 19-369
tccagaccggaacccaagatggctgcgctgttgctgagttggtctcttcccatggcgatgtccatctgccaccgtggcactggtattgctttgagtgcaggggtctctctttttggcatgtcggccctgttactccctgggaactttgagtcttatttggaacttgtgaagtccctgtgtctggggccagcactgatccacacagctaagtttgcacttgtcttccctctcatgtatcatacctggaatgggatccgacacttgatgtgggacctaggaaaaggcctgaagattccccagctataccagtctggagtggttgtcctggttcttactgtgttgtcctctatggggctggcagccatgtga

SEQ ID NO: 187221 - DNA, 460 bp, Homo sapiens
  Payload ID: 16863
  Gene Symbol: SDHC
  Gene Name: succinate dehydrogenase complex, subunit C, integral membrane protein, 15kDa
  Uniprot ID: Q99643
  ENST ID: ENST00000432287
  CDS Start-End: 25-432
cttccgtccagaccggaacccaagatggctgcgctgttgctgagacacgttggtcgtcattgcctccgagcccactttagccctcagctctgtatcagaaattggtctcttcccatggcgatgtccatctgccaccgtggcactggtattgctttgagtgcaggggtctctctttttggcatgtcggccctgttactccctgggaactttgagtcttatttggaacttgtgaagtccctgtgtctggggccagcactgatccacacagctaagtttgcacttgtcttccctctcatgtatcatacctggaatgggatccgacacttgatgtgggacctaggaaaaggcctgaagattccccagctataccagtctggagtggttgtcctggttcttactgtgttgtcctctatggggctggcagccatgtgaagaaaggaggctcccagcatcatcttcc

SEQ ID NO: 187222 - DNA, 369 bp, Homo sapiens
  Payload ID: 16863
  Gene Symbol: SDHC
  Gene Name: succinate dehydrogenase complex, subunit C, integral membrane protein, 15kDa
  Uniprot ID: Q99643
  ENST ID: ENST00000513009
  CDS Start-End: 19-369
tccagaccggaacccaagatggctgcgctgttgctgagacacgttggtcgtcattgcctccgagcccactttagccctcagctctgtatcagaaattggtctcttcccatggcgatgtccatctgccaccgtggcactggtattgctttgagtgcagatgtgggacctaggaaaaggcctgaagattccccagctataccagtctggagtggttgtcctggttcttactgtgttgtcctctatggggctggcagccatgtgaagaaaggaggctcccagcatcatcttcctacacattattacattcacccatctttctgtttgtcattcttatctccagcctgggaaaagttctccttatttgtttag

SEQ ID NO: 187223 - DNA, 571 bp, Homo sapiens
  Payload ID: 16863
  Gene Symbol: SDHC
  Gene Name: succinate dehydrogenase complex, subunit C, integral membrane protein, 15kDa
  ENST ID: ENST00000504963
  CDS Start-End: 16-219
agaccggaacccaagatggctgcgctgttgctgagacacgttggtcgtcattgcctccgagcccactttagccctcagctctgtatcagaaatgctgttcctttgggaaccacggccaaagaagagatggagcggttctggaataagaatataggttcaaaccgtcctctgtctccccacattactatctacagccctatcagtgatgcagtctggtaaagttggtctcttcccatggcgatgtccatctgccaccgtggcactggtattgctttgagtgcaggggtctctctttttggcatgtcggccctgttactccctgggaactttgagtcttatttggaacttgtgaagtccctgtgtctggggccagcactgatccacacagctaagtttgcacttgtcttccctctcatgtatcatacctggaatgggatccgacacttgatgtgggacctaggaaaaggcctgaagattccccagctataccagtctggagtggttgtcctggttcttactgtgttgtcctctatggggctggcagccatgtgaagaaaggaggctcccagca

SEQ ID NO: 187224 - DNA, 832 bp, Homo sapiens
  Payload ID: 16863
  Gene Symbol: SDHC
  Gene Name: succinate dehydrogenase complex, subunit C, integral membrane protein, 15kDa
  ENST ID: ENST00000470743
  CDS Start-End: 1-97
acacgttggtcgtcattgcctccgagcccactttagccctcagctctgtatcagaaaagtctcgttctgtcgaccaggctggagtgtagtggcgtgatctgggctcactgcaacctccacgtcctgagttcaagtgattatcctgcctcagcctcctaagtagccggaattacagtgctgttcctttgggaaccacggccaaagaagagatggagcggttctggaataagaatataggttcaaaccgtcctctgtctccccacattactatctacagttggtctcttcccatggcgatgtccatctgccaccgtggcactggtattgctttgagtgcaggggtctctctttttggcatgtcggccctgttactccctgggaactttgagtcttatttggaacttgtgaagtccctgtgtctggggccagcactgatccacacagctaagtttgcacttgtcttccctctcatgtatcatacctggaatgggatccgacacttgatgtgggacctaggaaaaggcctgaagattccccagctataccagtctggagtggttgtcctggttcttactgtgttgtcctctatggggctggcagccatgtgaagaaaggaggctcccagcatcatcttcctacacattattacattcacccatctttctgtttgtcattcttatctccagcctgggaaaagttctccttatttgtttagatccttttgtattttcagatctccttggagcagtagagtacctggtagaccataatagtggaaaagggtctagttttccccttgtttctaaagatgaggtggctgcaaaaactcccc

SEQ ID NO: 187225 - DNA, 1439 bp, Homo sapiens
  Payload ID: 16864
  Gene Symbol: SDHD
  Gene Name: succinate dehydrogenase complex, subunit D, integral membrane protein
  Uniprot ID: O14521
  ENST ID: ENST00000375549
  CDS Start-End: 136-615
gacgggtgtgcaccgcctctcgacttccggttcacccagcatttcctcttccctgttttctttcgtcgtcgtgggtgggaattgtcgcctaagtggttccgggttggtggatgaccttgagccctcaggaacgagatggcggttctctggaggctgagtgccgtttgcggtgccctaggaggccgagctctgttgcttcgaactccagtggtcagacctgctcatatctcagcatttcttcaggaccgacctatcccagaatggtgtggagtgcagcacatacacttgtcaccgagccaccattctggctccaaggctgcatctctccactggactagcgagagggttgtcagtgttttgctcctgggtctgcttccggctgcttatttgaatccttgctctgcgatggactattccctggctgcagccctcactcttcatggtcactggggccttggacaagttgttactgactatgttcatggggatgccttgcagaaagctgccaaggcagggcttttggcactttcagctttaacctttgctgggctttgctatttcaactatcacgatgtgggcatctgcaaagctgttgccatgctgtggaagctctgacctttttgacttcatactttgaagaattgatgtatgcctctttgcctctgctttgtcatgccattaagctcacaataaggaagaaataacagataagtccattggtggacagccttcttctcttaatcacaagattattttcagaatttaatctttgaggaaaaggtttgagaggaattatatctaagttgtgagactgagttctatattctggtgagttaatggggttgcctcccagcttcttataagactcacagtataactaaacatgatatatcagcttttgcctttcaatttatcaatctcttaaagagaatccaactttattacgattagtatatgatcaaacttccatatttgccttgggaataatggacaaagggaaatactcttaattcatgaataaaaactttgcagaaaattagacagtgtttaattttcgaaaacttccctctctagacagtagataccacctactgatggttacatatactagggaaattttaaaattaggaaatgctgatagctcatattataaatttctaaatcctaggaagaaacgcttggagtgcttctgaatatacagaagttccatttaagggcaagtttccctgtagatgtatcaaaatactaccaactgtaaattgagatttaattcccaaatgtattctacttgttctaaaacaatctgtccacaaatataaaactataagtaataaattgttattttcgcacaatgggaatctctaatgtgaaaatgtattctatgaaaataatttttttaaataaaatgttatataataaaagtgtcttctatgctttta

SEQ ID NO: 187226 - DNA, 861 bp, Homo sapiens
  Payload ID: 16864
  Gene Symbol: SDHD
  Gene Name: succinate dehydrogenase complex, subunit D, integral membrane protein
  Uniprot ID: O14521
  ENST ID: ENST00000526592
  CDS Start-End: 10-441
aggaacgagatggcggttctctggaggctgagtgccgtttgcggtgccctaggaggccgagctctgttgcttcgaactccagtggtcagacctgctcatatctcagcatttcttcaggaccgacctatcccagaatggtgtggagtgcagcacatacacttgtcaccgagccaccattctggctccaaggctgcatctctccactggactagcgagagggttgtcagtgttttgctcctgggtctgcttccggctgcttatttgaatccttgctctgcgatggactattccctggctgcagccctcactcttcatggtcactggctggagtgcaatggtgcgatcttggctcggcacgatctcggctcagcacgatctcagcttactgcaacctccgcctttcgggttcaagcgattctcctgcctcagcctcccaagtagctggcattacaggggccttggacaagttgttactgactatgttcatggggatgccttgcagaaagctgccaaggcagggcttttggcactttcagctttaacctttgctgggctttgctatttcaactatcacgatgtgggcatctgcaaagctgttgccatgctgtggaagctctgacctttttgacttcatactttgaagaattgatgtatgcctctttgcctctgctttgtcatgccattaagctcacaataaggaagaaataacagataagtccattggtggacagccttcttctcttaatcacaagattattttcagaatttaatctttgaggaaaaggtttgagaggaattatatctaagttgtgagactgagttctatattctggtgagttaatggggttgcctcccagcttc

SEQ ID NO: 187227 - DNA, 1071 bp, Homo sapiens
  Payload ID: 16864
  Gene Symbol: SDHD
  Gene Name: succinate dehydrogenase complex, subunit D, integral membrane protein
  ENST ID: ENST00000528021
  CDS Start-End: 36-350
gggttggtggatgaccttgagccctcaggaacgagatggcggttctctggaggctgagtgccgtttgcggtgccctaggaggccgagctctgttgcttcgaactccagtggtcagacctgctcatatctcagcatttcttcaggaccgacctatcccagaatggtgtggagtgcagcacatacacttgtcaccgagccaccattctggctccaaggctgcatctctccactggactagcgagagggttgtcagtgttttgctcctgggtctgcttccggctgcttatttgaatccttgctctgcgatggactattccctggctgcagccctcactcttcatggtcactgagatgggctttcaccatgctgtgtcggccattacccaactcctgggcttaagtgatccacctgcctcagcctcccaaagtgctgggattacaagcctgagccaccgcgcccagctgttaatcgtgacttaatacatgtgcatcttcccctgtttcctgtgtttgctttcataagtccactgctcctgctgtgaagatgggtacattcatctgtcatagcttaatgacaccaccttaaaatttgcagatgggttcatatacatcttattattcactcactcatatattaaaaaatatttaagtatctactatgtaccaggcactgtgctgggtcctggggatacagagatgaaaaagataccaggaggctgggcgtggtggctcacgcctgtaatcccagtactttgggaggccaaggtgagtggatcacttgaggtcaggagttcgcgaccagcctggccaacaggctgatggtgaaactccatctctactaaaaatacaaaaactagccgggcgtagtggtgcatgcctgtagtcccagctacttgggaggctgaggcaggagaatcgcttgaacctgggggagtggaggttgcagtgagccaagatcgtgcttgggcgacagagcaagactctgtctcaaaaaaaaaaaaaaaaaaaaagacaccagaagctcacagacttgatggacaggcacataagccaataaaatgtgttcaaagc

SEQ ID NO: 187228 - DNA, 717 bp, Homo sapiens
  Payload ID: 16864
  Gene Symbol: SDHD
  Gene Name: succinate dehydrogenase complex, subunit D, integral membrane protein
  ENST ID: ENST00000530923
  CDS Start-End: 1-305
tctggaggctgagtgccgtttgcggtgccctaggaggccgagctctgttgcttcgaactccagtggtcagacctgctcatatctcagcatttcttcaggaccgacctatcccagaatggtgtggagtgcagcacatacacttgtcaccgagccaccattctggctccaaggctgcatctctccactggactagcgagagggttgtcagtgttttgctcctgggtctgcttccggctgcttatttgaatccttgctctgcgatggactattccctggctgcagccctcactcttcatggtcactgacctttccaaataaaagattccagttgcatatgaaatattagatcacaagtacagggccttggacaagttgttactgactatgttcatggggatgccttgcagaaagctgccaaggcagggcttttggcactttcagctttaacctttgctgggctttgctatttcaactatcacgatgtgggcatctgcaaagctgttgccatgctgtggaagctctgacctttttgacttcatactttgaagaattgatgtatgcctctttgcctctgctttgtcatgccattaagctcacaataaggaagaaataacagataagtccattggtggacagccttcttctcttaatcacaagattattttcagaatttaatctttgaggaaaaggtttgagaggaattatatctaagttgtg

SEQ ID NO: 187229 - DNA, 460 bp, Homo sapiens
  Payload ID: 16864
  Gene Symbol: SDHD
  Gene Name: succinate dehydrogenase complex, subunit D, integral membrane protein
  ENST ID: ENST00000534010
  CDS Start-End: 1-167
ctggctccaaggctgcatctctccactggactagcgagagggttgtcagtgttttgctcctgggtctgcttccggctgcttatttgaatccttgctctgcgatggactattccctggctgcagccctcactcttcatggtcactggaagatcaaaaataatgagtaatgtgtcatctaagagagaacactggaatccaacagagaacttacagaaaacaccagtagcaaggaaggagaaggaagcgaggaagtctgctcagctggggtcatctgggaacctatagaggctcccttaatgcggagaaaggagatgggctttcaccatgctgtgtcggccattacccaactcctgggcttaagtgatccacctgcctcagcctcccaaagtgctgggattacaagcctgagccaccgcgcccagctgttaatcgtgacttaatacatgtgcatcttcccctg

SEQ ID NO: 187230 - DNA, 754 bp, Homo sapiens
  Payload ID: 16864
  Gene Symbol: SDHD
  Gene Name: succinate dehydrogenase complex, subunit D, integral membrane protein
  ENST ID: ENST00000528182
  CDS Start-End: 37-432
cgggttggtggatgaccttgagccctcaggaacgagatggcggttctctggaggctgagtgccgtttgcggtgccctaggaggccgagctctgttgcttcgaactccagtggtcagacctgctcatatctcagcatttcttcaggaccgacctatcccagaatggtgtggagtgcagcacatacacttgtcaccgagccaccattctggctccaaggctgcatctctccactggactagcgagagggttgtcagtgttttgctcctgggtctgcttccggctgcttatttgaatccttgctctgcgatggactattccctggctgcagccctcactcttcatggggccttggacaagttgttactgactatgttcatggggatgccttgcagaaagctgccaaggcagggcttttggcactttcagctttaacctttgctgggctttgctatttcaactatcacgatgtgggcatctgcaaagctgttgccatgctgtggaagctctgacctttttgacttcatactttgaagaattgatgtatgcctctttgcctctgctttgtcatgccattaagctcacaataaggaagaaataacagataagtccattggtggacagccttcttctcttaatcacaagattattttcagaatttaatctttgaggaaaaggtttgagaggaattatatctaagttgtgagactgagttctatattctggtgagttaatggggttgcctcccagcttctta

SEQ ID NO: 187231 - DNA, 905 bp, Homo sapiens
  Payload ID: 16864
  Gene Symbol: SDHD
  Gene Name: succinate dehydrogenase complex, subunit D, integral membrane protein
  Uniprot ID: O14521
  ENST ID: ENST00000528048
  CDS Start-End: 36-293
gggttggtggatgaccttgagccctcaggaacgagatggcggttctctggaggctgagtgccgtttgcggtgccctaggaggccgagctctgttgcttcgaactccagtggtcagacctgctcatatctcagcatttcttcaggaccgacctatcccagaatggtgtggagtgcagcacatacacttgtcaccgagccaccattgggccttggacaagttgttactgactatgttcatggggatgccttgcagaaagctgccaaggcagggcttttggcactttcagctttaacctttgctgggctttgctatttcaactatcacgatgtgggcatctgcaaagctgttgccatgctgtggaagctctgacctttttgacttcatactttgaagaattgatgtatgcctctttgcctctgctttgtcatgccattaagctcacaataaggaagaaataacagataagtccattggtggacagccttcttctcttaatcacaagattattttcagaatttaatctttgaggaaaaggtttgagaggaattatatctaagttgtgagactgagttctatattctggtgagttaatggggttgcctcccagcttcttataagactcacagtataactaaacatgatatatcagcttttgcctttcaatttatcaatctcttaaagagaatccaactttattacgattagtatatgatcaaacttccatatttgccttgggaataatggacaaagggaaatactcttaattcatgaataaaaactttgcagaaaattagacagtgtttaattttcgaaaacttccctctctagacagtagataccacctactgatggttacatatactagggaaattttaaaattaggaaatgctgatagctcatatta

SEQ ID NO: 187232 - DNA, 790 bp, Homo sapiens
  Payload ID: 16864
  Gene Symbol: SDHD
  Gene Name: succinate dehydrogenase complex, subunit D, integral membrane protein
  Uniprot ID: O14521
  ENST ID: ENST00000525291
  CDS Start-End: 10-372
aggaacgagatggcggttctctggaggctgagtgccgtttgcggtgccctaggaggccgagctggctccaaggctgcatctctccactggactagcgagagggttgtcagtgttttgctcctgggtctgcttccggctgcttatttgaatccttgctctgcgatggactattccctggctgcagccctcactcttcatggtcactggggccttggacaagttgttactgactatgttcatggggatgccttgcagaaagctgccaaggcagggcttttggcactttcagctttaacctttgctgggctttgctatttcaactatcacgatgtgggcatctgcaaagctgttgccatgctgtggaagctctgacctttttgacttcatactttgaagaattgatgtatgcctctttgcctctgctttgtcatgccattaagctcacaataaggaagaaataacagataagtccattggtggacagccttcttctcttaatcacaagattattttcagaatttaatctttgaggaaaaggtttgagaggaattatatctaagttgtgagactgagttctatattctggtgagttaatggggttgcctcccagcttcttataagactcacagtataactaaacatgatatatcagcttttgcctttcaatttatcaatctcttaaagagaatccaactttattacgattagtatatgatcaaacttccatatttgccttgggaataatggacaaagggaaatactcttaattcatgaataaaaactttgcaga

SEQ ID NO: 187233 - DNA, 516 bp, Homo sapiens
  Payload ID: 16864
  Gene Symbol: SDHD
  Gene Name: succinate dehydrogenase complex, subunit D, integral membrane protein
  Uniprot ID: O14521
  ENST ID: ENST00000614349
  CDS Start-End: 85-516
cctgttttctttcgtcgtcgtgggtgggaattgtcgcctaagtggttccgggttggtggatgaccttgagccctcaggaacgagatggcggttctctggaggctgagtgccgtttgcggtgccctaggaggccgagctctgttgcttcgaactccagtggtcagacctgctcatatctcagcatttcttcaggaccgacctatcccagaatggtgtggagtgcagcacatacacttgtcaccgagccaccattctggctccaaggctgcatctctccactggactagcgagagggttgtcagtgttttgctcctgggtctgcttccggctgcttatttgaatccttgctctgcgatggactattccctggctgcagccctcactcttcatggtcactggctggagtgcaatggtgcgatcttggctcggcacgatctcggctcagcacgatctcagcttactgcaacctccgcctttcgggttcaagcgattctcctgcctcagcctcccaagtag

SEQ ID NO: 187234 - DNA, 4181 bp, Homo sapiens
  Payload ID: 16865
  Gene Symbol: SUCNR1
  Gene Name: succinate receptor 1
  Uniprot ID: Q9BXA5
  ENST ID: ENST00000362032
  CDS Start-End: 106-1110
gtcagaagctatatccagctgctggcagagttcctgtcaagggatcaagtcttccaacagaatggttatggtttaactcagcagaatttgttgaacaactacgacatgctggggatcatggcatggaatgcaacttgcaaaaactggctggcagcagaggctgccctggaaaagtactacctttccattttttatgggattgagttcgttgtgggagtccttggaaataccattgttgtttacggctacatcttctctctgaagaactggaacagcagtaatatttatctctttaacctctctgtctctgacttagcttttctgtgcaccctccccatgctgataaggagttatgccaatggaaactggatatatggagacgtgctctgcataagcaaccgatatgtgcttcatgccaacctctataccagcattctctttctcacttttatcagcatagatcgatacttgataattaagtatcctttccgagaacaccttctgcaaaagaaagagtttgctattttaatctccttggccatttgggttttagtaaccttagagttactacccatacttccccttataaatcctgttataactgacaatggcaccacctgtaatgattttgcaagttctggagaccccaactacaacctcatttacagcatgtgtctaacactgttggggttccttattcctctttttgtgatgtgtttcttttattacaagattgctctcttcctaaagcagaggaataggcaggttgctactgctctgccccttgaaaagcctctcaacttggtcatcatggcagtggtaatcttctctgtgctttttacaccctatcacgtcatgcggaatgtgaggatcgcttcacgcctggggagttggaagcagtatcagtgcactcaggtcgtcatcaactccttttacattgtgacacggcctttggcctttctgaacagtgtcatcaaccctgtcttctattttcttttgggagatcacttcagggacatgctgatgaatcaactgagacacaacttcaaatcccttacatcctttagcagatgggctcatgaactcctactttcattcagagaaaagtgaggggcttgtgaaacagattgttctacagatgaatctgtaagccagttacagtttgccttaactcatagacatcaatcagagagtgtcacagatttaaccttgatctaaagacaagttgtacccagagtatgtgaaaagaatgggacgacaagaatgtactggtttcttcctctaagaattgaaaggagttgaactgccttatgtttgggcatgtaactccaaaatactaggtagtataaggctttctcaatcagtgcaaaaatggaagatatataaagcaacaagttgtctgcatttgatcactggtcagattgtaaaaaaaaaaaaaattgttttggcaacattctctatgttattcttattcacatgatcctagaactttatgtgagaactgaatagcagaagatatattattaaatagtttttggaagttgtgctgttaagcaaatgtaaagtcaacagtaacaatgattaagaaaggaatataatgagttcaaagatatctatctgatatattttttatattcatcatgaatcggggtagtcttgtaatttatctaacctttttgttgtatgggtttatagtggaaagaatcttaatttaaataaaaagaacctgaagagataattcaacaaaagtagagaatatgtttgagcttgtcagagaatttaagtatcaaaatactagagagatacaccaaggatatttgaataaaaaaaaaatttgtagaacacaaaatgcctatcaggaaacccaaagcaaaacagaacaaaaagtgaatacatcgttttaaatgatgattttgccatctggtattttattatcataatttgaccaccagtgcatgaaaatatattaaagttcattagccttctgctcttgatttaatagtgaactttaaaatatattaatatcataaaccagcaaataaggagaaataaactgataatactagattcattgggatagttttcccttttggagggaaagtcacaatttttctccatgatcccccattttttgtaaacactggaataatttacaaggataactttattgtagcgagagcaaatcacatctggagtgagccttgttttcatgcaacattaccataagaccattggagtaaatgtttcaaacaaaatgtacttcatgaaattatagaacataaaaatatttatgtgcatattaacctgtattatcccaggagggttaatgaggccccatttcctgcacaaaacaaatgtaggggaaaaaatgggtgctgcattagctttttaaagtcaaacaactatcacataataattccttgatatgcaacataaagtacctatggccacatatctaagttcctttccttgatgtcattagctataaggagtgagtaatgtgaaggacaaaataagcattatgaatacagagacataaaattccactgtcccttccttttctgaaatactctgggaggtattctgatatttttaaatcccccaattttcccagttgatatctctagacttcaagcaactgaaatattataaaaatgcattagtcacaaaagatttattttcttacatcacaccaggctttaagatattttctgccatgccttgcctttagtatcaatattttaaaaatttcactgtaattttataactgcctaataacaaactgaaaacagaacttctgagtttccttatcagaaagggccacagaaaaggccttaagaaagaaagattcacttacttctgcaaacttggcaatccgtaatttaactttaatttgtattttatgcatgaattttacttgtaaagacaaaattaaatttgcttcccctacatcccaactccaagaagtcacaggaatagactctttctaatagtgcagtgaaatattttttcaaaccataaactcacatatatatatatatatatatatatatatatatatatatatgtaccttgtaaacaagaggttaagaaattttatagcacattttaaaattattttcttcctcaaatctatcatgtggtaacttaatctttaacagactttagggccctaaactaaaattataagagctatttcatttgcttgttgtactgggtaattgtaagaatcacaaacaataaatcatgaaaatcctttctgggtttgtggtttctaaaggaaataatattgagcttttgtattttgtcttttaattggctccctggtatcttcagaatgatgtctagattcttcagtctggacccacctactcttctcacattatctcccatcactgttgtcacaaaccataccctatagctaaagattgctactttagtttattacattcagaactttcttcactttgttcacctgttgcccatctttgttctatcatacctgaatggtataataattctaaacaactttcaaggttcatctcatctgtcattctttgttgaagcttgcccttatatcctctcttccccaaacctaaaagtaaaactttctaccactggggcttcagatacttttaatactacttatttgaatttcattatttttattatagtttattattgtcttcatagctgagtactcttaaaattactgtttattataagtgaatgtcttacagaacaaactcaaagtcaatgcttcttttgcatgtgaataatcaagctatttttttgtcatcattactttagtaagtaacattattttatatgaagaatagagtgtatatacataaacccatgtgccagctgccattgcactgcctcacattttcctttagatgtttgagcatagttttaatgactgtttgaaatctctgtctcctagttccaaatatgggtcatcttggagttggtcttcattggtgccttttctcttcagtatgagtcataattttcctgtttctctatatgcctagtaaattagaattttattctagatgatgaataatgtgtggcagagattctggattctgttacattccatcaaagagtattgatattttgtatatacatttacaaatgtacatgtacacaataataaaaataatttttttctcaga

SEQ ID NO: 187235 - DNA, 2192 bp, Homo sapiens
  Payload ID: 16866
  Gene Symbol: SUCLA2
  Gene Name: succinate-CoA ligase, ADP-forming, beta subunit
  Uniprot ID: Q9P2R7
  ENST ID: ENST00000378654
  CDS Start-End: 86-1477
gagcgctgcagagaggctgcgccttgggccgcctgtcgcctgtgcgcctgcgcgcggcgccgaggggacggggtccgactcagaaatggcggcctccatgttctacggcaggctagtggccgtggccacccttcggaaccaccggcctcggacggcccagcgggctgctgctcaggttctgggaagttctggattgtttaataaccatggactccaagtacagcagcaacagcaaaggaatctctcactacatgaatacatgagtatggaattattgcaagaagctggtgtctccgttcccaaaggatatgtggcaaagtcaccagatgaagcttatgcaattgccaaaaaattaggttcaaaagatgtcgtgataaaggcacaggttttagctggtggtagaggaaaaggaacatttgaaagtggcctcaaaggaggagtgaagatagttttctctccagaagaagcaaaagctgtttcttcacaaatgattgggaaaaaattgtttaccaagcaaacgggagaaaagggcagaatatgcaatcaagtattggtctgtgagcgaaaatatcccaggagagaatactactttgcaataacaatggaaaggtcatttcaaggtcctgtattaataggaagttcacatggtggtgtcaacattgaagatgttgctgctgagtctcctgaagcaataattaaagaacctattgatattgaagaaggcatcaaaaaggaacaagctctccagcttgcacagaagatgggatttccacctaatattgtggaatcagcagcagaaaacatggtcaagctttacagcctttttctgaaatacgatgcaaccatgatagaaataaatccaatggtggaagattcagatggagctgtattgtgtatggatgcaaagatcaattttgactctaattcagcctatcgccaaaagaaaatctttgatctacaggactggacccaggaagatgaaagggacaaagatgctgctaaggcaaatctcaactacattggcctcgatggaaatataggctgcctagtaaatggtgctggtttggctatggccacaatggatataataaaacttcatggagggactccagccaacttccttgatgttggtggtggtgctacagtccatcaagtaacagaagcatttaagcttatcacttcagataaaaaggtactggctattctggtcaacatttttggaggaatcatgcgctgtgatgttattgcacagggtatagtcatggcagtaaaagacttggaaattaaaatacctgttgtggtacggttacaaggtacacgagtcgatgatgctaaggcactgatagcggacagtggacttaaaatacttgcttgtgatgacttggatgaagctgctagaatggttgtaaagctctctgaaatagtgaccttagcgaagcaagcacatgtggatgtgaaatttcagttgccaatatgatctgaaaacccagtggatggctgaaggtgttaaatgtgctataatcattaagaatactgtgttctgtgttattgttctttttctttttagtgtgtggagattgtaattgccatctaggcacacaaacatttaaaaggatttggactgcatttaattgtaccattcagaatggactgtttgtacgaagcatgtataatgcagttatcttctttcttttgtcgcagccagtcttttttgcttctcctacaaaacgtaacttgcaatttgccagtttattattgttggatacaaagttcttcattgataagagtcctataaataagataaatacgaagataaagctttattctttagtgttaaaatacagtatatctaataactagcctcattagtagagcagtatattaaaacaatgttttatgtaaaaagtgtttatcttcagcaccaaatacatgataaatgtatcaatcactatttataaacagagctttcaaacactcctcagaatattcttctaagtattttgatgaagtaactttgtaattatttgaacattgttttaatcattaggaaacactgattaactgcaagtcttcatgattctgtcatattaagaaacacctgtaggtttgcttcaaataaaggcatatataccaaggacttacagacaaaattaagaatgtcaatttaagttaataaaaatctcccaatatga

SEQ ID NO: 187236 - DNA, 894 bp, Homo sapiens
  Payload ID: 16866
  Gene Symbol: SUCLA2
  Gene Name: succinate-CoA ligase, ADP-forming, beta subunit
  ENST ID: ENST00000434484
  CDS Start-End: 1-894
agtggccgtggccacccttcggaaccaccggcctcggacggcccagcgggctgctgctcaggttcaaaagatgtcgtgataaaggcacaggttttagctggtggtagaggaaaaggaacatttgaaagtggcctcaaaggaggagtgaagatagttttctctccagaagaagcaaaagctgtttcttcacaaatgattgggaaaaaattgtttaccaagcaaacgggagaaaagggcagaatatgcaatcaagtattggtctgtgagcgaaaatatcccaggagagaatactactttgcaataacaatggaaaggtcatttcaaggtcctgtattaataggaagttcacatggtggtgtcaacattgaagatgttgctgctgagtctcctgaagcaataattaaagaacctattgatattgaagaaggcatcaaaaaggaacaagctctccagcttgcacagaagatgggatttccacctaatattgtggaatcagcagcagaaaacatggtcaagctttacagcctttttctgaaatacgatgcaaccatgatagaaataaatccaatggtggaagattcagatggagctgtattgtgtatggatgcaaagatcaattttgactctaattcagcctatcgccaaaagaaaatctttgatctacaggactggacccaggaagatgaaagggacaaagatgctgctaaggcaaatctcaactacattggcctcgatggaaatataggctgcctagtaaatggtgctggtttggctatggccacaatggatataataaaacttcatggagggactccagccaacttccttgatgttggtggtggtgctacagtccatcaagtaacagaagcatttaagcttatcacttcagataaa

SEQ ID NO: 187237 - DNA, 467 bp, Homo sapiens
  Payload ID: 16866
  Gene Symbol: SUCLA2
  Gene Name: succinate-CoA ligase, ADP-forming, beta subunit
  ENST ID: ENST00000433022
  CDS Start-End: 5-467
agaaatggcggcctccatgttctacggcaggctagtggccgtggccacccttcggaaccaccggcctcggacggcccagcgggctgctgctcagggtcctgtattaataggaagttcacatggtggtgtcaacattgaagatgttgctgctgagtctcctgaagcaataattaaagaacctattgatattgaagaaggcatcaaaaaggaacaagctctccagcttgcacagaagatgggatttccacctaatattgtggaatcagcagcagaaaacatggtcaagctttacagcctttttctgaaatacgatgcaaccatgatagaaataaatccaatggtggaagattcagatggagctgtattgtgtatggatgcaaagatcaattttgactctaattcagcctatcgccaaaagaaaatctttgatctacaggactggacccaggaagatgaaagggacaaag

SEQ ID NO: 187238 - DNA, 1445 bp, Homo sapiens
  Payload ID: 16866
  Gene Symbol: SUCLA2
  Gene Name: succinate-CoA ligase, ADP-forming, beta subunit
  ENST ID: ENST00000470760
  CDS Start-End: 5-580
agaaatggcggcctccatgttctacggcaggctagtggccgtggccacccttcggaaccaccggcctcggacggcccagcgggctgctgctcaggttctgggaagttctggattgtttaataaccatggactccaagtacagcagcaacagcaaaggaatctctcactacatgaatacatgagtatggaattattgcaagaagctggtgtctccgttcccaaaggatatgtggcaaagtcaccagatgaagcttatgcaattgccaaaaaattaggttcaaaagatgtcgtgataaaggcacaggttttagctggtggtagaggaaaaggaacatttgaaagtggcctcaaaggaggagtgaagatagttttctctccagaagaagcaaaagctgtttcttcacaaatgattgggaaaaaattgtttaccaagcaaacgggagaaaagggcagaatatgcaatcaagtattggtctgtgagcgaaaatatcccaggagagaatactactttgcaataacaatggaaaggtcatttcaagtgagtaattgtagacatgatacatacgggataaatttatgacattcaatttcaaaagtccattattgtttctatttatgtgggaaagattttaaaagtacaaattataatctgtttgtatgtcatgagcatgatatttatgtcatttaaaaaacagcttctttaatgccgtaaaatttgatatataatatcatgatcttaaaattataggaaaaattctgctgtaataaatttcatgggattctcaaattgttaattcactaaaagcagcttaaatcatctctggatcatctccagattgagaaaattatatctagcatagtaaaatattctaatgaaagagaaagttgctgaacccactagaagaatgtgtatccattgcctcatcttctgttttctcaacttcttgggtttgtttttttttttttaatagtttcgggtttgtttcactatatgattcaatatttggtaaattgagggatgacattaagtagcaaacaatatggttttaaggagtattacattagcacagctctcctctctttatggaacctaaaatgttgaacataaagcttctggtgaagagaaaatccctttatagacctggtgtttggaagagagcattgataatcattttatactagaattatctgtttttcgagggtattaggttttacaagctgaatctgtgtgttaactagcttgttttttgaagcaactgggtatatatttgaaagccccagtacggatttcatgtagaacattaattgtgtagaatttagagtaacaaaaattttaagagtcatgaaaataattttcttatgtagaacaacttttttaaaaataacaactttctgtattgtgatttttcttatttacaattaaatctattaatgtttgaatgata

SEQ ID NO: 187239 - DNA, 552 bp, Homo sapiens
  Payload ID: 16866
  Gene Symbol: SUCLA2
  Gene Name: succinate-CoA ligase, ADP-forming, beta subunit
  ENST ID: ENST00000493152
  CDS Start-End: 1-243
tgtgatgttattgcacagggtatagtcatggcagtaaaagacttggaaattaaaatacctgttgtggtacggttacaaggtacacgagtcgatgatgctaaggcactgatagcggacagtggacttaaaatacttgcttgtgatgacttggatgaagctgctagaatggttgtaaagctctctgaaatagtgaccttagcgaagcaagcacatgtggatgtgaaatttcagttgccaatatgatctgaaaacccagtggatggctgaaggagttgattgaccaccagttgagagcctgcagttcatcagttgagagtgacaattccagagtgaccagctgagcatgtaatatgaaggaaactggagaaaagcctcaactactttatgattattcctatgatttgttcttaaagcagagaagcatctttttatttgtttttgatatccttgtttgatgaaaccagcatcgttttagaaaaaatatctttgttttagtaaaaatgacacatactcattgaaaaaataaaccccttcaaaactggaatgatacaa

SEQ ID NO: 187240 - DNA, 902 bp, Homo sapiens
  Payload ID: 16866
  Gene Symbol: SUCLA2
  Gene Name: succinate-CoA ligase, ADP-forming, beta subunit
  ENST ID: ENST00000497202
  CDS Start-End: 1-411
gcggcctccatgttctacggcaggctagtggccgtggccacccttcggaaccaccggcctcggacggcccagcgggctgctgctcaggttctgggaagttctggattgtttaataaccatggactccaagtacagcagcaacagcaaaggaatctctcactacatgaatacatgagtatggaattattgcaagaagctggtgtctccgttcccaaaggatatgtggcaaagtcaccagatgaagcttatgcaattgccaaaaaattaggtacagaagaaagaaataatatgtgcaggataaactgtaactatgagtatttctggcaagttctctgggaccagaactcacaagtaataagaagcaggttcaaaagatgtcgtgataaaggcacaggttttagctggtggtagaggaaaaggaacatttgaaagtggcctcaaaggaggagtgaagatagttttctctccagaagaagcaaaagctgtttcttcacaaatgattgggaaaaaattgtttaccaagcaaacgggagaaaagggcagaatatgcaatcaagtattggtctgtgagcgaaaatatcccaggagagaatactactttgcaataacaatggaaaggtcatttcaaggtcctgtattaataggaagttcacatggtggtgtcaacattgaagatgttgctgctgagtctcctgaagcaataattaaagaacctattgatattgaagaaggcatcaaaaaggaacaagctctccagcttgcacagaagatgggatttccacctaatattgtggaatcagcagcagaaaacatggtcaagctttacagcctttttctgaaatacgatgcaaccatgatagaaataaatccaatggtggaagattcagatggagctgatgaag

SEQ ID NO: 187241 - DNA, 832 bp, Homo sapiens
  Payload ID: 16866
  Gene Symbol: SUCLA2
  Gene Name: succinate-CoA ligase, ADP-forming, beta subunit
  ENST ID: ENST00000634878
  CDS Start-End: 1-314
catttcaaggtcctgtattaataggaagttcacatggtggtgtcaacattgaagatgttgctgctgagtctcctgaagcaataattaaagaacctattgatattgaagaaggcatcaaaaaggaacaagctctccagcttgcacagaagatgggatttccacctaatattgtggaatcagcagcagaaaacatggtcaagctttacagcctttttctgaaatacgatgcaaccatgatagaaataaatccaatggtggaagattcagatggagctgatgaagatttaccaacattggcactattgacattttaggtattgtgtatggatgcaaagatcaattttgactctaattcagcctatcgccaaaagaaaatctttgatctacaggactggacccaggaagatgaaagggacaaagatgctgctaaggcaaatctcaactacattggcctcgatggaaatataggctgcctagtaaatggtgctggtttggctatggccacaatggatataataaaacttcatggagggactccagccaacttccttgatgttggtggtggtgctacagtccatcaagtaacagaagcatttaagcttatcacttcagataaaaaggtactggctattctggtcaacatttttggaggaatcatgcgctgtgatgttattgcacagggtatagtcatggcagtaaaagacttggaaattaaaatacctgttgtggtacggttacaaggtacacgagtcgatgatgctaaggcactgatagcggacagtggacttaaaatacttgcttgtgatgacttggatgaagctgctagaatggt

SEQ ID NO: 187242 - DNA, 1475 bp, Homo sapiens
  Payload ID: 16867
  Gene Symbol: SUCLG1
  Gene Name: succinate-CoA ligase, alpha subunit
  Uniprot ID: P53597
  ENST ID: ENST00000393868
  CDS Start-End: 212-1252
atgttaatcaaacccacatttctaggaaggagccgagttattatctgcctctccgataggatgcctctttgtcttcacctgccattcccgctgtttcgtgaagaatcctctgtaaagggaaatttgttcaggcgactgctgtggccaccctctgcctcctccggcctctgcccctgggaggtccccgggggcctgggagtgtcattggcgtatgaccgcaacccttgccgctgccgctgacatcgctaccatggtctccggcagcagcggcctcgccgccgcccgtctcctgtcgcgcagcttcctcctgccgcagaatggaattcggcattgttcctacacagcttctcggcaacatctctatgttgataaaaatacaaagattatttgccagggtttcactggcaaacagggcacctttcacagccagcaggcattggaatatggcaccaaactcgttggaggaaccactccagggaaaggaggccagacacatctgggcttacctgtctttaatactgtgaaggaggccaaagaacagacaggagcaacggcttctgtcatttatgttcctccgccttttgctgctgctgccattaatgaagctattgaggcagaaattcccttggttgtgtgtatcactgaaggaattccccagcaggacatggtacgagtcaagcacaaactgctgcgccaggaaaagacaaggctaattgggcccaactgccctggagtcatcaatcctggagaatgtaaaattggcatcatgcctggccatattcacaaaaaaggaaggattggcattgtgtccagatctggcaccctgacttatgaagcagttcaccaaacaacgcaagttggattggggcagtctttgtgcgttggcattggaggtgatccttttaatggaacagattttattgactgcctcgaaatctttttgaacgattctgccacagaaggcatcatattgattggtgaaattggtggtaatgcagaagagaatgctgcagaatttttgaagcaacataattcaggtccaaattccaagcctgtagtgtccttcattgctggtttaactgctcctcctgggagaagaatgggtcatgccggggcaattattgctggaggaaaaggtggagctaaagagaagatctctgcccttcagagtgcaggagttgtggtcagtatgtctcctgcacagctgggaaccacgatctacaaggaatttgaaaagaggaagatgctatgaaagaaaaaaaaaattcctaaaactgtggaatggatcacgtagacatgtaacccagcagcagtttgcttctgttgtccactgattaatcagcctatgtgcctgacactggtcttgcagtacaactggaagccaaaacaaggtggaagatgtcctgaattaagatgttttcaccacattgtattacagagacagccaataaatctactatttgatttcaatatgg

SEQ ID NO: 187243 - DNA, 568 bp, Homo sapiens
  Payload ID: 16867
  Gene Symbol: SUCLG1
  Gene Name: succinate-CoA ligase, alpha subunit
  ENST ID: ENST00000442240
  CDS Start-End: 1-316
aacccttgccgctgccgctgacatcgctaccatggtctccggcagcagcggcctcgccgccgcccgtctcctgtcgcgcagcttcctcctgccgcagaatggaattcggcattgttcctacacagcttctcggcaacatctctatgttgataaaaatacaaagattatttgccagggtttcactggcaaacaggaactccttctgttaacaaggcacctttcacagccagcaggcattggaatatggcaccaaactcgttggaggaaccactccagggaaaggaggccagacacatctgggcttacctgtctttaatactgtgaaggaggccaaagaacagacaggagcaacggcttctgtcatttatgttcctccgccttttgctgctgctgccattaatgaagctattgaggcagaaattcccttggttgtgtgtatcactgaaggaattccccagcaggacatggtacgagtcaagcacaaactgctgcgccaggaaaagacaaggctaattgggcccaactgccctggagtcatcaatcctggagaatgtaaaattggcatcat

SEQ ID NO: 187244 - DNA, 2352 bp, Homo sapiens
  Payload ID: 16868
  Gene Symbol: SUCLG2
  Gene Name: succinate-CoA ligase, GDP-forming, beta subunit
  Uniprot ID: Q96I99
  ENST ID: ENST00000307227
  CDS Start-End: 29-1327
ctgccccgtgccgagtttcctgtttaagatggcgtcccccgtagcagcgcaggccgggaagcttctgcgagccctagcgctgcggccccgcttcctggcggccgggtcccaggcagttcaattaacctccagaagatggctgaacctgcaggaataccagagcaagaaactgatgtctgacaacggagtgagagttcaaagattctttgtagcagacactgcaaatgaagctctcgaggctgctaagagactaaatgcaaaagaaattgttttaaaagcccagatcttagctggaggaagaggaaaaggtgtcttcaatagtggtttgaaaggaggtgttcatttaacaaaagaccctaatgttgtgggacagctggctaaacagatgattgggtacaatctagcgacaaaacaaactccaaaagaaggtgtgaaagttaacaaggtgatggttgctgaagccttggatatttccagagaaacctacctggcaattctgatggaccggtcctgcaatggccccgtgctggtgggcagcccccaggggggcgtcgacattgaagaggtggctgcttcaaacccggagctcatttttaaggagcaaattgacatttttgaaggaataaaggacagccaagctcagcggatggccgaaaatctaggcttcgttgggcctttgaaaagccaggctgcagatcaaattacgaagctgtataatctcttcctgaaaattgatgctactcaggtggaagtgaatccctttggtgaaactccagaaggacaagttgtctgttttgatgccaagataaactttgatgacaacgcagaattccgacaaaaagacatatttgctatggacgacaaatcagagaatgagcccattgaaaatgaagctgccaaatatgatctaaaatacataggactagatgggaacattgcctgctttgtgaatggtgctgggctcgccatggctacttgtgatatcattttccttaatggtgggaagccagccaacttcttggatcttggaggtggtgtaaaggaagctcaagtatatcaagcattcaaattgctcacagctgatcctaaggttgaagccatccttgtcaatatatttggtggtatcgtcaactgtgccatcattgccaatgggatcaccaaagcctgccgggagctagaactcaaggtgcccctggtggtccggcttgaaggaaccaacgtccaagaggcccagaagatactcaacaacagcggactccccattacttcagccattgacctggaggatgcagccaagaaggctgtggccagtgtggccaagaagtgatgtctttgtcctgatccaatggagaaagaaagccatttttccgtaaaaagggatggttcatcattgtgaaagaaatggttatctcattggggaagaaaaggggagggggaaggcaagaatcactgaaaaatcttaaatctgtgttttctggaataagatatctagacagcctaaatctgattttggtctttataaaaataatatcttgtgttctcatacttttctgtcactgtaagcctgcccagtaggcagtgttttgcagactttggggagtggtctatgtggccaaatattgtgtgtatagacagaatttgaaatcaagtcctgcttcatttacaagaattttggtgggcatctaatcctacataatgaaaaagaaaaacagaccatttaaaaactcagacaagattatatttaatatattaattactaaaaaggcataagattacactgaacatattagctactaaaaaggcactgctaagacattcaagcaaatagctattacacactactgcagattttacaggtttctaattctaacatatgtttgaaaaatccgtgagtattccaaaatatatttaataatggaatatctgcattaatataccatccatgtgtttttaccatttgccttaatattgaatatactgtttacctcacactaaaaagaaaaccagaagccttatttgtgattttgggagtggaagcttccatttttgtgtcaaaaatgaatcctgattcttatggaaatctctgttattaagatatttcaagatgagacaacactgaagatcaaattgtgtttagtatcactatcttctctcctcgtttctctcttactcctcatcctcccagaatctaccagtttatggtagaaagatgggaaccttatttgaatgtgttttttttttccatgatgtccaattttgttgtgggaaaggatttggataaaatttttgtttaaattttggtagatttttatctatacaaatttaaataaaattatgttttgtaagctgtaa

SEQ ID NO: 187245 - DNA, 1596 bp, Homo sapiens
  Payload ID: 16868
  Gene Symbol: SUCLG2
  Gene Name: succinate-CoA ligase, GDP-forming, beta subunit
  ENST ID: ENST00000460567
  CDS Start-End: 1-571
ccctaatgttgtgggacagctggctaaacagatgattgggtacaatctagcgacaaaacaaactccaaaagaaggtgtgaaagttaacaaggtgatggttgctgaagccttggatatttccagagaaacctacctggcaattctgatggaccggtcctgcaatggccccgtgctggtgggcagcccccaggggggcgtcgacattgaagaggtggctgcttcaaacccggagctcatttttaaggagcaaattgacatttttgaaggaataaaggacagccaagctcagcggatggccgaaaatctaggcttcgttgggcctttgaaaagccaggttgaagccatccttgtcaatatatttggtggtatcgtcaactgtgccatcattgccaatgggatcaccaaagcctgccgggagctagaactcaaggtgcccctggtggtccggcttgaaggaaccaacgtccaagaggcccagaagatactcaacaacagcggactccccattacttcagccattgacctggaggatgcagccaagaaggctgtggccagtgtggccaagaagtgatgtctttgtcctgatccaatggagaaagaaagccatttttccgtaaaaagggatggttcatcattgtgaaagaaatggttatctcattggggaagaaaaggggagggggaaggcaagaatcactgaaaaatcttaaatctgtgttttctggaataagatatctagacagcctaaatctgattttggtctttataaaaataatatcttgtgttctcatacttttctgtcactgtaagcctgcccagtaggcagtgttttgcagactttggggagtggtctatgtggccaaatattgtgtgtatagacagaatttgaaatcaagtcctgcttcatttacaagaattttggtgggcatctaatcctacataatgaaaaagaaaaacagaccatttaaaaactcagacaagattatatttaatatattaattactaaaaaggcataagattacactgaacatattagctactaaaaaggcactgctaagacattcaagcaaatagctattacacactactgcagattttacaggtttctaattctaacatatgtttgaaaaatccgtgagtattccaaaatatatttaataatggaatatctgcattaatataccatccatgtgtttttaccatttgccttaatattgaatatactgtttacctcacactaaaaagaaaaccagaagccttatttgtgattttgggagtggaagcttccatttttgtgtcaaaaatgaatcctgattcttatggaaatctctgttattaagatatttcaagatgagacaacactgaagatcaaattgtgtttagtatcactatcttctctcctcgtttctctcttactcctcatcctcccagaatctaccagtttatggtagaaagatgggaaccttatttgaatgtgttttttttttccatgatgtccaattttgttgtgggaaaggatttggataaaatttttgtttaaattttggtagatttttatctatacaaatttaaataaaattatgttttgtaagctgtaa

SEQ ID NO: 187246 - DNA, 1512 bp, Homo sapiens
  Payload ID: 16868
  Gene Symbol: SUCLG2
  Gene Name: succinate-CoA ligase, GDP-forming, beta subunit
  ENST ID: ENST00000492795
  CDS Start-End: 22-1161
gtgccgagtttcctgtttaagatggcgtcccccgtagcagcgcaggccgggaagcttctgcgagccctagcgctgcggccccgcttcctggcggccgggtcccaggcagttcaattaacctccagaagatggctgaacctgcaggaataccagagcaagaaactgatgtctgacaacggagtgagagttcaaagattctttgtagcagacactgcaaatgaagctctcgaggctgctaagagactaaatgcaaaagaaattgttttaaaagcccagatcttagctggaggaagaggaaaaggtgtcttcaatagtggtttgaaaggaggtgttcatttaacaaaagaccctaatgttgtgggacagctggctaaacagatgattgggtacaatctagcgacaaaacaaactccaaaagaaggtgtgaaagttaacaaggtgatggttgctgaagccttggatatttccagagaaacctacctggcaattctgatggaccggtcctgcaatggccccgtgctggtgggcagcccccaggggggcgtcgacattgaagaggtggctgcttcaaacccggagctcatttttaaggagcaaattgacatttttgaaggaataaaggacagccaagctcagcggatggccgaaaatctaggcttcgttgggcctttgaaaagccaggctgcagatcaaattacgaagctgtataatctcttcctgaaaattgatgctactcaggtggaagtgaatccctttggtgaaactccagaaggacaagttgtctgttttgatgccaagataaactttgatgacaacgcagaattccgacaaaaagacatatttgctatggacgacaaatcagagaatgagcccattgaaaatgaagctgccaaatatgatctaaaatacataggactagatgggaacattgcctgctttgtgaatggtgctgggctcgccatggctacttgtgatatcattttccttaatggtgggaagccagccaacttcttggatcttggaggtggtgtaaaggaagctcaagtatatcaagcattcaaattgctcacagctgatcctaagcagcaaaatttgaaagcaagaaatacttgggcaccagaatacaggactcagaagcacgttcttgaagcttggaaataggaccaatatggagctggaactcctgactcatcttgggagtctctgattatagagagactgccagagggagtggaacgaacatggactttacagtaagaccgccttaatttaaatcttgacaccattgcctactgctgtgtgatgtttaagctcattgagtttatttaccagggaaagttataatacataattttagcacctaggaaaattaacactcaataaaccttaatcctccatacagttttgcttattctaccaaggagtaaattatagaatataagtaaagtgaagaatttaggaagaagagaatagacagaataaggacagattggagtctaattagacccattt

SEQ ID NO: 187247 - DNA, 1516 bp, Homo sapiens
  Payload ID: 16868
  Gene Symbol: SUCLG2
  Gene Name: succinate-CoA ligase, GDP-forming, beta subunit
  Uniprot ID: Q96I99
  ENST ID: ENST00000493112
  CDS Start-End: 25-1347
cccgtgccgagtttcctgtttaagatggcgtcccccgtagcagcgcaggccgggaagcttctgcgagccctagcgctgcggccccgcttcctggcggccgggtcccaggcagttcaattaacctccagaagatggctgaacctgcaggaataccagagcaagaaactgatgtctgacaacggagtgagagttcaaagattctttgtagcagacactgcaaatgaagctctcgaggctgctaagagactaaatgcaaaagaaattgttttaaaagcccagatcttagctggaggaagaggaaaaggtgtcttcaatagtggtttgaaaggaggtgttcatttaacaaaagaccctaatgttgtgggacagctggctaaacagatgattgggtacaatctagcgacaaaacaaactccaaaagaaggtgtgaaagttaacaaggtgatggttgctgaagccttggatatttccagagaaacctacctggcaattctgatggaccggtcctgcaatggccccgtgctggtgggcagcccccaggggggcgtcgacattgaagaggtggctgcttcaaacccggagctcatttttaaggagcaaattgacatttttgaaggaataaaggacagccaagctcagcggatggccgaaaatctaggcttcgttgggcctttgaaaagccaggctgcagatcaaattacgaagctgtataatctcttcctgaaaattgatgctactcaggtggaagtgaatccctttggtgaaactccagaaggacaagttgtctgttttgatgccaagataaactttgatgacaacgcagaattccgacaaaaagacatatttgctatggacgacaaatcagagaatgagcccattgaaaatgaagctgccaaatatgatctaaaatacataggactagatgggaacattgcctgctttgtgaatggtgctgggctcgccatggctacttgtgatatcattttccttaatggtgggaagccagccaacttcttggatcttggaggtggtgtaaaggaagctcaagtatatcaagcattcaaattgctcacagctgatcctaaggttgaagccatccttgtcaatatatttggtggtatcgtcaactgtgccatcattgccaatgggatcaccaaagcctgccgggagctagaactcaaggtgcccctggtggtccggcttgaaggtacttttatggaaaaaaaaggaagttatatgcacataaaacaagaaacaggaaattcaaatgagaatataactggtatccaagagaacgtcgcccaccaaaatctgagtaagtgtgccatcagcatttttttatgttaaagatttactttgctaagatacttgctgagattacttttccaaattaatgaatatcatcacaaaattatttttttacatttgggttcagctgcatgctaatggaaatggaaaatggaagggcatggcttatagctgttcattcaccaaaaatattttagaattgtgtcca

SEQ ID NO: 187248 - DNA, 1645 bp, Homo sapiens
  Payload ID: 16869
  Gene Symbol: SUGCT
  Gene Name: succinyl-CoA:glutarate-CoA transferase
  Uniprot ID: Q9HAC7
  ENST ID: ENST00000335693
  CDS Start-End: 24-1361
gttcgccgcttgcaccgggaccgatgccatctgagacgcacgcgatgctggcgacgctggcgagggtggcagctctgcgcagaacctgcctcttctccggccggggcggcgggagggggctgtggactggccgcccgcagtcagatatgaacaatataaagccattggaaggggtaaaaattctggatctaacaagagtcctggcgggaccttttgctactatgaatttaggagatcttggagcagaagttataaaagtggagagaccaggagctggtgatgatacacgaacttgggggccaccttttgttgggacagaaagtacatattatctcagtgttaaccgaaataaaaaaagtattgctgttaatatcaaggatccaaaaggggtgaaaatcatcaaagagcttgcagctgtttgtgatgtgtttgtggaaaactatgtccctggcaaactgtctgcaatgggcctgggatatgaagatatagacgagattgctcctcacatcatctattgttccatcacagggtatggtcagacaggtccaatttctcagcgagctggttatgatgctgttgcctcggctgtttctggtctgatgcacatcacagggcctgagaatggagatccagttcgcccaggagtagctatgactgatcttgccactggcctgtatgcatatggagctattatggctggattgatacaaaaatacaaaactgggaaaggactgttcattgattgtaacctactgtcatcccaggtggcgtgtttgtctcacatagctgcaaattatcttattggtcaaaaggaagcaaaacgttggggtacagctcatggcagtatcgttccttaccaggcttttaaaaccaaggatggctatattgtagttggagcaggaaataaccagcagtttgccaccgtctgcaagatcttggatttgcctgagttgattgataattccaagtataaaactaaccaccttcgggtacacaatagaaaagagcttattaaaatattatctgaacggtttgaagaagaactgaccagcaagtggttatatctttttgaaggcagtggagtcccgtatggcccaatcaacaacatgaagaatgtatttgcagaacctcaggtattacacaatggcctcgttatggagatggagcatccaactgtggggaagatttccgtcccaggcccagctgtgagatacagtaagttcaagatgtcagaggccaggccgcccccgctgctcgggcagcacacaacgcacatcctgaaggaggtcctgagatacgatgacagggccatcggggagctgctcagcgctggagtggtggaccaacatgaaactcactgacaaaggaaaagggctcttcctcataacctcgatccgaatacactggcaaaggcaacactttgcttggacccttctccccagttctgataccactaaaaagaagatttagagtaactccagatttcttacatggcatctccagaatggctctggtattaatgaatctagtgccttttaaatgtatcccacgttttgttccctaccatcttttttttcagatgatgatttcattatggatttgtgggatttttaaaaataaagttttaatttttttcctggaaaaa

SEQ ID NO: 187249 - DNA, 1369 bp, Homo sapiens
  Payload ID: 16869
  Gene Symbol: SUGCT
  Gene Name: succinyl-CoA:glutarate-CoA transferase
  Uniprot ID: Q9HAC7
  ENST ID: ENST00000401647
  CDS Start-End: 24-1217
gttcgccgcttgcaccgggaccgatgccatctgagacgcacgcgatgctggcgacgctggcgagggtggcagctctgcgcagaacctgcctcttctccggccggggcggcgggagggggctgtggactggccgcccgcagtcagatatgaacaatataaagccattggaaggggtaaaaattctggatctaacaagagtcctggcgggaccttttgctactatgaatttaggagatcttggagcagaagttataaaagtggagagaccaggagctggtgatgatacacgaacttgggggccaccttttgttgggacagaaagtacatattatctcagtgttaaccgaaataaaaaaagtattgctgttaatatcaaggatccaaaaggggtgaaaatcatcaaagagcttgcagctgtttgtgatgtgtttgtggaaaactatgtccctggcaaactgtctgcaatgggcctgggatatgaagatatagacgagattgctcctcacatcatctattgttccatcacagggtatggtcagacaggtccaatttctcagcgagctggttatgatgctgttgcctcggctgtttctggtctgatgcacatcacagggcctgaggtggcgtgtttgtctcacatagctgcaaattatcttattggtcaaaaggaagcaaaacgttggggtacagctcatggcagtatcgttccttaccaggcttttaaaaccaaggatggctatattgtagttggagcaggaaataaccagcagtttgccaccgtctgcaagatcttggatttgcctgagttgattgataattccaagtataaaactaaccaccttcgggtacacaatagaaaagagcttattaaaatattatctgaacggtttgaagaagaactgaccagcaagtggttatatctttttgaaggcagtggagtcccgtatggcccaatcaacaacatgaagaatgtatttgcagaacctcaggtattacacaatggcctcgttatggagatggagcatccaactgtggggaagatttccgtcccaggcccagctgtgagatacagtaagttcaagatgtcagaggccaggccgcccccgctgctcgggcagcacacaacgcacatcctgaaggaggtcctgagatacgatgacagggccatcggggagctgctcagcgctggagtggtggaccaacatgaaactcactgacaaaggaaaagggctcttcctcataacctcgatccgaatacactggcaaaggcaacactttgcttggacccttctccccagttctgataccactaaaaagaagatttagagtaactccagatttcttacatggcatctccagaatggctctg

SEQ ID NO: 187250 - DNA, 1593 bp, Homo sapiens
  Payload ID: 16869
  Gene Symbol: SUGCT
  Gene Name: succinyl-CoA:glutarate-CoA transferase
  ENST ID: ENST00000416370
  CDS Start-End: 1-1265
acgcgatgctggcgacgctggcgagggtggcagctctgcgcagaacctgcctcttctccggccggggcggcgggagggggctgtggactggccgcccgcagtcagatatgaacaatataaagccattggaaggggtaaaaattctggatctaacaagagtcctggcgggaccttttgctactatgaatttaggagatcttggagcagaagttataaaagtggagagaccaggagctggtgatgatacacgaacttgggggccaccttttgttgggacagaaagtacatattatctcagtgttaaccgaaataaaaaaagtattgctgttaatatcaaggatccaaaaggggtgaaaatcatcaaagagcttgcagctgtttgtgatgtgtttgtggaaaactatgtccctggcaaactgtctgcaatgggcctgggatatgaagatatagacgagattgctcctcacatcatctattgttccatcacagggtatggtcagacaggtccaatttctcagcgagctggttatgatgctgttgcctcggctgtttctggtctgatgcacatcacagggcctgagaatggagatccagttcgcccaggagtagctatgactgatcttgccactggcctgtatgcatatggagctattatggctggattgatacaaaaatacaaaactgggaaaggactgttcattgattgtaacctactgtcatcccaggtggcgtgtttgtctcacatagctgcaaattatcttattggtcaaaaggaagcaaaacgttggggtacagctcatggcagtatcgttccttaccaggcttttaaaaccaaggatggctatattgtagttggagcaggaaataaccagcagtttgccaccgtctgcaagatcttggatttgcctgagttgattgataattccaagtataaaactaaccaccttcgggtacacaatagaaaagagcttattaaaatattatctgaacggtttgaagaagaactgaccagcaagtggttatatctttttgaaggcagtggagtcccgtatggcccaatcaacaacatgaagaatgtatttgcagaacctcaggtatcctcccttgttttgcctctgatgagctgcagagtttcttggcgcttggtgcatggaaacggccacttctgttcagatgtgggaacgcaccactggcgcgtgtggcccactctccatgtgcgctgtgccagcacagctgctagttcaactggaaattgctttgggtgaagtacaaggcctggaacatggcgtaggaatggagactttgataaagtgaaaaggggtatgtctaacaacaacaacaaaagccaggattgggagactcagtaacggcagaaaaatttgagtgcctacttctcaagtagaccatttacagcatttcatttgtggtttgaacttggagacaacaaaaatttacttgatggtagaaactatttctagcctaacaatttcatcatagtctcatggattgaggtaacttgatttttcgattcaatcaaaacaacagatgatatttttttttcatggataaatgagagattgtctaccttttatc

SEQ ID NO: 187251 - DNA, 539 bp, Homo sapiens
  Payload ID: 16869
  Gene Symbol: SUGCT
  Gene Name: succinyl-CoA:glutarate-CoA transferase
  ENST ID: ENST00000413931
  CDS Start-End: 1-539
acgcgatgctggcgacgctggcgagggtggcagctctgcgcagaacctgcctcttctccggccggggcggcgggagggggctgtggactggccgcccgcagtcagcaaggcaatgtacttctatagaagaatgcgcccttacagatggaacaatgatatgaacaatataaagccattggaaggggtaaaaattctggatctaacaagagtcctggcgggaccttttgctactatgaatttaggagatcttggagcagaagttataaaagtggagagaccaggagctggtgatgatacacgaacttgggggccaccttttgttgggacagaaagtacatattatctcagtgttaaccgaaataaaaaaagtattgctgttaatatcaaggatccaaaaggggtgaaaatcatcaaagagcttgcagctgtttgtgatgtgtttgtggaaaactatgtccctggcaaactgtctgcaatgggcctgggatatgaagatatagacgagattgctcctcacatcatctattgttccatcacag

SEQ ID NO: 187252 - DNA, 367 bp, Homo sapiens
  Payload ID: 16869
  Gene Symbol: SUGCT
  Gene Name: succinyl-CoA:glutarate-CoA transferase
  ENST ID: ENST00000444074
  CDS Start-End: 1-149
tgccatctgagacgcacgcgatgctggcgacgctggcgagggtggcagctctgcgcagaacctgcctcttctccggccggggcggcgggagggggctgtggactggccgcccgcagtcagagtcctggcgggaccttttgctactatgaatttaggagatcttggagcagaagttataaaagtggagagaccaggagctggtgatgatacacgaacttgggggccaccttttgttgggacagaaagtacatattatctcagtgttaaccgaaataaaaaaagtattgctgttaatatcaaggatccaaaaggggtgaaaatcatcaaagagcttgcagctgtttgtgatgtgtttgtggaaaactat

SEQ ID NO: 187253 - DNA, 1591 bp, Homo sapiens
  Payload ID: 16869
  Gene Symbol: SUGCT
  Gene Name: succinyl-CoA:glutarate-CoA transferase
  Uniprot ID: Q9HAC7
  ENST ID: ENST00000628514
  CDS Start-End: 24-1439
gttcgccgcttgcaccgggaccgatgccatctgagacgcacgcgatgctggcgacgctggcgagggtggcagctctgcgcagaacctgcctcttctccggccggggcggcgggagggggctgtggactggccgcccgcagtcagatatgaacaatataaagccattggaaggggtaaaaattctggatctaacaagagtcctggcgggaccttttgctactatgaatttaggagatcttggagcagaagttataaaagtggagagaccaggagctggtgatgatacacgaacttgggggccaccttttgttgggacagaaagtacatattatctcagtgttaaccgaaataaaaaaagtattgctgttaatatcaaggatccaaaaggggtgaaaatcatcaaagagcttgcagctgtttgtgatgtgtttgtggaaaactatgtccctggcaaactgtctgcaatgggcctgggatatgaagatatagacgagattgctcctcacatcatctattgttccatcacagggtatggtcagacaggtccaatttctcagcgagctggttatgatgctgttgcctcggctgtttctggtctgatgcacatcacagggcctgagaatggagatccagttcgcccaggagtagctatgactgatcttgccactggcctgtatgcatatggagctattatggctggattgatacaaaaatacaaaactgggaaaggactgttcattgattgtaacctactgtcatcccaggtggcgtgtttgtctcacatagctgcaaattatcttattggtcaaaaggaagcaaaacgttggggtacagctcatggcagtatcgttccttaccaggcttttaaaaccaaggatggctatattgtagttggagcaggaaataaccagcagtttgccaccgtctgcaagatcttggatttgcctgagttgattgataattccaagtataaaactaaccaccttcgggtacacaatagaaaagagcttattaaaatattatctgaacggtttgaagaagaactgaccagcaagtggttatatctttttgaaggcagtggagtcccgtatggcccaatcaacaacatgaagaatgtatttgcagaacctcagaacgctgtctctggcttccaaagcctgctgcattccttggcccatggccccttccttcatcttcaaggatcagcaagggtattacacaatggcctcgttatggagatggagcatccaactgtggggaagatttccgtcccaggcccagctgtgagatacagtaagttcaagatgtcagaggccaggccgcccccgctgctcgggcagcacacaacgcacatcctgaaggaggtcctgagatacgatgacagggccatcggggagctgctcagcgctggagtggtggaccaacatgaaactcactgacaaaggaaaagggctcttcctcataacctcgatccgaatacactggcaaaggcaacactttgcttggacccttctccccagttctgataccactaaaaagaagatttagagtaactccagatttcttacatggcatctccagaatggctctg

SEQ ID NO: 187254 - DNA, 6011 bp, Homo sapiens
  Payload ID: 16870
  Gene Symbol: SI
  Gene Name: sucrase-isomaltase (alpha-glucosidase)
  Uniprot ID: P14410
  ENST ID: ENST00000264382
  CDS Start-End: 64-5547
ttattttggcagccttatccaagtctggtacaacatagcaaagagaacaggctatgaaataagatggcaagaaagaaatttagtggattggaaatctctctgattgtcctttttgtcatagttactataatagctattgccttaattgttgttttagcaactaagacacctgctgttgatgaaattagtgattctacttcaactccagctactactcgtgtgactacaaatccttctgattcaggaaaatgtccaaatgtgttaaatgatcctgtcaatgtgagaataaactgcattccagaacaattcccaacagagggaatttgtgcacagagaggctgctgctggaggccgtggaatgactctcttattccttggtgcttcttcgttgataatcatggttataacgttcaagacatgacaacaacaagtattggagttgaagccaaattaaacaggataccttcacctacactatttggaaatgacatcaacagtgttctcttcacaactcaaaatcagacacccaatcgtttccggttcaagattactgatccaaataatagaagatatgaagttcctcatcagtatgtaaaagagtttactggacccacagtttctgatacgttgtatgatgtgaaggttgcccaaaacccatttagcatccaagttattaggaaaagcaacggtaaaactttgtttgacaccagcattggtcccttagtgtactctgaccagtacttacagatctcaacccgtcttccaagtgattatatttatggtattggagaacaagttcataagagatttcgtcatgatttatcctggaaaacatggccaatttttactcgagaccaacttcctggtgataataataataatttatacggccatcaaacattctttatgtgtattgaagatacatctggaaagtcattcggtgtttttttaatgaatagcaatgcaatggagatttttatccagcctactccaatagtaacatatagagttaccggtggcattctggatttttacatccttctaggagatacaccagaacaagtagttcaacagtatcaacagcttgttggactaccagcaatgccagcatattggaatcttggattccaactaagtcgctggaattataagtcactagatgtagtgaaagaagtggtaaggagaaaccgggaagctggcataccatttgatacacaggtcactgatattgactacatggaagacaagaaagactttacttatgatcaagttgcgtttaacggactccctcaatttgtgcaagatttgcatgaccatggacagaaatatgtcatcatcttggaccctgcaatttccataggtcgacgtgccaatggaacaacatatgcaacctatgagaggggaaacacacaacatgtgtggataaatgagtcagatggaagtacaccaattattggagaggtatggccaggattaacagtataccctgatttcactaacccaaactgcattgattggtgggcaaatgaatgcagtattttccatcaagaagtgcaatatgatggactttggattgacatgaatgaagtttccagctttattcaaggttcaacaaaaggatgtaatgtaaacaaattgaattatccaccgtttactcctgatattcttgacaaactcatgtattccaaaacaatttgcatggatgctgtgcagaactggggtaaacagtatgatgttcatagcctctatggatacagcatggctatagccacagagcaagctgtacaaaaagtttttcctaataagagaagcttcattcttacccgctcaacatttgctggatctggaagacatgctgcgcattggttaggagacaatactgcttcatgggaacaaatggaatggtctataactggaatgctggagttcagtttgtttggaatacctttggttggagcagacatctgtggatttgtggctgaaaccacagaagaactttgcagaagatggatgcaacttggggcattttatccattttccagaaaccataattctgacggatatgaacatcaggatcctgcattttttgggcagaattcacttttggttaaatcatcaaggcagtatttaactattcgctacaccttattacccttcctctacactctgttttataaagcccatgtgtttggagaaacagtagcaagaccagttcttcatgagttttatgaggatacgaacagctggattgaggacactgagtttttgtggggccctgcattacttattactcctgttctaaaacagggagcagatactgtgagtgcctacatccctgatgctatttggtatgattatgaatctggtgcaaaaaggccatggaggaaacaacgggttgatatgtatcttccagcagacaaaataggattacatcttagaggaggttatatcatccccattcaagaaccagatgtaacaacaacagcaagccgtaagaatcctctaggacttatagtcgcattaggtgaaaacaacacagccaaaggagactttttctgggatgatggagaaactaaagatacaatacaaaatggcaactacatattatatacattttcagtttctaataacacattagatattgtgtgcacacattcatcatatcaggaaggaactaccttagcatttcagactgtaaaaatccttgggttgacagacagtgttacagaagttagagtggcggaaaataatcaaccaatgaacgctcattccaatttcacttatgatgcttctaaccaggttctcctaattgcagatctcaaacttaatcttggaagaaactttagtgttcaatggaatcaaattttctcagaaaatgaaagatttaattgttatccagatgcagatttggcaactgaacaaaagtgcacacaacgtggctgtgtatggagaacgggttcttctctatccaaagcacctgagtgttactttcccagacaagataactcttattcagtcaactcagctcgctattcatccatgggtataacagctgacctccaactaaatactgcaaatgccagaataaagttaccttctgaccccatctcaactcttcgtgtggaggtgaaatatcacaaaaatgatatgttgcagtttaagatttatgatccccaaaagaagagatatgaagtaccagtaccgttaaacattccaaccaccccaataagtacttatgaagacagactttatgatgtggaaatcaaggaaaatccttttggcatccagattcgacggagaagcagtggaagagtcatttgggattcttggctgcctggatttgcttttaatgaccagttcattcaaatatcgactcgcctgccatcagaatatatatatggttttggggaagtggaacatacagcatttaagcgagatctgaactggaatacttggggaatgttcacaagagaccaaccccctggttacaaacttaattcctatggatttcatccctattacatggctctggaagaggagggcaatgctcatggtgttttcttactcaacagcaatgcaatggatgttacattccagccaactcctgctctaacttaccgtacagttggagggatcttggatttttatatgtttttgggcccaactccagaagttgcaacaaagcaataccatgaagtaattggccatccagtcatgccagcttattgggctttgggattccaattatgtcgttatggatatgcaaatacttcagaggttcgggaattatatgacgctatggtggctgctaacatcccctatgatgttcagtacacagacattgactacatggaaaggcagctagactttacaattggtgaagcattccaggaccttcctcagtttgttgacaaaataagaggagaaggaatgagatacattattatcctggatccagcaatttcaggaaatgaaacaaagacttaccctgcatttgaaagaggacagcagaatgatgtctttgtcaaatggccaaacaccaatgacatttgttgggcaaaggtttggccagatttgcccaacataacaatagataaaactctaacggaagatgaagctgttaatgcttccagagctcatgtagctttcccagatttcttcaggacttccacagcagagtggtgggccagagaaattgtggacttttacaatgaaaagatgaagtttgatggtttgtggattgatatgaatgagccatcaagttttgtaaatggaacaactactaatcaatgcagaaatgacgaactaaattatccaccttatttcccagaactcacaaaaagaactgatggattacatttcagaacaatttgcatggaagctgagcagattcttagtgatggaacatcagttttgcattacgatgttcacaatctctatggatggtcacagatgaaacctactcatgatgcattgcagaagacaactggaaaaagagggattgtaatttctcgttccacgtatcctactagtggacgatggggaggacactggcttggagacaactatgcacgatgggacaacatggacaaatcaatcattggtatgatggaatttagtctgtttggaatgtcatatactggagcagacatctgtggttttttcaacaactcagaatatcatctctgtacccgctggatgcaacttggagcattttatccatactcaaggaatcacaacattgcaaatactagaagacaagatcccgcttcctggaatgaaacttttgctgaaatgtcaaggaatattctaaatattagatacaccttattgccctatttttacacacaaatgcatgaaattcatgctaatggtggcactgttatccgaccccttttgcatgagttctttgatgaaaaaccaacctgggatatattcaagcagttcttatggggtccagcatttatggttaccccagtactggaaccttatgttcaaactgtaaatgcctacgtccccaatgctcggtggtttgactaccatacaggcaaagatattggcgtcagaggacaatttcaaacatttaatgcttcttatgacacaataaacctacatgtccgtggtggtcacatcctaccatgtcaagagccagctcaaaacacattttacagtcgacaaaaacacatgaagctcattgttgctgcagatgataatcagatggcacagggttctctgttttgggatgatggagagagtatagacacctatgaaagagacctatatttatctgtacaatttaatttaaaccagaccaccttaacaagcactatattgaagagaggttacataaataaaagtgaaacgaggcttggatcccttcatgtatgggggaaaggaactactcctgtcaatgcagttactctaacgtataacggaaataaaaattcgcttccttttaatgaagacactaccaacatgatattacgtattgatctgaccacacacaatgttactctagaagaaccaatagaaatcaactggtcatgaagatcaccatcaattttagttgtcaatgggaaaaaacaccaggatttaagtttcacagcacttacaattttccctcttcacttggttcttgtactctacaaaatatagctttcataacatcgaaaagttattttgtagcgtacatcaatgataatgctaattttattatagtaatgtgacttggattcaattttaaggcatatttaacaaaatttgaatagccctatttatccttgttaagtatcagctacaattgtaaactagttactaaacatgtatgtaaatagctaagatataatttaaacgtgatttttaaattaaataaaatttttatgtaattatatatactatatttttctcaatgtttagcagatttaagatatgtaacaacaattatttgaagatttaattacttcttagtatgtgcatttaattagaaaaagagaataaaaaatgtaagtgta

SEQ ID NO: 187255 - DNA, 565 bp, Homo sapiens
  Payload ID: 16870
  Gene Symbol: SI
  Gene Name: sucrase-isomaltase (alpha-glucosidase)
  ENST ID: ENST00000476593
  CDS Start-End: 64-204
ttattttggcagccttatccaagtctggtacaacatagcaaagagaacaggctatgaaataagatggcaagaaagaaatttagtggattggaaatctctctgattgtcctttttgtcatagttactataatagctattgccttaattgttgttttagcaactaagacacctgctgttgatgttttttcctcccccagaaattagtgattctacttcaactccagctactactcgtgtgactacaaatccttctgattcaggaaaatgtccaaatgtgttaaatgatcctgtcaatgtgagaataaactgcattccagaacaattcccaacagagggaatttgtgcacagagaggctgctgctggaggccgtggaatgactctcttattccttggtgcttcttcgttgataatcatggttataacgttcaagacatgacaacaacaagtattggagttgaagccaaattaaacaggataccttcacctacactatttggaaatgacatcaacagtgttctcttcacaactcaaaatcagacacccaatcgtttccggttcaaggtt

SEQ ID NO: 187256 - DNA, 5710 bp, Homo sapiens
  Payload ID: 16871
  Gene Symbol: SULF1
  Gene Name: sulfatase 1
  Uniprot ID: Q8IWU6
  ENST ID: ENST00000260128
  CDS Start-End: 718-3333
aggttacttgactgggagttctcagacctccagtttcagccctgccctcagcctccaatccgtaagagacacccagccccagcaattggattgggcagcccgtcttgacacaccactgtgctgagtgcttgaggacgtgtttcaacagatggttggggttagtgtgtgtcatcacattcgagtggggattaagagaaggaaggctgccttgctggagctgtgtggtcttctccaagtgagagtcgcaggcaatagaactactttgcttttggaggaaaaggaggaattcattttcagcagacacaagaaaagcagtttttttttcagggattcttcacttctcttgaacaaggaactcactcagagactaacacaaaggaagtaatttcttacctggtcattatttagtctacaataagttcatccttcttcagtgtgaccagtaaattcttcccatactcttgaagagagcataattggaatggagaggtgctgacggccacccaccatcatctaaagaagataaacttggcaaatgacatgcaggttcttcaaggcagaataattgcagaaaatcttcaaaggaccctatctgcagatgttctgaatacctctgagaatagagattgattattcaaccaggatacctaattcaagaactccagaaatcaggagacggagacattttgtcagttttgcaacattggaccaaatacaatgaagtattcttgctgtgctctggttttggctgtcctgggcacagaattgctgggaagcctctgttcgactgtcagatccccgaggttcagaggacggatacagcaggaacgaaaaaacatccgacccaacattattcttgtgcttaccgatgatcaagatgtggagctggggtccctgcaagtcatgaacaaaacgagaaagattatggaacatgggggggccaccttcatcaatgcctttgtgactacacccatgtgctgcccgtcacggtcctccatgctcaccgggaagtatgtgcacaatcacaatgtctacaccaacaacgagaactgctcttccccctcgtggcaggccatgcatgagcctcggacttttgctgtatatcttaacaacactggctacagaacagccttttttggaaaatacctcaatgaatataatggcagctacatcccccctgggtggcgagaatggcttggattaatcaagaattctcgcttctataattacactgtttgtcgcaatggcatcaaagaaaagcatggatttgattatgcaaaggactacttcacagacttaatcactaacgagagcattaattacttcaaaatgtctaagagaatgtatccccataggcccgttatgatggtgatcagccacgctgcgccccacggccccgaggactcagccccacagttttctaaactgtaccccaatgcttcccaacacataactcctagttataactatgcaccaaatatggataaacactggattatgcagtacacaggaccaatgctgcccatccacatggaatttacaaacattctacagcgcaaaaggctccagactttgatgtcagtggatgattctgtggagaggctgtataacatgctcgtggagacgggggagctggagaatacttacatcatttacaccgccgaccatggttaccatattgggcagtttggactggtcaaggggaaatccatgccatatgactttgatattcgtgtgcctttttttattcgtggtccaagtgtagaaccaggatcaatagtcccacagatcgttctcaacattgacttggcccccacgatcctggatattgctgggctcgacacacctcctgatgtggacggcaagtctgtcctcaaacttctggacccagaaaagccaggtaacaggtttcgaacaaacaagaaggccaaaatttggcgtgatacattcctagtggaaagaggcaaatttctacgtaagaaggaagaatccagcaagaatatccaacagtcaaatcacttgcccaaatatgaacgggtcaaagaactatgccagcaggccaggtaccagacagcctgtgaacaaccggggcagaagtggcaatgcattgaggatacatctggcaagcttcgaattcacaagtgtaaaggacccagtgacctgctcacagtccggcagagcacgcggaacctctacgctcgcggcttccatgacaaagacaaagagtgcagttgtagggagtctggttaccgtgccagcagaagccaaagaaagagtcaacggcaattcttgagaaaccaggggactccaaagtacaagcccagatttgtccatactcggcagacacgttccttgtccgtcgaatttgaaggtgaaatatatgacataaatctggaagaagaagaagaattgcaagtgttgcaaccaagaaacattgctaagcgtcatgatgaaggccacaaggggccaagagatctccaggcttccagtggtggcaacaggggcaggatgctggcagatagcagcaacgccgtgggcccacctaccactgtccgagtgacacacaagtgttttattcttcccaatgactctatccattgtgagagagaactgtaccaatcggccagagcgtggaaggaccataaggcatacattgacaaagagattgaagctctgcaagataaaattaagaatttaagagaagtgagaggacatctgaagagaaggaagcctgaggaatgtagctgcagtaaacaaagctattacaataaagagaaaggtgtaaaaaagcaagagaaattaaagagccatcttcacccattcaaggaggctgctcaggaagtagatagcaaactgcaacttttcaaggagaacaaccgtaggaggaagaaggagaggaaggagaagagacggcagaggaagggggaagagtgcagcctgcctggcctcacttgcttcacgcatgacaacaaccactggcagacagccccgttctggaacctgggatctttctgtgcttgcacgagttctaacaataacacctactggtgtttgcgtacagttaatgagacgcataattttcttttctgtgagtttgctactggctttttggagtattttgatatgaatacagatccttatcagctcacaaatacagtgcacacggtagaacgaggcattttgaatcagctacacgtacaactaatggagctcagaagctgtcaaggatataagcagtgcaacccaagacctaagaatcttgatgttggaaataaagatggaggaagctatgacctacacagaggacagttatgggatggatgggaaggttaatcagccccgtctcactgcagacatcaactggcaaggcctagaggagctacacagtgtgaatgaaaacatctatgagtacagacaaaactacagacttagtctggtggactggactaattacttgaaggatttagatagagtatttgcactgctgaagagtcactatgagcaaaataaaacaaataagactcaaactgctcaaagtgacgggttcttggttgtctctgctgagcacgctgtgtcaatggagatggcctctgctgactcagatgaagacccaaggcataaggttgggaaaacacctcatttgaccttgccagctgaccttcaaaccctgcatttgaaccgaccaacattaagtccagagagtaaacttgaatggaataacgacattccagaagttaatcatttgaattctgaacactggagaaaaaccgaaaaatggacggggcatgaagagactaatcatctggaaaccgatttcagtggcgatggcatgacagagctagagctcgggcccagccccaggctgcagcccattcgcaggcacccgaaagaacttccccagtatggtggtcctggaaaggacatttttgaagatcaactatatcttcctgtgcattccgatggaatttcagttcatcagatgttcaccatggccaccgcagaacaccgaagtaattccagcatagcggggaagatgttgaccaaggtggagaagaatcacgaaaaggagaagtcacagcacctagaaggcagcgcctcctcttcactctcctctgattagatgaaactgttaccttaccctaaacacagtatttctttttaacttttttatttgtaaactaataaaggtaatcacagccaccaacattccaagctaccctgggtacctttgtgcagtagaagctagtgagcatgtgagcaagcggtgtgcacacggagactcatcgttataatttactatctgccaagagtagaaagaaaggctggggatatttgggttggcttggttttgattttttgcttgtttgtttgttttgtactaaaacagtattatcttttgaatatcgtagggacataagtatatacatgttatccaatcaagatggctagaatggtgcctttctgagtgtctaaaacttgacacccctggtaaatctttcaacacacttccactgcctgcgtaatgaagttttgattcatttttaaccactggaatttttcaatgccgtcattttcagttagatgattttgcactttgagattaaaatgccatgtctatttgattagtcttatttttttatttttacaggcttatcagtctcactgttggctgtcattgtgacaaagtcaaataaacccccaaggacgacacacagtatggatcacatattgtttgacattaagcttttgccagaaaatgttgcatgtgttttacctcgacttgctaaaatcgattagcagaaaggcatggctaataatgttggtggtgaaaataaataaataagtaaacaaaatgaagattgcctgctctctctgtgcctagcctcaaagcgttcatcatacatcatacctttaagattgctatattttgggttattttcttgacaggagaaaaagatctaaagatcttttattttcatcttttttggttttcttggcatgactaagaagcttaaatgttgataaaatatgactagttttgaatttacaccaagaacttctcaataaaagaaaatcatgaatgctccacaatttcaacataccacaagagaagttaatttcttaacattgtgttctatgattatttgtaagaccttcaccaagttctgatatcttttaaagacatagttcaaaattgcttttgaaaatctgtattcttgaaaatatccttgttgtgtattaggtttttaaataccagctaaaggattacctcactgagtcatcagtaccctcctattcagctccccaagatgatgtgtttttgcttaccctaagagaggttttcttcttatttttagataattcaagtgcttagataaattatgttttctttaagtgtttatggtaaactcttttaaagaaaatttaatatgttatagctgaatctttttggtaactttaaatctttatcatagactctgtacatatgttcaaattagctgcttgcctgatgtgtgtatcatcggtgggatgacagaacaaacatatttatgatcatgaataatgtgctttgtaaaaagatttcaagttattaggaagcatactctgttttttaatcatgtataatattccatgatacttttatagaacaattctggcttcaggaaagtctagaagcaatatttcttcaaataaaaggtgtttaaacttt

SEQ ID NO: 187257 - DNA, 4891 bp, Homo sapiens
  Payload ID: 16871
  Gene Symbol: SULF1
  Gene Name: sulfatase 1
  Uniprot ID: Q8IWU6
  ENST ID: ENST00000402687
  CDS Start-End: 756-3371
tttgtctggcagcgttggttctatgggggtgtgtgatgataataatacgcgggcttatataaccgtcttcatcttgcgagcacttcgcagaccgtcgctaatgaatcttggggccggtgtcgggccggggcggcttgatcggcaactaggaaaccccaggcgcagaggccaggagcgagggcagcgaggatcagaggccaggccttcccggctgccggcgctcctcggaggtcagggcagatgaggaacatgactctcccccttcggaggaggaaggaagtcccgctgccaccttatctctgctcctctgcctcctccctgttcccagagctttttctctagagaagattttgaaggcggcttttggattcttcacttctcttgaacaaggaactcactcagagactaacacaaaggaagtaatttcttacctggtcattatttagtctacaataagttcatccttcttcagtgtgaccagtaaattcttcccatactcttgaagagagcataattggaatggagaggtgctgacggccacccaccatcatctaaagaagataaacttggcaaatgacatgcaggttcttcaaggcagaataattgcagaaaatcttcaaaggaccctatctgcagatgttctgaatacctctgagaatagagattgattattcaaccaggatacctaattcaagaactccagaaatcaggagacggagacattttgtcagttttgcaacattggaccaaatacaatgaagtattcttgctgtgctctggttttggctgtcctgggcacagaattgctgggaagcctctgttcgactgtcagatccccgaggttcagaggacggatacagcaggaacgaaaaaacatccgacccaacattattcttgtgcttaccgatgatcaagatgtggagctggggtccctgcaagtcatgaacaaaacgagaaagattatggaacatgggggggccaccttcatcaatgcctttgtgactacacccatgtgctgcccgtcacggtcctccatgctcaccgggaagtatgtgcacaatcacaatgtctacaccaacaacgagaactgctcttccccctcgtggcaggccatgcatgagcctcggacttttgctgtatatcttaacaacactggctacagaacagccttttttggaaaatacctcaatgaatataatggcagctacatcccccctgggtggcgagaatggcttggattaatcaagaattctcgcttctataattacactgtttgtcgcaatggcatcaaagaaaagcatggatttgattatgcaaaggactacttcacagacttaatcactaacgagagcattaattacttcaaaatgtctaagagaatgtatccccataggcccgttatgatggtgatcagccacgctgcgccccacggccccgaggactcagccccacagttttctaaactgtaccccaatgcttcccaacacataactcctagttataactatgcaccaaatatggataaacactggattatgcagtacacaggaccaatgctgcccatccacatggaatttacaaacattctacagcgcaaaaggctccagactttgatgtcagtggatgattctgtggagaggctgtataacatgctcgtggagacgggggagctggagaatacttacatcatttacaccgccgaccatggttaccatattgggcagtttggactggtcaaggggaaatccatgccatatgactttgatattcgtgtgcctttttttattcgtggtccaagtgtagaaccaggatcaatagtcccacagatcgttctcaacattgacttggcccccacgatcctggatattgctgggctcgacacacctcctgatgtggacggcaagtctgtcctcaaacttctggacccagaaaagccaggtaacaggtttcgaacaaacaagaaggccaaaatttggcgtgatacattcctagtggaaagaggcaaatttctacgtaagaaggaagaatccagcaagaatatccaacagtcaaatcacttgcccaaatatgaacgggtcaaagaactatgccagcaggccaggtaccagacagcctgtgaacaaccggggcagaagtggcaatgcattgaggatacatctggcaagcttcgaattcacaagtgtaaaggacccagtgacctgctcacagtccggcagagcacgcggaacctctacgctcgcggcttccatgacaaagacaaagagtgcagttgtagggagtctggttaccgtgccagcagaagccaaagaaagagtcaacggcaattcttgagaaaccaggggactccaaagtacaagcccagatttgtccatactcggcagacacgttccttgtccgtcgaatttgaaggtgaaatatatgacataaatctggaagaagaagaagaattgcaagtgttgcaaccaagaaacattgctaagcgtcatgatgaaggccacaaggggccaagagatctccaggcttccagtggtggcaacaggggcaggatgctggcagatagcagcaacgccgtgggcccacctaccactgtccgagtgacacacaagtgttttattcttcccaatgactctatccattgtgagagagaactgtaccaatcggccagagcgtggaaggaccataaggcatacattgacaaagagattgaagctctgcaagataaaattaagaatttaagagaagtgagaggacatctgaagagaaggaagcctgaggaatgtagctgcagtaaacaaagctattacaataaagagaaaggtgtaaaaaagcaagagaaattaaagagccatcttcacccattcaaggaggctgctcaggaagtagatagcaaactgcaacttttcaaggagaacaaccgtaggaggaagaaggagaggaaggagaagagacggcagaggaagggggaagagtgcagcctgcctggcctcacttgcttcacgcatgacaacaaccactggcagacagccccgttctggaacctgggatctttctgtgcttgcacgagttctaacaataacacctactggtgtttgcgtacagttaatgagacgcataattttcttttctgtgagtttgctactggctttttggagtattttgatatgaatacagatccttatcagctcacaaatacagtgcacacggtagaacgaggcattttgaatcagctacacgtacaactaatggagctcagaagctgtcaaggatataagcagtgcaacccaagacctaagaatcttgatgttggaaataaagatggaggaagctatgacctacacagaggacagttatgggatggatgggaaggttaatcagccccgtctcactgcagacatcaactggcaaggcctagaggagctacacagtgtgaatgaaaacatctatgagtacagacaaaactacagacttagtctggtggactggactaattacttgaaggatttagatagagtatttgcactgctgaagagtcactatgagcaaaataaaacaaataagactcaaactgctcaaagtgacgggttcttggttgtctctgctgagcacgctgtgtcaatggagatggcctctgctgactcagatgaagacccaaggcataaggttgggaaaacacctcatttgaccttgccagctgaccttcaaaccctgcatttgaaccgaccaacattaagtccagagagtaaacttgaatggaataacgacattccagaagttaatcatttgaattctgaacactggagaaaaaccgaaaaatggacggggcatgaagagactaatcatctggaaaccgatttcagtggcgatggcatgacagagctagagctcgggcccagccccaggctgcagcccattcgcaggcacccgaaagaacttccccagtatggtggtcctggaaaggacatttttgaagatcaactatatcttcctgtgcattccgatggaatttcagttcatcagatgttcaccatggccaccgcagaacaccgaagtaattccagcatagcggggaagatgttgaccaaggtggagaagaatcacgaaaaggagaagtcacagcacctagaaggcagcgcctcctcttcactctcctctgattagatgaaactgttaccttaccctaaacacagtatttctttttaacttttttatttgtaaactaataaaggtaatcacagccaccaacattccaagctaccctgggtacctttgtgcagtagaagctagtgagcatgtgagcaagcggtgtgcacacggagactcatcgttataatttactatctgccaagagtagaaagaaaggctggggatatttgggttggcttggttttgattttttgcttgtttgtttgttttgtactaaaacagtattatcttttgaatatcgtagggacataagtatatacatgttatccaatcaagatggctagaatggtgcctttctgagtgtctaaaacttgacacccctggtaaatctttcaacacacttccactgcctgcgtaatgaagttttgattcatttttaaccactggaatttttcaatgccgtcattttcagttagatgattttgcactttgagattaaaatgccatgtctatttgattagtcttatttttttatttttacaggcttatcagtctcactgttggctgtcattgtgacaaagtcaaataaacccccaaggacgacacacagtatggatcacatattgtttgacattaagcttttgccagaaaatgttgcatgtgttttacctcgacttgctaaaatcgattagcagaaaggcatggctaataatgttggtggtgaaaataaataaataagtaaacaaaa

SEQ ID NO: 187258 - DNA, 4697 bp, Homo sapiens
  Payload ID: 16871
  Gene Symbol: SULF1
  Gene Name: sulfatase 1
  Uniprot ID: Q8IWU6
  ENST ID: ENST00000419716
  CDS Start-End: 562-3177
gtgatgataataatacgcgggcttatataaccgtcttcatcttgcgagcacttcgcagaccgtcgctaatgaatcttggggccggtgtcgggccggggcggcttgatcggcaactaggaaaccccaggcgcagaggccaggagcgagggcagcgaggatcagaggccaggccttcccggctgccggcgctcctcggaggtcagggcagatgaggaacatgactctcccccttcggaggaggaaggaagtcccgctgccaccttatctctgctcctctgcctcctccctgttcccagagctttttctctagagaagattttgaaggcggcttttgtgctgacggccacccaccatcatctaaagaagataaacttggcaaatgacatgcaggttcttcaaggcagaataattgcagaaaatcttcaaaggaccctatctgcagatgttctgaatacctctgagaatagagattgattattcaaccaggatacctaattcaagaactccagaaatcaggagacggagacattttgtcagttttgcaacattggaccaaatacaatgaagtattcttgctgtgctctggttttggctgtcctgggcacagaattgctgggaagcctctgttcgactgtcagatccccgaggttcagaggacggatacagcaggaacgaaaaaacatccgacccaacattattcttgtgcttaccgatgatcaagatgtggagctggggtccctgcaagtcatgaacaaaacgagaaagattatggaacatgggggggccaccttcatcaatgcctttgtgactacacccatgtgctgcccgtcacggtcctccatgctcaccgggaagtatgtgcacaatcacaatgtctacaccaacaacgagaactgctcttccccctcgtggcaggccatgcatgagcctcggacttttgctgtatatcttaacaacactggctacagaacagccttttttggaaaatacctcaatgaatataatggcagctacatcccccctgggtggcgagaatggcttggattaatcaagaattctcgcttctataattacactgtttgtcgcaatggcatcaaagaaaagcatggatttgattatgcaaaggactacttcacagacttaatcactaacgagagcattaattacttcaaaatgtctaagagaatgtatccccataggcccgttatgatggtgatcagccacgctgcgccccacggccccgaggactcagccccacagttttctaaactgtaccccaatgcttcccaacacataactcctagttataactatgcaccaaatatggataaacactggattatgcagtacacaggaccaatgctgcccatccacatggaatttacaaacattctacagcgcaaaaggctccagactttgatgtcagtggatgattctgtggagaggctgtataacatgctcgtggagacgggggagctggagaatacttacatcatttacaccgccgaccatggttaccatattgggcagtttggactggtcaaggggaaatccatgccatatgactttgatattcgtgtgcctttttttattcgtggtccaagtgtagaaccaggatcaatagtcccacagatcgttctcaacattgacttggcccccacgatcctggatattgctgggctcgacacacctcctgatgtggacggcaagtctgtcctcaaacttctggacccagaaaagccaggtaacaggtttcgaacaaacaagaaggccaaaatttggcgtgatacattcctagtggaaagaggcaaatttctacgtaagaaggaagaatccagcaagaatatccaacagtcaaatcacttgcccaaatatgaacgggtcaaagaactatgccagcaggccaggtaccagacagcctgtgaacaaccggggcagaagtggcaatgcattgaggatacatctggcaagcttcgaattcacaagtgtaaaggacccagtgacctgctcacagtccggcagagcacgcggaacctctacgctcgcggcttccatgacaaagacaaagagtgcagttgtagggagtctggttaccgtgccagcagaagccaaagaaagagtcaacggcaattcttgagaaaccaggggactccaaagtacaagcccagatttgtccatactcggcagacacgttccttgtccgtcgaatttgaaggtgaaatatatgacataaatctggaagaagaagaagaattgcaagtgttgcaaccaagaaacattgctaagcgtcatgatgaaggccacaaggggccaagagatctccaggcttccagtggtggcaacaggggcaggatgctggcagatagcagcaacgccgtgggcccacctaccactgtccgagtgacacacaagtgttttattcttcccaatgactctatccattgtgagagagaactgtaccaatcggccagagcgtggaaggaccataaggcatacattgacaaagagattgaagctctgcaagataaaattaagaatttaagagaagtgagaggacatctgaagagaaggaagcctgaggaatgtagctgcagtaaacaaagctattacaataaagagaaaggtgtaaaaaagcaagagaaattaaagagccatcttcacccattcaaggaggctgctcaggaagtagatagcaaactgcaacttttcaaggagaacaaccgtaggaggaagaaggagaggaaggagaagagacggcagaggaagggggaagagtgcagcctgcctggcctcacttgcttcacgcatgacaacaaccactggcagacagccccgttctggaacctgggatctttctgtgcttgcacgagttctaacaataacacctactggtgtttgcgtacagttaatgagacgcataattttcttttctgtgagtttgctactggctttttggagtattttgatatgaatacagatccttatcagctcacaaatacagtgcacacggtagaacgaggcattttgaatcagctacacgtacaactaatggagctcagaagctgtcaaggatataagcagtgcaacccaagacctaagaatcttgatgttggaaataaagatggaggaagctatgacctacacagaggacagttatgggatggatgggaaggttaatcagccccgtctcactgcagacatcaactggcaaggcctagaggagctacacagtgtgaatgaaaacatctatgagtacagacaaaactacagacttagtctggtggactggactaattacttgaaggatttagatagagtatttgcactgctgaagagtcactatgagcaaaataaaacaaataagactcaaactgctcaaagtgacgggttcttggttgtctctgctgagcacgctgtgtcaatggagatggcctctgctgactcagatgaagacccaaggcataaggttgggaaaacacctcatttgaccttgccagctgaccttcaaaccctgcatttgaaccgaccaacattaagtccagagagtaaacttgaatggaataacgacattccagaagttaatcatttgaattctgaacactggagaaaaaccgaaaaatggacggggcatgaagagactaatcatctggaaaccgatttcagtggcgatggcatgacagagctagagctcgggcccagccccaggctgcagcccattcgcaggcacccgaaagaacttccccagtatggtggtcctggaaaggacatttttgaagatcaactatatcttcctgtgcattccgatggaatttcagttcatcagatgttcaccatggccaccgcagaacaccgaagtaattccagcatagcggggaagatgttgaccaaggtggagaagaatcacgaaaaggagaagtcacagcacctagaaggcagcgcctcctcttcactctcctctgattagatgaaactgttaccttaccctaaacacagtatttctttttaacttttttatttgtaaactaataaaggtaatcacagccaccaacattccaagctaccctgggtacctttgtgcagtagaagctagtgagcatgtgagcaagcggtgtgcacacggagactcatcgttataatttactatctgccaagagtagaaagaaaggctggggatatttgggttggcttggttttgattttttgcttgtttgtttgttttgtactaaaacagtattatcttttgaatatcgtagggacataagtatatacatgttatccaatcaagatggctagaatggtgcctttctgagtgtctaaaacttgacacccctggtaaatctttcaacacacttccactgcctgcgtaatgaagttttgattcatttttaaccactggaatttttcaatgccgtcattttcagttagatgattttgcactttgagattaaaatgccatgtctatttgattagtcttatttttttatttttacaggcttatcagtctcactgttggctgtcattgtgacaaagtcaaataaacccccaaggacgacacacagtatggatcacatattgtttgacattaagcttttgccagaaaatgttgcatgtgttttacctcgacttgctaaaatcgattagcagaaaggcatggctaataatgttggtggtgaaaataaataaataagtaaacaaaa

SEQ ID NO: 187259 - DNA, 5551 bp, Homo sapiens
  Payload ID: 16871
  Gene Symbol: SULF1
  Gene Name: sulfatase 1
  Uniprot ID: Q8IWU6
  ENST ID: ENST00000458141
  CDS Start-End: 556-3171
aggttacttgactgggagttctcagacctccagtttcagccctgccctcagcctccaatccgtaagagacacccagccccagcaattggattgggcagcccgtcttgacacaccactgtgctgagtgcttgaggacgtgtttcaacagatggttggggttagtgtgtgtcatcacattcgagtggggattaagagaaggaaggctgccttgctggagctgtgtggtcttctccaagtgagagtcgcaggcaatagaactactttgcttttggaggaaaaggaggaattcattttcagcagacacaagaaaagcagtttttttttcaggtgctgacggccacccaccatcatctaaagaagataaacttggcaaatgacatgcaggttcttcaaggcagaataattgcagaaaatcttcaaaggaccctatctgcagatgttctgaatacctctgagaatagagattgattattcaaccaggatacctaattcaagaactccagaaatcaggagacggagacattttgtcagttttgcaacattggaccaaatacaatgaagtattcttgctgtgctctggttttggctgtcctgggcacagaattgctgggaagcctctgttcgactgtcagatccccgaggttcagaggacggatacagcaggaacgaaaaaacatccgacccaacattattcttgtgcttaccgatgatcaagatgtggagctggggtccctgcaagtcatgaacaaaacgagaaagattatggaacatgggggggccaccttcatcaatgcctttgtgactacacccatgtgctgcccgtcacggtcctccatgctcaccgggaagtatgtgcacaatcacaatgtctacaccaacaacgagaactgctcttccccctcgtggcaggccatgcatgagcctcggacttttgctgtatatcttaacaacactggctacagaacagccttttttggaaaatacctcaatgaatataatggcagctacatcccccctgggtggcgagaatggcttggattaatcaagaattctcgcttctataattacactgtttgtcgcaatggcatcaaagaaaagcatggatttgattatgcaaaggactacttcacagacttaatcactaacgagagcattaattacttcaaaatgtctaagagaatgtatccccataggcccgttatgatggtgatcagccacgctgcgccccacggccccgaggactcagccccacagttttctaaactgtaccccaatgcttcccaacacataactcctagttataactatgcaccaaatatggataaacactggattatgcagtacacaggaccaatgctgcccatccacatggaatttacaaacattctacagcgcaaaaggctccagactttgatgtcagtggatgattctgtggagaggctgtataacatgctcgtggagacgggggagctggagaatacttacatcatttacaccgccgaccatggttaccatattgggcagtttggactggtcaaggggaaatccatgccatatgactttgatattcgtgtgcctttttttattcgtggtccaagtgtagaaccaggatcaatagtcccacagatcgttctcaacattgacttggcccccacgatcctggatattgctgggctcgacacacctcctgatgtggacggcaagtctgtcctcaaacttctggacccagaaaagccaggtaacaggtttcgaacaaacaagaaggccaaaatttggcgtgatacattcctagtggaaagaggcaaatttctacgtaagaaggaagaatccagcaagaatatccaacagtcaaatcacttgcccaaatatgaacgggtcaaagaactatgccagcaggccaggtaccagacagcctgtgaacaaccggggcagaagtggcaatgcattgaggatacatctggcaagcttcgaattcacaagtgtaaaggacccagtgacctgctcacagtccggcagagcacgcggaacctctacgctcgcggcttccatgacaaagacaaagagtgcagttgtagggagtctggttaccgtgccagcagaagccaaagaaagagtcaacggcaattcttgagaaaccaggggactccaaagtacaagcccagatttgtccatactcggcagacacgttccttgtccgtcgaatttgaaggtgaaatatatgacataaatctggaagaagaagaagaattgcaagtgttgcaaccaagaaacattgctaagcgtcatgatgaaggccacaaggggccaagagatctccaggcttccagtggtggcaacaggggcaggatgctggcagatagcagcaacgccgtgggcccacctaccactgtccgagtgacacacaagtgttttattcttcccaatgactctatccattgtgagagagaactgtaccaatcggccagagcgtggaaggaccataaggcatacattgacaaagagattgaagctctgcaagataaaattaagaatttaagagaagtgagaggacatctgaagagaaggaagcctgaggaatgtagctgcagtaaacaaagctattacaataaagagaaaggtgtaaaaaagcaagagaaattaaagagccatcttcacccattcaaggaggctgctcaggaagtagatagcaaactgcaacttttcaaggagaacaaccgtaggaggaagaaggagaggaaggagaagagacggcagaggaagggggaagagtgcagcctgcctggcctcacttgcttcacgcatgacaacaaccactggcagacagccccgttctggaacctgggatctttctgtgcttgcacgagttctaacaataacacctactggtgtttgcgtacagttaatgagacgcataattttcttttctgtgagtttgctactggctttttggagtattttgatatgaatacagatccttatcagctcacaaatacagtgcacacggtagaacgaggcattttgaatcagctacacgtacaactaatggagctcagaagctgtcaaggatataagcagtgcaacccaagacctaagaatcttgatgttggaaataaagatggaggaagctatgacctacacagaggacagttatgggatggatgggaaggttaatcagccccgtctcactgcagacatcaactggcaaggcctagaggagctacacagtgtgaatgaaaacatctatgagtacagacaaaactacagacttagtctggtggactggactaattacttgaaggatttagatagagtatttgcactgctgaagagtcactatgagcaaaataaaacaaataagactcaaactgctcaaagtgacgggttcttggttgtctctgctgagcacgctgtgtcaatggagatggcctctgctgactcagatgaagacccaaggcataaggttgggaaaacacctcatttgaccttgccagctgaccttcaaaccctgcatttgaaccgaccaacattaagtccagagagtaaacttgaatggaataacgacattccagaagttaatcatttgaattctgaacactggagaaaaaccgaaaaatggacggggcatgaagagactaatcatctggaaaccgatttcagtggcgatggcatgacagagctagagctcgggcccagccccaggctgcagcccattcgcaggcacccgaaagaacttccccagtatggtggtcctggaaaggacatttttgaagatcaactatatcttcctgtgcattccgatggaatttcagttcatcagatgttcaccatggccaccgcagaacaccgaagtaattccagcatagcggggaagatgttgaccaaggtggagaagaatcacgaaaaggagaagtcacagcacctagaaggcagcgcctcctcttcactctcctctgattagatgaaactgttaccttaccctaaacacagtatttctttttaacttttttatttgtaaactaataaaggtaatcacagccaccaacattccaagctaccctgggtacctttgtgcagtagaagctagtgagcatgtgagcaagcggtgtgcacacggagactcatcgttataatttactatctgccaagagtagaaagaaaggctggggatatttgggttggcttggttttgattttttgcttgtttgtttgttttgtactaaaacagtattatcttttgaatatcgtagggacataagtatatacatgttatccaatcaagatggctagaatggtgcctttctgagtgtctaaaacttgacacccctggtaaatctttcaacacacttccactgcctgcgtaatgaagttttgattcatttttaaccactggaatttttcaatgccgtcattttcagttagatgattttgcactttgagattaaaatgccatgtctatttgattagtcttatttttttatttttacaggcttatcagtctcactgttggctgtcattgtgacaaagtcaaataaacccccaaggacgacacacagtatggatcacatattgtttgacattaagcttttgccagaaaatgttgcatgtgttttacctcgacttgctaaaatcgattagcagaaaggcatggctaataatgttggtggtgaaaataaataaataagtaaacaaaatgaagattgcctgctctctctgtgcctagcctcaaagcgttcatcatacatcatacctttaagattgctatattttgggttattttcttgacaggagaaaaagatctaaagatcttttattttcatcttttttggttttcttggcatgactaagaagcttaaatgttgataaaatatgactagttttgaatttacaccaagaacttctcaataaaagaaaatcatgaatgctccacaatttcaacataccacaagagaagttaatttcttaacattgtgttctatgattatttgtaagaccttcaccaagttctgatatcttttaaagacatagttcaaaattgcttttgaaaatctgtattcttgaaaatatccttgttgtgtattaggtttttaaataccagctaaaggattacctcactgagtcatcagtaccctcctattcagctccccaagatgatgtgtttttgcttaccctaagagaggttttcttcttatttttagataattcaagtgcttagataaattatgttttctttaagtgtttatggtaaactcttttaaagaaaatttaatatgttatagctgaatctttttggtaactttaaatctttatcatagactctgtacatatgttcaaattagctgcttgcctgatgtgtgtatcatcggtgggatgacagaacaaacatatttatgatcatgaataatgtgctttgtaaaaagatttcaagttattaggaagcatactctgttttttaatcatgtataatattccatgatacttttatagaacaattctggcttcaggaaagtctagaagcaatatttcttcaaataaaaggtgtttaaactttttt

SEQ ID NO: 187260 - DNA, 593 bp, Homo sapiens
  Payload ID: 16871
  Gene Symbol: SULF1
  Gene Name: sulfatase 1
  ENST ID: ENST00000534179
  CDS Start-End: 425-593
cctgtgctatctgtgccttaccagtctcaccaacaataagcctggtgactgacaatcgagagggggctctgtccacgtaggtgccggcacaagctgaggacatgagtgggacagaggaaccagccttgcacggaggaagcaccttttccttctggtgattgattgatgggggacagtgaggaggttttcagagactggaaaaaattgtcccagtcacttactatgaagtctttgtcagcagaaaagactctccggggtagagaatgatataatgcagatgacaaatgacaggaccctatctgcagatgttctgaatacctctgagaatagagattgattattcaaccaggatacctaattcaagaactccagaaatcaggagacggagacattttgtcagttttgcaacattggaccaaatacaatgaagtattcttgctgtgctctggttttggctgtcctgggcacagaattgctgggaagcctctgttcgactgtcagatccccgaggttcagaggacggatacagcaggaacgaaaaaacatccgacccaacattattcttgtgcttaccgatgatcaagatgtggagc

SEQ ID NO: 187261 - DNA, 630 bp, Homo sapiens
  Payload ID: 16871
  Gene Symbol: SULF1
  Gene Name: sulfatase 1
  ENST ID: ENST00000525999
  CDS Start-End: 115-630
ggagtttggatttcattttagtctcaccgtctccgtttttctctgactgcccagaactccagaaatcaggagacggagacattttgtcagttttgcaacattggaccaaatacaatgaagtattcttgctgtgctctggttttggctgtcctgggcacagaattgctgggaagcctctgttcgactgtcagatccccgaggttcagaggacggatacagcaggaacgaaaaaacatccgacccaacattattcttgtgcttaccgatgatcaagatgtggagctggggtccctgcaagtcatgaacaaaacgagaaagattatggaacatgggggggccaccttcatcaatgcctttgtgactacacccatgtgctgcccgtcacggtcctccatgctcaccgggaagtatgtgcacaatcacaatgtctacaccaacaacgagaactgctcttccccctcgtggcaggccatgcatgagcctcggacttttgctgtatatcttaacaacactggctacagaacagccttttttggaaaatacctcaatgaatataatggcagctacatcccccctgggtggcgagaatggcttggattaatcaagaattctcgcttctataattacact

SEQ ID NO: 187262 - DNA, 585 bp, Homo sapiens
  Payload ID: 16871
  Gene Symbol: SULF1
  Gene Name: sulfatase 1
  ENST ID: ENST00000529134
  CDS Start-End: 332-585
tctcttttagcatagttttgaatggaatgctagcacggcacacttgtcaaagccagttgttgctgtcctatcaatgctgctattgtacggctgacagatgacggtgctgacggccacccaccatcatctaaagaagataaacttggcaaatgacatgcaggttcttcaaggcagaataattgcagaaaatcttcaaaggaccctatctgcagatgttctgaatacctctgagaatagagattgattattcaaccaggatacctaattcaagaactccagaaatcaggagacggagacattttgtcagttttgcaacattggaccaaatacaatgaagtattcttgctgtgctctggttttggctgtcctgggcacagaattgctgggaagcctctgttcgactgtcagatccccgaggttcagaggacggatacagcaggaacgaaaaaacatccgacccaacattattcttgtgcttaccgatgatcaagatgtggagctggggtccctgcaagtcatgaacaaaacgagaaagattatggaacatgggggggccaccttcatcaatgcctttgtgactacacc

SEQ ID NO: 187263 - DNA, 2010 bp, Homo sapiens
  Payload ID: 16871
  Gene Symbol: SULF1
  Gene Name: sulfatase 1
  ENST ID: ENST00000531512
  CDS Start-End: 1-394
aagagaagtgagaggacatctgaagagaaggaagcctgaggaatgtagctgcagtaaacaaagctattacaataaagagaaaggtgtaaaaaagcaagagaaattaaagagccatcttcacccattcaaggaggctgctcaggaagtagatagcaaactgcaacttttcaaggagaacaaccgtaggaggaagaaggagaggaaggagaagagacggcagaggaagggggaagagtgcagcctgcctggcctcacttgcttcacgcatgacaacaaccactggcagacagccccgttctggaaccctcacaaatacagtgcacacggtagaacgaggcattttgaatcagctacacgtacaactaatggagctcagaagctgtcaaggatataagcagtgcaacccaagacctaagaatcttgatgttggaaataaagatggaggaagctatgacctacacagaggacagttatgggatggatgggaaggttaatcagccccgtctcactgcagacatcaactggcaaggcctagaggagctacacagtgtgaatgaaaacatctatgagtacagacaaaactacagacttagtctggtggactggactaattacttgaaggatttagatagagtatttgcactgctgaagagtcactatgagcaaaataaaacaaataagactcaaactgctcaaagtgacgggttcttggttgtctctgctgagcacgctgtgtcaatggagatggcctctgctgactcagatgaagacccaaggcataaggttgggaaaacacctcatttgaccttgccagctgaccttcaaaccctgcatttgaaccgaccaacattaagtccagagagtaaacttgaatggaataacgacattccagaagttaatcatttgaattctgaacactggagaaaaaccgaaaaatggacggggcatgaagagactaatcatctggaaaccgatttcagtggcgatggcatgacagagctagagctcgggcccagccccaggctgcagcccattcgcaggcacccgaaagaacttccccagtatggtggtcctggaaaggacatttttgaagatcaactatatcttcctgtgcattccgatggaatttcagttcatcagatgttcaccatggccaccgcagaacaccgaagtaattccagcatagcggggaagatgttgaccaaggtggagaagaatcacgaaaaggagaagtcacagcacctagaaggcagcgcctcctcttcactctcctctgattagatgaaactgttaccttaccctaaacacagtatttctttttaacttttttatttgtaaactaataaaggtaatcacagccaccaacattccaagctaccctgggtacctttgtgcagtagaagctagtgagcatgtgagcaagcggtgtgcacacggagactcatcgttataatttactatctgccaagagtagaaagaaaggctggggatatttgggttggcttggttttgattttttgcttgtttgtttgttttgtactaaaacagtattatcttttgaatatcgtagggacataagtatatacatgttatccaatcaagatggctagaatggtgcctttctgagtgtctaaaacttgacacccctggtaaatctttcaacacacttccactgcctgcgtaatgaagttttgattcatttttaaccactggaatttttcaatgccgtcattttcagttagatgattttgcactttgagattaaaatgccatgtctatttgattagtcttatttttttatttttacaggcttatcagtctcactgttggctgtcattgtgacaaagtcaaataaacccccaaggacgacacacagtatggatcacatattgtttgacattaagcttttgccagaaaatgttgcatgtgttttacctcgacttgctaaaatcgattagcagaaaggcatggctaataatgttggtggtgaaaataaataaataagtaaac

SEQ ID NO: 187264 - DNA, 806 bp, Homo sapiens
  Payload ID: 16871
  Gene Symbol: SULF1
  Gene Name: sulfatase 1
  ENST ID: ENST00000525061
  CDS Start-End: 718-806
aggttacttgactgggagttctcagacctccagtttcagccctgccctcagcctccaatccgtaagagacacccagccccagcaattggattgggcagcccgtcttgacacaccactgtgctgagtgcttgaggacgtgtttcaacagatggttggggttagtgtgtgtcatcacattcgagtggggattaagagaaggaaggctgccttgctggagctgtgtggtcttctccaagtgagagtcgcaggcaatagaactactttgcttttggaggaaaaggaggaattcattttcagcagacacaagaaaagcagtttttttttcagggattcttcacttctcttgaacaaggaactcactcagagactaacacaaaggaagtaatttcttacctggtcattatttagtctacaataagttcatccttcttcagtgtgaccagtaaattcttcccatactcttgaagagagcataattggaatggagaggtgctgacggccacccaccatcatctaaagaagataaacttggcaaatgacatgcaggttcttcaaggcagaataattgcagaaaatcttcaaaggaccctatctgcagatgttctgaatacctctgagaatagagattgattattcaaccaggatacctaattcaagaactccagaaatcaggagacggagacattttgtcagttttgcaacattggaccaaatacaatgaagtattcttgctgtgctctggttttggctgtcctgggcacagaattgctgggaagcctctgttcgactgtcagatccccgaggtt

SEQ ID NO: 187265 - DNA, 460 bp, Homo sapiens
  Payload ID: 16871
  Gene Symbol: SULF1
  Gene Name: sulfatase 1
  ENST ID: ENST00000528783
  CDS Start-End: 231-460
atataatatgctgttgcaagagactacttcagatcgaaaatctgtttttaaaatcattgactgatatttcctttgtatttttttctcccccttccaggaccctatctgcagatgttctgaatacctctgagaatagagattgattattcaaccaggatacctaattcaagaactccagaaatcaggagacggagacattttgtcagttttgcaacattggaccaaatacaatgaagtattcttgctgtgctctggttttggctgtcctgggcacagaattgctgggaagcctctgttcgactgtcagatccccgaggttcagaggacggatacagcaggaacgaaaaaacatccgacccaacattattcttgtgcttaccgatgatcaagatgtggagctggggtccctgcaagtcatgaacaaaacgagaaagattatggaacatgggggggccacctt

SEQ ID NO: 187266 - DNA, 3381 bp, Homo sapiens
  Payload ID: 16871
  Gene Symbol: SULF1
  Gene Name: sulfatase 1
  ENST ID: ENST00000616868
  CDS Start-End: 1372-3381
gtgatgataataatacgcgggcttatataaccgtcttcatcttgcgagcacttcgcagaccgtcgctaatgaatcttggggccggtgtcgggccggggcggcttgatcggcaactaggaaaccccaggcgcagaggccaggagcgagggcagcgaggatcagaggccaggccttcccggctgccggcgctcctcggaggtcagggcagatgaggaacatgactctcccccttcggaggaggaaggaagtcccgctgccaccttatctctgctcctctgcctcctccctgttcccagagctttttctctagagaagattttgaaggcggcttttggattcttcacttctcttgaacaaggaactcactcagagactaacacaaaggaagtaatttcttacctggtcattatttagtctacaataagttcatccttcttcagtgtgaccagtaaattcttcccatactcttgaagagagcataattggaatggagaggtgctgacggccacccaccatcatctaaagaagataaacttggcaaatgacatgcaggttcttcaaggcagaataattgcagaaaatcttcaaaggaccctatctgcagatgttctgaatacctctgagaatagagattgattattcaaccaggatacctaattcaagaactccagaaatcaggagacggagacattttgtcagttttgcaacattggaccaaatacaatgaagtattcttgctgtgctctggttttggctgtcctgggcacagaattgctgggaagcctctgttcgactgtcagatccccgaggttcagaggacggatacagcaggaacgaaaaaacatccgacccaacattattcttgtgcttaccgatgatcaagatgtggagctggggtccctgcaagtcatgaacaaaacgagaaagattatggaacatgggggggccaccttcatcaatgcctttgtgactacacccatgtgctgcccgtcacggtcctccatgctcaccgggaagtatgtgcacaatcacaatgtctacaccaacaacgagaactgctcttccccctcgtggcaggccatgcatgagcctcggacttttgctgtatatcttaacaacactggctacagaacagccttttttggaaaatacctcaatgaatataatggcagctacatcccccctgggtggcgagaatggcttggattaatcaagaattctcgcttctataattacactgtttgtcgcaatggcatcaaagaaaagcatggatttgattatgcaaaggactacttcacagacttaatcactaacgagagcattaattacttcaaaatgtctaagagaatgtatccccataggcccgttatgatggtgatcagccacgctgcgccccacggccccgaggactcagccccacagttttctaaactgtaccccaatgcttcccaacacataactcctagttataactatgcaccaaatatggataaacactggattatgcagtacacaggaccaatgctgcccatccacatggaatttacaaacattctacagcgcaaaaggctccagactttgatgtcagtggatgattctgtggagaggctgtataacatgctcgtggagacgggggagctggagaatacttacatcatttacaccgccgaccatggttaccatattgggcagtttggactggtcaaggggaaatccatgccatatgactttgatattcgtgtgcctttttttattcgtggtccaagtgtagaaccaggatcaatagtcccacagatcgttctcaacattgacttggcccccacgatcctggatattgctgggctcgacacacctcctgatgtggacggcaagtctgtcctcaaacttctggacccagaaaagccaggtaacaggtttcgaacaaacaagaaggccaaaatttggcgtgatacattcctagtggaaagaggcaaatttctacgtaagaaggaagaatccagcaagaatatccaacagtcaaatcacttgcccaaatatgaacgggtcaaagaactatgccagcaggccaggtaccagacagcctgtgaacaaccggggcagaagtggcaatgcattgaggatacatctggcaagcttcgaattcacaagtgtaaaggacccagtgacctgctcacagtccggcagagcacgcggaacctctacgctcgcggcttccatgacaaagacaaagagtgcagttgtagggagtctggttaccgtgccagcagaagccaaagaaagagtcaacggcaattcttgagaaaccaggggactccaaagtacaagcccagatttgtccatactcggcagacacgttccttgtccgtcgaatttgaaggtgaaatatatgacataaatctggaagaagaagaagaattgcaagtgttgcaaccaagaaacattgctaagcgtcatgatgaaggccacaaggggccaagagatctccaggcttccagtggtggcaacaggggcaggatgctggcagatagcagcaacgccgtgggcccacctaccactgtccgagtgacacacaagtgttttattcttcccaatgactctatccattgtgagagagaactgtaccaatcggccagagcgtggaaggaccataaggcatacattgacaaagagattgaagctctgcaagataaaattaagaatttaagagaagtgagaggacatctgaagagaaggaagcctgaggaatgtagctgcagtaaacaaagctattacaataaagagaaaggtgtaaaaaagcaagagaaattaaagagccatcttcacccattcaaggaggctgctcaggaagtagatagcaaactgcaacttttcaaggagaacaaccgtaggaggaagaaggagaggaaggagaagagacggcagaggaagggggaagagtgcagcctgcctggcctcacttgcttcacgcatgacaacaaccactggcagacagccccgttctggaacctgggatctttctgtgcttgcacgagttctaacaataacacctactggtgtttgcgtacagttaatgagacgcataattttcttttctgtgagtttgctactggctttttggagtattttgatatgaatacagatccttatcagctcacaaatacagtgcacacggtagaacgaggcattttgaatcagctacacgtacaactaatggagctcagaagctgtcaaggatataagcagtgcaacccaagacctaagaatcttgatgttggaaataaagatggaggaagctatgacctacacagaatgttgctgttcctggtaccctgttcggcccctctaacctccagagctatggtctcagatgcttccttttag

SEQ ID NO: 187267 - DNA, 4915 bp, Homo sapiens
  Payload ID: 16872
  Gene Symbol: SULF2
  Gene Name: sulfatase 2
  Uniprot ID: Q8IWU5
  ENST ID: ENST00000359930
  CDS Start-End: 853-3465
cacttgagccgaagttaatttctcggggagttctcgggcgcgcacaggcagctcggtttgccctgcgattgagctgcgggtcgcggccggcgccggcctctccaatggcaaatgtgtgtggctggaggcgagcgcgaggctttcggcaaaggcagtcgagtgtttgcagaccggggcgagtcctgtgaaagcagataaaagaaaacatttattaacgtgtcattacgaggggagcgcccggccggggctgtcgcactccccgcggaacatttggctccctccagctccgagagaggagaagaagaaagcggaaaagaggcagattcacgtcgtttccagccaagtggacctgatcgatggccctcctgaatttatcacgatatttgatttattagcgatgccccctggtttgtgtgttacgcacacacacgtgcacacaaggctctggctcgcttccctccctcgtttccagctcctgggcgaatcccacatctgtttcaactctccgccgagggcgagcaggagcgagagtgtgtcgagtgagtgtgcgtctgtgtgtcccggcgagggtgcgcgctcggcgccgggagcgcggccagccgagtccggaggcatcgggaggtcgagagccgccgggaccccagctctgcgttcactgccccgtccggagctggacttcggggccggggccggggccgtgcgccggggacaggcagggccgggtcgcgggccgcgcgtcccccaggccggagatctgcgagtgaagagggacgagggaaaagaaacaaagccacagacgcaacttgagactcccgcatcccaaaagaagcaccagatcagcaaaaaaagaagatgggccccccgagcctcgtgctgtgcttgctgtccgcaactgtgttctccctgctgggtggaagctcggccttcctgtcgcaccaccgcctgaaaggcaggtttcagagggaccgcaggaacatccgccccaacatcatcctggtgctgacggacgaccaggatgtggagctgggttccatgcaggtgatgaacaagacccggcgcatcatggagcagggcggggcgcacttcatcaacgccttcgtgaccacacccatgtgctgcccctcacgctcctccatcctcactggcaagtacgtccacaaccacaacacctacaccaacaatgagaactgctcctcgccctcctggcaggcacagcacgagagccgcacctttgccgtgtacctcaatagcactggctaccggacagctttcttcgggaagtatcttaatgaatacaacggctcctacgtgccacccggctggaaggagtgggtcggactccttaaaaactcccgcttttataactacacgctgtgtcggaacggggtgaaagagaagcacggctccgactactccaaggattacctcacagacctcatcaccaatgacagcgtgagcttcttccgcacgtccaagaagatgtacccgcacaggccagtcctcatggtcatcagccatgcagccccccacggccctgaggattcagccccacaatattcacgcctcttcccaaacgcatctcagcacatcacgccgagctacaactacgcgcccaacccggacaaacactggatcatgcgctacacggggcccatgaagcccatccacatggaattcaccaacatgctccagcggaagcgcttgcagaccctcatgtcggtggacgactccatggagacgatttacaacatgctggttgagacgggcgagctggacaacacgtacatcgtatacaccgccgaccacggttaccacatcggccagtttggcctggtgaaagggaaatccatgccatatgagtttgacatcagggtcccgttctacgtgaggggccccaacgtggaagccggctgtctgaatccccacatcgtcctcaacattgacctggcccccaccatcctggacattgcaggcctggacatacctgcggatatggacgggaaatccatcctcaagctgctggacacggagcggccggtgaatcggtttcacttgaaaaagaagatgagggtctggcgggactccttcttggtggagagaggcaagctgctacacaagagagacaatgacaaggtggacgcccaggaggagaactttctgcccaagtaccagcgtgtgaaggacctgtgtcagcgtgctgagtaccagacggcgtgtgagcagctgggacagaagtggcagtgtgtggaggacgccacggggaagctgaagctgcataagtgcaagggccccatgcggctgggcggcagcagagccctctccaacctcgtgcccaagtactacgggcagggcagcgaggcctgcacctgtgacagcggggactacaagctcagcctggccggacgccggaaaaaactcttcaagaagaagtacaaggccagctatgtccgcagtcgctccatccgctcagtggccatcgaggtggacggcagggtgtaccacgtaggcctgggtgatgccgcccagccccgaaacctcaccaagcggcactggccaggggcccctgaggaccaagatgacaaggatggtggggacttcagtggcactggaggccttcccgactactcagccgccaaccccattaaagtgacacatcggtgctacatcctagagaacgacacagtccagtgtgacctggacctgtacaagtccctgcaggcctggaaagaccacaagctgcacatcgaccacgagattgaaaccctgcagaacaaaattaagaacctgagggaagtccgaggtcacctgaagaaaaagcggccagaagaatgtgactgtcacaaaatcagctaccacacccagcacaaaggccgcctcaagcacagaggctccagtctgcatcctttcaggaagggcctgcaagagaaggacaaggtgtggctgttgcgggagcagaagcgcaagaagaaactccgcaagctgctcaagcgcctgcagaacaacgacacgtgcagcatgccaggcctcacgtgcttcacccacgacaaccagcactggcagacggcgcctttctggacactggggcctttctgtgcctgcaccagcgccaacaataacacgtactggtgcatgaggaccatcaatgagactcacaatttcctcttctgtgaatttgcaactggcttcctagagtactttgatctcaacacagacccctaccagctgatgaatgcagtgaacacactggacagggatgtcctcaaccagctacacgtacagctcatggagctgaggagctgcaagggttacaagcagtgtaacccccggactcgaaacatggacctgggacttaaagatggaggaagctatgagcaatacaggcagtttcagcgtcgaaagtggccagaaatgaagagaccttcttccaaatcactgggacaactgtgggaaggctgggaaggttaagaaacaacagaggtggacctccaaaaacatagaggcatcacctgactgcacaggcaatgaaaaaccatgtgggtgatttccagcagacctgtggtattggccaggaggcctgagaaagcaagcacgcactctcagtcaacatgacagattctggaggataaccagcaggagcagagataacttcaggaagtccatttttgcccctgcttttgctttggattatacctcaccagctgcacaaaatgcattttttcgtatcaaaaagtcaccactaaccctcccccagaagctcacaaaggaaaacggagagagcgagcgagagagatttccttggaaatttctcccaagggcgaaagtcattggaatttttaaatcataggggaaaagcagtcctgttctaaatcctcttattcttttggtttgtcacaaagaaggaactaagaagcaggacagaggcaacgtggagaggctgaaaacagtgcagagacgtttgacaatgagtcagtagcacaaaagagatgacatttacctagcactataaaccctggttgcctctgaagaaactgccttcattgtatatatgtgactatttacatgtaatcaacatgggaacttttaggggaacctaataagaaatcccaattttcaggagtggtggtgtcaataaacgctctgtggccagtgtaaaagaaaatccctcgcagttgtggacatttctgttcctgtccagataccatttctcctagtatttctttgttatgtcccagaactgatgttttttttttaaggtactgaaaagaaatgaagttgatgtatgtcccaagttttgatgaaactgtatttgtaaaaaaaattttgtagtttaagtattgtcatacagtgttcaaaaccccagccaatgaccagcagttggtatgaagaacctttgacattttgtaaaaggccatttcttgggagttttttggtgtgtctgtttttttaaagtattcaagatactaccagtcaacatctttttggaagaaaatgccttgggtttagaagattttcttaaaaggggagtagatggttgtagattgactaaaaagtctaccatacttcaagggactacaggtaagtctcatagtataccagctttggtacttcattttttaaaaaagtattaatcaattgcaaagaaattcgccttggccaacccttctttgtgtatcaggtagtctaacctgatacaagtagttgacagatttcaactatcaatcaccagtccaacccatttctcatttaacagatgacggagataatccctaaaagcacccacatttgtttcaatgccccaaacaggccaaggctccctagcaactccctagtggcgttttttaacttctcagaaactgttaccattatttgaaataggcttccttaacctcctttacccttaacccaacagggattt

SEQ ID NO: 187268 - DNA, 814 bp, Homo sapiens
  Payload ID: 16872
  Gene Symbol: SULF2
  Gene Name: sulfatase 2
  ENST ID: ENST00000437955
  CDS Start-End: 248-814
ggggatgcagcagcggcagcggcggcggcggcggcggcagcggcagcggcggcgcggagtcccctgcgcccagcggcccggccgggctgcggcagaggcggcggcggcgccccgctccgggtgaggttgccggggccgtgcgcgctgatctgcgagtgaagagggacgagggaaaagaaacaaagccacagacgcaacttgagactcccgcatcccaaaagaagcaccagatcagcaaaaaaagaagatgggccccccgagcctcgtgctgtgcttgctgtccgcaactgtgttctccctgctgggtggaagctcggccttcctgtcgcaccaccgcctgaaaggcaggtttcagagggaccgcaggaacatccgccccaacatcatcctggtgctgacggacgaccaggatgtggagctgggttccatgcaggtgatgaacaagacccggcgcatcatggagcagggcggggcgcacttcatcaacgccttcgtgaccacacccatgtgctgcccctcacgctcctccatcctcactggcaagtacgtccacaaccacaacacctacaccaacaatgagaactgctcctcgccctcctggcaggcacagcacgagagccgcacctttgccgtgtacctcaatagcactggctaccggacagctttcttcgggaagtatcttaatgaatacaacggctcctacgtgccacccggctggaaggagtgggtcggactccttaaaaactcccgcttttataactacacgctgtgtcggaacggggtgaaagagaagcacggctccgactactccaag

SEQ ID NO: 187269 - DNA, 1550 bp, Homo sapiens
  Payload ID: 16872
  Gene Symbol: SULF2
  Gene Name: sulfatase 2
  ENST ID: ENST00000495544
  CDS Start-End: 1-623
gggaagtccgaggtcacctgaagaaaaagcggccagaagaatgtgactgtcacaaaatcagctaccacacccagcacaaaggccgcctcaagcacagaggctccagtctgcatcctttcaggaagggcctgcaagagaaggacaaggtgtggctgttgcgggagcagaagcgcaagaagaaactccgcaagctgctcaagcgcctgcagaacaacgacacgtgcagcatgccaggcctcacgtgcttcacccacgacaaccagcactggcagacggcgcctttctggacactggggcctttctgtgcctgcaccagcgccaacaataacacgtactggtgcatgaggaccatcaatgagactcacaatttcctcttctgtgaatttgcaactggcttcctagagtactttgatctcaacacagacccctaccagctgatgaatgcagtgaacacactggacagggatgtcctcaaccagctacacgtacagctcatggagctgaggagctgcaagggttacaagcagtgtaacccccggactcgaaacatggacctgggacttaaagatggaggaagctatgagcaatacaggggacaactgtgggaaggctgggaaggttaagaaacaacagaggtggacctccaaaaacatagaggcatcacctgactgcacaggcaatgaaaaaccatgtgggtgatttccagcagacctgtggtattggccaggaggcctgagaaagcaagcacgcactctcagtcaacatgacagattctggaggataaccagcaggagcagagataacttcaggaagtccatttttgcccctgcttttgctttggattatacctcaccagctgcacaaaatgcattttttcgtatcaaaaagtcaccactaaccctcccccagaagctcacaaaggaaaacggagagagcgagcgagagagatttccttggaaatttctcccaagggcgaaagtcattggaatttttaaatcataggggaaaagcagtcctgttctaaatcctcttattcttttggtttgtcacaaagaaggaactaagaagcaggacagaggcaacgtggagaggctgaaaacagtgcagagacgtttgacaatgagtcagtagcacaaaagagatgacatttacctagcactataaaccctggttgcctctgaagaaactgccttcattgtatatatgtgactatttacatgtaatcaacatgggaacttttaggggaacctaataagaaatcccaattttcaggagtggtggtgtcaataaacgctctgtggccagtgtaaaagaaaatccctcgcagttgtggacatttctgttcctgtccagataccatttctcctagtatttctttgttatgtcccagaactgatgttttttttttaaggtactgaaaagaaatgaagttgatgtatgtcccaagttttgatgaaactgtatttgtaaaaaaaattttgtagtttaagtattgtcatacagtgttcaaaaccccagccaatgaccagcagttggtatgaagaaccttt

SEQ ID NO: 187270 - DNA, 4238 bp, Homo sapiens
  Payload ID: 16872
  Gene Symbol: SULF2
  Gene Name: sulfatase 2
  Uniprot ID: Q8IWU5
  ENST ID: ENST00000484875
  CDS Start-End: 670-3282
gggccatttctggacaacagctgctattttcacttgagccgaagttaatttctcggggagttctcgggcgcgcacaggcagctcggtttgccctgcgattgagctgcgggtcgcggccggcgccggcctctccaatggcaaatgtgtgtggctggaggcgagcgcgaggctttcggcaaaggcagtcgagtgtttgcagaccggggcgagtcctgtgaaagcagataaaagaaaacatttattaacgtgtcattacgaggggagcgcccggccggggctgtcgcactccccgcggaacatttggctccctccagctccgagagaggagaagaagaaagcggaaaagaggcagattcacgtcgtttccagccaagtggacctgatcgatggccctcctgaatttatcacgatatttgatttattagcgatgccccctggtttgtgtgttacgcacacacacgtgcacacaaggctctggctcgcttccctccctcgtttccagctcctgggcgaatcccacatctgtttcaactctccgccgagggcgagcaggagcgagagtgtgtcgaatctgcgagtgaagagggacgagggaaaagaaacaaagccacagacgcaacttgagactcccgcatcccaaaagaagcaccagatcagcaaaaaaagaagatgggccccccgagcctcgtgctgtgcttgctgtccgcaactgtgttctccctgctgggtggaagctcggccttcctgtcgcaccaccgcctgaaaggcaggtttcagagggaccgcaggaacatccgccccaacatcatcctggtgctgacggacgaccaggatgtggagctgggttccatgcaggtgatgaacaagacccggcgcatcatggagcagggcggggcgcacttcatcaacgccttcgtgaccacacccatgtgctgcccctcacgctcctccatcctcactggcaagtacgtccacaaccacaacacctacaccaacaatgagaactgctcctcgccctcctggcaggcacagcacgagagccgcacctttgccgtgtacctcaatagcactggctaccggacagctttcttcgggaagtatcttaatgaatacaacggctcctacgtgccacccggctggaaggagtgggtcggactccttaaaaactcccgcttttataactacacgctgtgtcggaacggggtgaaagagaagcacggctccgactactccaaggattacctcacagacctcatcaccaatgacagcgtgagcttcttccgcacgtccaagaagatgtacccgcacaggccagtcctcatggtcatcagccatgcagccccccacggccctgaggattcagccccacaatattcacgcctcttcccaaacgcatctcagcacatcacgccgagctacaactacgcgcccaacccggacaaacactggatcatgcgctacacggggcccatgaagcccatccacatggaattcaccaacatgctccagcggaagcgcttgcagaccctcatgtcggtggacgactccatggagacgatttacaacatgctggttgagacgggcgagctggacaacacgtacatcgtatacaccgccgaccacggttaccacatcggccagtttggcctggtgaaagggaaatccatgccatatgagtttgacatcagggtcccgttctacgtgaggggccccaacgtggaagccggctgtctgaatccccacatcgtcctcaacattgacctggcccccaccatcctggacattgcaggcctggacatacctgcggatatggacgggaaatccatcctcaagctgctggacacggagcggccggtgaatcggtttcacttgaaaaagaagatgagggtctggcgggactccttcttggtggagagaggcaagctgctacacaagagagacaatgacaaggtggacgcccaggaggagaactttctgcccaagtaccagcgtgtgaaggacctgtgtcagcgtgctgagtaccagacggcgtgtgagcagctgggacagaagtggcagtgtgtggaggacgccacggggaagctgaagctgcataagtgcaagggccccatgcggctgggcggcagcagagccctctccaacctcgtgcccaagtactacgggcagggcagcgaggcctgcacctgtgacagcggggactacaagctcagcctggccggacgccggaaaaaactcttcaagaagaagtacaaggccagctatgtccgcagtcgctccatccgctcagtggccatcgaggtggacggcagggtgtaccacgtaggcctgggtgatgccgcccagccccgaaacctcaccaagcggcactggccaggggcccctgaggaccaagatgacaaggatggtggggacttcagtggcactggaggccttcccgactactcagccgccaaccccattaaagtgacacatcggtgctacatcctagagaacgacacagtccagtgtgacctggacctgtacaagtccctgcaggcctggaaagaccacaagctgcacatcgaccacgagattgaaaccctgcagaacaaaattaagaacctgagggaagtccgaggtcacctgaagaaaaagcggccagaagaatgtgactgtcacaaaatcagctaccacacccagcacaaaggccgcctcaagcacagaggctccagtctgcatcctttcaggaagggcctgcaagagaaggacaaggtgtggctgttgcgggagcagaagcgcaagaagaaactccgcaagctgctcaagcgcctgcagaacaacgacacgtgcagcatgccaggcctcacgtgcttcacccacgacaaccagcactggcagacggcgcctttctggacactggggcctttctgtgcctgcaccagcgccaacaataacacgtactggtgcatgaggaccatcaatgagactcacaatttcctcttctgtgaatttgcaactggcttcctagagtactttgatctcaacacagacccctaccagctgatgaatgcagtgaacacactggacagggatgtcctcaaccagctacacgtacagctcatggagctgaggagctgcaagggttacaagcagtgtaacccccggactcgaaacatggacctgggacttaaagatggaggaagctatgagcaatacaggcagtttcagcgtcgaaagtggccagaaatgaagagaccttcttccaaatcactgggacaactgtgggaaggctgggaaggttaagaaacaacagaggtggacctccaaaaacatagaggcatcacctgactgcacaggcaatgaaaaaccatgtgggtgatttccagcagacctgtggtattggccaggaggcctgagaaagcaagcacgcactctcagtcaacatgacagattctggaggataaccagcaggagcagagataacttcaggaagtccatttttgcccctgcttttgctttggattatacctcaccagctgcacaaaatgcattttttcgtatcaaaaagtcaccactaaccctcccccagaagctcacaaaggaaaacggagagagcgagcgagagagatttccttggaaatttctcccaagggcgaaagtcattggaatttttaaatcataggggaaaagcagtcctgttctaaatcctcttattcttttggtttgtcacaaagaaggaactaagaagcaggacagaggcaacgtggagaggctgaaaacagtgcagagacgtttgacaatgagtcagtagcacaaaagagatgacatttacctagcactataaaccctggttgcctctgaagaaactgccttcattgtatatatgtgactatttacatgtaatcaacatgggaacttttaggggaacctaataagaaatcccaattttcaggagtggtggtgtcaataaacgctctgtggccagtgtaaaagaaaatccctcgcagttgtggacatttctgttcctgtccagataccatttctcctagtatttctttgttatgtcccagaactgatgttttttttttaaggtactgaaaagaaatgaagttgatgtatgtcccaagttttgatgaaactgtatttgtaaaaaaaattttgtagtttaagtattgtcatacagtgttcaaaaccccagccaatgaccagcagttggtatgaagaacctttgacattttgtaaaaggccatttcttggga

SEQ ID NO: 187271 - DNA, 3905 bp, Homo sapiens
  Payload ID: 16872
  Gene Symbol: SULF2
  Gene Name: sulfatase 2
  Uniprot ID: Q8IWU5
  ENST ID: ENST00000467815
  CDS Start-End: 608-3211
ctcgggcgcgcacaggcagctcggtttgccctgcgattgagctgcgggtcgcggccggcgccggcctctccaatggcaaatgtgtgtggctggaggcgagcgcgaggctttcggcaaaggcagtcgagtgtttgcagaccggggcgagtcctgtgaaagcagataaaagaaaacatttattaacgtgtcattacgaggggagcgcccggccggggctgtcgcactccccgcggaacatttggctccctccagctccgagagaggagaagaagaaagcggaaaagaggcagattcacgtcgtttccagccaagtggacctgatcgatggccctcctgaatttatcacgatatttgatttattagcgatgccccctggtttgtgtgttacgcacacacacgtgcacacaaggctctggctcgcttccctccctcgtttccagctcctgggcgaatcccacatctgtttcaactctccgccgagggcgagcaggagcgagagtgtgtcgaatctgcgagtgaagagggacgagggaaaagaaacaaagccacagacgcaacttgagactcccgcatcccaaaagaagcaccagatcagcaaaaaaagaagatgggccccccgagcctcgtgctgtgcttgctgtccgcaactgtgttctccctgctgggtggaagctcggccttcctgtcgcaccaccgcctgaaaggcaggtttcagagggaccgcaggaacatccgccccaacatcatcctggtgctgacggacgaccaggatgtggagctgggttccatgcaggtgatgaacaagacccggcgcatcatggagcagggcggggcgcacttcatcaacgccttcgtgaccacacccatgtgctgcccctcacgctcctccatcctcactggcaagtacgtccacaaccacaacacctacaccaacaatgagaactgctcctcgccctcctggcaggcacagcacgagagccgcacctttgccgtgtacctcaatagcactggctaccggacagctttcttcgggaagtatcttaatgaatacaacggctcctacgtgccacccggctggaaggagtgggtcggactccttaaaaactcccgcttttataactacacgctgtgtcggaacggggtgaaagagaagcacggctccgactactccaaggattacctcacagacctcatcaccaatgacagcgtgagcttcttccgcacgtccaagaagatgtacccgcacaggccagtcctcatggtcatcagccatgcagccccccacggccctgaggattcagccccacaatattcacgcctcttcccaaacgcatctcagcacatcacgccgagctacaactacgcgcccaacccggacaaacactggatcatgcgctacacggggcccatgaagcccatccacatggaattcaccaacatgctccagcggaagcgcttgcagaccctcatgtcggtggacgactccatggagacgatttacaacatgctggttgagacgggcgagctggacaacacgtacatcgtatacaccgccgaccacggttaccacatcggccagtttggcctggtgaaagggaaatccatgccatatgagtttgacatcagggtcccgttctacgtgaggggccccaacgtggaagccggctgtctgaatccccacatcgtcctcaacattgacctggcccccaccatcctggacattgcaggcctggacatacctgcggatatggacgggaaatccatcctcaagctgctggacacggagcggccggtgaatcggtttcacttgaaaaagaagatgagggtctggcgggactccttcttggtggagagaggcaagctgctacacaagagagacaatgacaaggtggacgcccaggaggagaactttctgcccaagtaccagcgtgtgaaggacctgtgtcagcgtgctgagtaccagacggcgtgtgagcagctgggacagaagtggcagtgtgtggaggacgccacggggaagctgaagctgcataagtgcaagggccccatgcggctgggcggcagcagagccctctccaacctcgtgcccaagtactacgggcagggcagcgaggcctgcacctgtgacagcggggactacaagctcagcctggccggacgccggaaaaaactcttcaagaagaagtacaaggccagctatgtccgcagtcgctccatccgctcagtggccatcgaggtggacggcagggtgtaccacgtaggcctgggtgatgccgcccagccccgaaacctcaccaagcggcactggccaggggcccctgaggaccaagatgacaaggatggtggggacttcagtggcactggaggccttcccgactactcagccgccaaccccattaaagtgacacatcggtgctacatcctagagaacgacacagtccagtgtgacctggacctgtacaagtccctgcaggcctggaaagaccacaagctgcacatcgaccacgagattgaaaccctgcagaacaaaattaagaacctgagggaagtccgaggtcacctgaagaaaaagcggccagaagaatgtgactgtcacaaaatcagctaccacacccagcacaaaggccgcctcaagcacagaggctccagtctgcatcctttcaggaagggcctgcaagagaaggacaaggtgtggctgttgcgggagcagaagcgcaagaagaaactccgcaagctgctcaagcgcctgcagaacaacgacacgtgcagcatgccaggcctcacgtgcttcacccacgacaaccagcactggcagacggcgcctttctggacactggggcctttctgtgcctgcaccagcgccaacaataacacgtactggtgcatgaggaccatcaatgagactcacaatttcctcttctgtgaatttgcaactggcttcctagagtactttgatctcaacacagacccctaccagctgatgaatgcagtgaacacactggacagggatgtcctcaaccagctacacgtacagctcatggagctgaggagctgcaagggttacaagcagtgtaacccccggactcgaaacatggacctggatggaggaagctatgagcaatacaggcagtttcagcgtcgaaagtggccagaaatgaagagaccttcttccaaatcactgggacaactgtgggaaggctgggaaggttaagaaacaacagaggtggacctccaaaaacatagaggcatcacctgactgcacaggcaatgaaaaaccatgtgggtgatttccagcagacctgtggtattggccaggaggcctgagaaagcaagcacgcactctcagtcaacatgacagattctggaggataaccagcaggagcagagataacttcaggaagtccatttttgcccctgcttttgctttggattatacctcaccagctgcacaaaatgcattttttcgtatcaaaaagtcaccactaaccctcccccagaagctcacaaaggaaaacggagagagcgagcgagagagatttccttggaaatttctcccaagggcgaaagtcattggaatttttaaatcataggggaaaagcagtcctgttctaaatcctcttattcttttggtttgtcacaaagaaggaactaagaagcaggacagaggcaacgtggagaggctgaaaacagtgcagagacgtttgacaatgagtcagtagcacaaaagagatgacatttacctagcactataaaccctggttgcctctgaagaaactgccttcattgtatatatgtgactatttacatgtaatcaacatgggaacttttaggggaacctaataagaaatcccaattttcaggagtggtggtgtcaataaacgctctgtggccagtgtaaaagaaaa

SEQ ID NO: 187272 - DNA, 2159 bp, Homo sapiens
  Payload ID: 16873
  Gene Symbol: SUMF1
  Gene Name: sulfatase modifying factor 1
  Uniprot ID: Q8NBK3
  ENST ID: ENST00000272902
  CDS Start-End: 37-1161
acgtgaccaaccgggtcacatggcccgcgggacaacatggctgcgcccgcactagggctggtgtgtggacgttgccctgagctgggtctcgtcctcttgctgctgctgctctcgctgctgtgtggagcggcagggagccaggaggccgggaccggtgcgggcgcggggtcccttgcgggttcttgcggctgcggcacgccccagcggcctggcgcccatggcagttcggcagccgctcaccgatactcgcgggaggctaacgctccgggccccgtacccggagagcggcaactcgcgcactcaaagatggtccccatccctgctggagtatttacaatgggcacagatgatcctcagataaagcaggatggggaagcacctgcgaggagagttactattgatgccttttacatggatgcctatgaagtcagtaatactgaatttgagaagtttgtgaactcaactggctatttgacagaggctgagaagtttggcgactcctttgtctttgaaggcatgttgagtgagcaagtgaagaccaatattcaacaggcagttgcagctgctccctggtggttacctgtgaaaggcgctaactggagacacccagaagggcctgactctactattctgcacaggccggatcatccagttctccatgtgtcctggaatgatgcggttgcctactgcacttgggcagggaagcggctgcccacggaagctgagtgggaatacagctgtcgaggaggcctgcataatagacttttcccctggggcaacaaactgcagcccaaaggccagcattatgccaacatttggcagggcgagtttccggtgaccaacactggtgaggatggcttccaaggaactgcgcctgttgatgccttccctcccaatggttatggcttatacaacatagtggggaacgcatgggaatggacttcagactggtggactgttcatcattctgttgaagaaacgcttaacccaaaaggtcccccttctgggaaagaccgagtgaagaaaggtggatcctacatgtgccataggtcttattgttacaggtatcgctgtgctgctcggagccagaacacacctgatagctctgcttcgaatctgggattccgctgtgcagccgaccgcctgcccactatggactgacaaccaaggaaagtcttccccagtccaaggagcagtcgtgtctgacctacattgggcttttctcagaactttgaacgatcccatgcaaagaattcccaccctgaggtgggttacatacctgcccaatggccaaaggaaccgccttgtgagaccaaattgctgacctgggtcagtgcatgtgctttatggtgtggtgcatctttggagatcatcaccatattttacttttgagagtctttaaagaggaaggggagtggagggaaccctgagctaggcttcaggaggcccgcgtcctacgcaggctctgccacaggggttagaccccaggtccgacgcttgaccttcctgggcctcaagtgccctcccctatcaaatgaagggatggacagcatgacctctgggtgtctctccaactcaccagttctaaaaagggtatcagattctattgtgacttcatagtgagaatttattatagattattttttagctattttttccatgtgtgaaccttgagtgatactaatcatgtaaagtaagagttctcttatgtattattttcggaagaggggtgtggtgactcctttatattcgtactgcactttgtttttccaaggaaatcagtgtcttttacgttgttatgatgaatcccacatggggccggtgatggtatgctgaagttcagccgttgaacacataggaatgtctgtggggtgactctactgtgctttatcttttaacattaagtgcctttggttcagaggggcagtcataagctctgtttccccctctccccaaagccttcagcgaacgtgaaatgtgcgctaaacggggaaacctgtttaattctagatatagggaaaaaggaacgaggaccttgaatgagctatattcagggtatccggtattttgtaatagggaataggaaaccttgttggctgtggaatatccgatgctttgaatcatgcactgtgttgaataaacgtatctgctaaatcagg

SEQ ID NO: 187273 - DNA, 1447 bp, Homo sapiens
  Payload ID: 16873
  Gene Symbol: SUMF1
  Gene Name: sulfatase modifying factor 1
  Uniprot ID: Q8NBK3
  ENST ID: ENST00000383843
  CDS Start-End: 20-1069
acatggcccgcgggacaacatggctgcgcccgcactagggctggtgtgtggacgttgccctgagctgggtctcgtcctcttgctgctgctgctctcgctgctgtgtggagcggcagggagccaggaggccgggaccggtgcgggcgcggggtcccttgcgggttcttgcggctgcggcacgccccagcggcctggcgcccatggcagttcggcagccgctcaccgatactcgcgggaggctaacgctccgggccccgtacccggagagcggcaactcgcgcactcaaagatggtccccatccctgctggagtatttacaatgggcacagatgatcctcagataaagcaggatggggaagcacctgcgaggagagttactattgatgccttttacatggatgcctatgaagtcagtaatactgaatttgagaagtttgtgaactcaactggctatttgacagaggttgcagctgctccctggtggttacctgtgaaaggcgctaactggagacacccagaagggcctgactctactattctgcacaggccggatcatccagttctccatgtgtcctggaatgatgcggttgcctactgcacttgggcagggaagcggctgcccacggaagctgagtgggaatacagctgtcgaggaggcctgcataatagacttttcccctggggcaacaaactgcagcccaaaggccagcattatgccaacatttggcagggcgagtttccggtgaccaacactggtgaggatggcttccaaggaactgcgcctgttgatgccttccctcccaatggttatggcttatacaacatagtggggaacgcatgggaatggacttcagactggtggactgttcatcattctgttgaagaaacgcttaacccaaaaggtcccccttctgggaaagaccgagtgaagaaaggtggatcctacatgtgccataggtcttattgttacaggtatcgctgtgctgctcggagccagaacacacctgatagctctgcttcgaatctgggattccgctgtgcagccgaccgcctgcccactatggactgacaaccaaggaaagtcttccccagtccaaggagcagtcgtgtctgacctacattgggcttttctcagaactttgaacgatcccatgcaaagaattcccaccctgaggtgggttacatacctgcccaatggccaaaggaaccgccttgtgagaccaaattgctgacctgggtcagtgcatgtgctttatggtgtggtgcatctttggagatcatcaccatattttacttttgagagtctttaaagaggaaggggagtggagggaaccctgagctaggcttcaggaggcccgcgtcctacgcaggctctgccacaggggttagaccccaggtccgacgcttgaccttcctgggcctcaagtgccctcccctatcaaatgaa

SEQ ID NO: 187274 - DNA, 1128 bp, Homo sapiens
  Payload ID: 16873
  Gene Symbol: SUMF1
  Gene Name: sulfatase modifying factor 1
  Uniprot ID: Q8NBK3
  ENST ID: ENST00000405420
  CDS Start-End: 29-1093
aaccgggtcacatggcccgcgggacaacatggctgcgcccgcactagggctggtgtgtggacgttgccctgagctgggtctcgtcctcttgctgctgctgctctcgctgctgtgtggagcggcagggagccaggaggccgggaccggtgcgggcgcggggtcccttgcgggttcttgcggctgcggcacgccccagcggcctggcgcccatggcagttcggcagccgctcaccgatactcgcgggaggctaacgctccgggccccgtacccggagagcggcaactcgcgcactcaaagatggtccccatccctgctggagtatttacaatgggcacagatgatcctcagataaagcaggatggggaagcacctgcgaggagagttactattgatgccttttacatggatgcctatgaagtcagtaatactgaatttgagaagtttgtgaactcaactggctatttgacagaggctgagaagtttggcgactcctttgtctttgaaggcatgttgagtgagcaagtgaagaccaatattcaacaggcagttgcagctgctccctggtggttacctgtgaaaggcgctaactggagacacccagaagggcctgactctactattctgcacaggccggatcatccagttctccatgtgtcctggaatgatgcggttgcctactgcacttgggcagggaagcggctgcccacggaagctgagtgggaatacagctgtcgaggaggcctgcataatagacttttcccctggggcaacaaactgcagcccaaaggccagcattatgccaacatttggcagggcgagtttccggtgaccaacactggtgaggatggcttccaaggaactgcgcctgttgatgccttccctcccaatggttatggcttatacaacatagtggggaacgcatgggaatggacttcagactggtggactgttcatcattctgttgaagaaacgcttaacccatcttattgttacaggtatcgctgtgctgctcggagccagaacacacctgatagctctgcttcgaatctgggattccgctgtgcagccgaccgcctgcccactatggactgacaaccaaggaaagtcttccccagtccaaggagcag

SEQ ID NO: 187275 - DNA, 3150 bp, Homo sapiens
  Payload ID: 16873
  Gene Symbol: SUMF1
  Gene Name: sulfatase modifying factor 1
  ENST ID: ENST00000448413
  CDS Start-End: 17-1297
tggcccgcgggacaacatggctgcgcccgcactagggctggtgtgtggacgttgccctgagctgggtctcgtcctcttgctgctgctgctctcgctgctgtgtggagcggcagggagccaggaggccgggaccggtgcgggcgcggggtcccttgcgggttcttgcggctgcggcacgccccagcggcctggcgcccatggcagttcggcagccgctcaccgatactcgcgggaggctaacgctccgggccccgtacccggagagcggcaactcgcgcactcaaagatggtccccatccctgctggagtatttacaatgggcacagatgatcctcagataaagcaggatggggaagcacctgcgaggagagttactattgatgccttttacatggatgcctatgaagtcagtaatactgaatttgagaagtttgtgaactcaactggctatttgacagaggctgagaagtttggcgactcctttgtctttgaaggcatgttgagtgagcaagtgaagaccaatattcaacaggcagttgcagctgctccctggtggttacctgtgaaaggcgctaactggagacacccagaagggcctgactctactattctgcacaggccggatcatccagttctccatgtgtcctggaatgatgcggttgcctactgcacttgggcagggaagcggctgcccacggaagctgagtgggaatacagctgtcgaggaggcctgcataatagacttttcccctggggcaacaaactgcagcccaaaggccagcattatgccaacatttggcagggcgagtttccggtgaccaacactggtgaggatggcttccaaggaactgcgcctgttgatgccttccctcccaatggttatggcttatacaacatagtggggaacgcatgggaatggacttcagactggtggactgttcatcattctgttgaagaaacgcttaacccaaaaggtcccccttctgggaaagaccgagtgaagaaaggtggatcctacatgtgccataggtcccaagagtactatgatccctattttcaagatgtggcatctgagatgttgagaagacacacagccagcaggtggaaggccttctcatctctagaaccatgctgctcaatacgtaggcatcagcaatatgcagctattgaacgtttgacatgtggcaagtttgaattgagatgtgctagtttaagaaaaatagattgcctcaacaccaacattgcctgtagctactccatgaggcaagatggacccagactccactgtgtggactgacctcccagaaggatcctcctgtccctgaaggccactctgccttcagctacaggccccagtgctgattgtgatacttaacaagggctttcagatgtctgaaacaagagtatagcataaagttaagaatgcggcttctggagagacagacttggtttcaaattcagctctgtgaccttgggtgcacagcaaagtcttcttctccccccgatgaaagaatgggaaggactcaggaaggctcaacttgcaaactccccagtatcaagtggctgccttcaaaatccaacccttctcttcccagctcatttccagtatgtattttcaaaggccatgtcatttttgaagtgcctgagaagaaaacagaactgccagcagactatgggacaaacgactaaatgccctccagacgttccagagtcctctgcctctcaggcttcagttcttcctgaaggaatctggagctggaaagcaggaagcaatttgctgtggaattttttccatcacagactccaagttcctcagcctttggactcttgaacttacaccagtgttttggcaggagcgctcgggcctttggccacagactgaaggctgcattgtcagcttccctacttttgaggttttgggactcagactgatccaccactggcttccttgctcttcaacttgaagacggcctatcgtgagactttacctcgtgattatgtgagtcaattctcctaataaactccccttcgtatgtacatataccctattacttctgtccctttagagaaccctgactaatacagtagagattgcctggacttattaataataatgactctgtttagttaatgtaacagacagataaagacaaatgagtgacacccatgcaattaaaataattttggtggggagtgagaggagttggttctccactcacagtggaaagttttagcgtatactgctgcacatgacatgggagtattttgcacttccactggaaaaaagtaaggggaataaaaacccctggattctacttgctgacttgagagtgactaaagcgatttatctgaaggttccccagggtggattcatagtggactcaggccagattctctgctgatgctttgaacttatgtccagagcatcatctccaccacaaaagagcttgcctgctctgtgtcctggccaaagagatgcacgtgctctctcactgggttgtggctcttgagtaactcctggaattacccagctggaatttctattcctttggaccacaaatttcatatcttcacctgctgcctatatcatgctaaaagatggaaatgtctcaactaaaccatgtaggtggactagcctcattaacaagataagcaatgggccattttctcactggttattaactatgtacattatctatgaaataacatatctggtcatggttactactctattctgtagggtggaatagaaaaaggtagaggatatatatttcagttgcatttttaaaattgtttattttgttttttaattgacaaataatattaggttggtgcaaaagtaattgcagtttttgccattaaaggtagacaaggctgggcacggtggctcagcacgcttgtaatcccagcactttgggaggcagaggcgggcagatcacaaggtcaggagaccgagaccatcctggctaacacggtgaaaccccatctctactaaaaatacaaaaaattagccgggtgtggtggtgggcacctgtagtcccagctactcgggaggctgaggcaggagaatggcgtgaacctgggaggtggagcttgtagtgagctgcaccactgcactccagcctgggcaacagagcaagaccccatatc

SEQ ID NO: 187276 - DNA, 1102 bp, Homo sapiens
  Payload ID: 16873
  Gene Symbol: SUMF1
  Gene Name: sulfatase modifying factor 1
  ENST ID: ENST00000458465
  CDS Start-End: 25-753
gggtcacatggcccgcgggacaacatggctgcgcccgcactagggctggtgtgtggacgttgccctgagctgggtctcgtcctcttgctgctgctgctctcgctgctgtgtggagcggcagggagccaggaggccgggaccggtgcgggcgcggggtcccttgcgggttcttgcggctgcggcacgccccagcggcctggcgcccatggcagttcggcagccgctcaccgatactcgcgggaggctaacgctccgggccccgtacccggagagcggcaactcgcgcactcaaagatggtccccatccctgctggagtatttacaatgggcacagatgatcctcagataaagcaggatggggaagcacctgcgaggagagttactattgatgccttttacatggatgcctatgaagtcagtaatactgaatttgagaagtttgtgaactcaactggctatttgacagaggttgatgccttccctcccaatggttatggcttatacaacatagtggggaacgcatgggaatggacttcagactggtggactgttcatcattctgttgaagaaacgcttaacccaaaaggtcccccttctgggaaagaccgagtgaagaaaggtggatcctacatgtgccataggtcttattgttacaggtatcgctgtgctgctcggagccagaacacacctgatagctctgcttcgaatctgggattccgctgtgcagccgaccgcctgcccactatggactgacaaccaaggaaagtcttccccagtccaaggagcagtcgtgtctgacctacattgggcttttctcagaactttgaacgatcccatgcaaagaattcccaccctgaggtgggttacatacctgcccaatggccaaaggaaccgccttgtgagaccaaattgctgacctgggtcagtgcatgtgctttatggtgtggtgcatctttggagatcatcaccatattttacttttgagagtctttaaagaggaaggggagtggagggaaccctgagctaggcttcaggaggcccgcgtcctacgcaggctctgccacaggggttagaccccaggtccgacgcttgaccttcctgg

SEQ ID NO: 187277 - DNA, 1894 bp, Homo sapiens
  Payload ID: 16874
  Gene Symbol: SUMF2
  Gene Name: sulfatase modifying factor 2
  Uniprot ID: Q8NBJ7
  ENST ID: ENST00000275607
  CDS Start-End: 196-837
tgtgcataggggtcgactgccgctgcggtgcatgagggcgcatgcgcagcggggccgtgggtgtacgcggcgcagcgcggcagtcctgatggcccggcatgggttaccgctgctgcccctgctgtcgctcctggtcggcgcgtggctcaagctagggattttgtcagggagaaaaagtatcggacagaagctgagatgtttggatggagctttgtctttgaggactttgtctctgatgagctgagaaacaaagccacccagccaatgaagtctgtactctggtggcttccagtggaaaaggcattttggaggcagcctgcaggtcctggctctggcatccgagagagactggagcacccagtgttacacgtgagctggaatgacgcccgtgcctactgtgcttggcggggaaaacgactgcccacggaggaagagtgggagtttgccgcccgagggggcttgaagggtcaagtttacccatgggggaactggttccagccaaaccgcaccaacctgtggcagggaaagttccccaagggagacaaagctgaggatggcttccatggagtctccccagtgaatgctttccccgcccagaacaactacgggctctatgacctcctggggaacgtgtgggagtggacagcatcaccgtaccaggctgctgagcaggacatgcgcgtcctccggggggcatcctggatcgacacagctgatggctctgccaatcaccgggcccgggtcaccaccaggatgggcaacactccagattcagcctcagacaacctcggtttccgctgtgctgcagacgcaggccggccgccaggggagctgtaagcagccgggtggtgacaaggagaaaagccttctagggtcactgtcattccctggccatgttgcaaacagcgcaattccaagctcgagagcttcagcctcaggaaagaacttccccttccctgtctcccatccctctgtggcaggcgcctctcaccagggcaggagaggactcagcctcctgtgttttggagaaggggcccaatgtgtgttgacgatggctgggggccaggtgtttctgttagaggccaagtattattgacacaggattgcaaacacacaaacaattggaacagagcactctgaaaggccattttttaagcattttaaaatctattctctccccctttctccctggatgattcaggaagctgacattgtttcctcaaggcagaattttcctggttctgttttctcagccagttgctgtggaaggagaatgctttctttgtggcctcatctgtggtttcgtgtccctctgaaggaaactagtttccactgtgtaacaggcagacatgtaactatttaaagcacagttcagtcctaaaagggtctgggagaaccagatgatgtactaggtgaagcattgcattgtgggaatcacaaagcaaatagtactccagaaagacaaatatcagaagcttcctattctttttttttttttttttttttttgagacagggtctttctctgttgcccaggctagagtgcactggtgatcacggctcactctagccttgaattcctgggcccaagcaattctcccacctcagcctcctgagtagctgggactacaagtgtgcaccaccatgcctggctaattttttgaatttttgtagtgatgggatctcgctctgttgcccagggtggtctcgaactcctggcctcaagcgatcctcccacctcgacctcccaaagtgctgggattacaggtgtgagccacctcgcctgggcccccttctccatatgcctccaaaaacatgtccctggagagtagcctgctcccacactgtcactggatgtcatggggccaataaaatctcctgcaattgtgtatctc

SEQ ID NO: 187278 - DNA, 1876 bp, Homo sapiens
  Payload ID: 16874
  Gene Symbol: SUMF2
  Gene Name: sulfatase modifying factor 2
  ENST ID: ENST00000342190
  CDS Start-End: 1-1077
atgagggcgcatgcgcagcggggccgtgggtgtacgcggcgcagcgcggcagtcctgatggcccggcatgggttaccgctgctgcccctgctgtcgctcctggtcggcgcgtggctcaagctaggaaatggacaggctactagcatggtccaactgcagggtgggagattcctgatgggaacaaattctccagacagcagagatggtgacgggcctgtgcgggaggcgacagtgaaaccctttgccatcgacatatttcctgtcaccaacaaagatttcagggattttgtcagggagaaaaagtatcggacagaagctgagatgtttggatggagctttgtctttgaggactttgtctctgatgagctgagaaacaaagccacccagccaatgaagtctgtactctggtggcttccagtggaaaaggcattttggaggcagcctgcaggtcctggctctggcatccgagagagactggagcacccagtgttacacgtgagctggaatgacgcccgtgcctactgtgcttggcggggaaaacgactgcccacggaggaagagtgggagtttgccgcccgagggggcttgaagggtcaagtttacccatgggggaactggttccagccaaaccgcaccaacctgtggcagggaaagttccccaagggagacaaagctgaggatggcttccatggagtctccccagtgaatgctttccccgcccagaacaactacggatgggcaacactccagattcagcctcagacaacctcggtttccgctgtgctgcagacgcaggccggccgccaggggagctgtaagcagccgggtggtgacaaggagaaaagccttctagggtcactgtcattccctggccatgttgcaaacagcgcaattccaagctcgagagcttcagcctcaggaaagaacttccccttccctgtctcccatccctctgtggcaggcgcctctcaccagggcaggagaggactcagcctcctgtgttttggagaaggggcccaatgtgtgttgacgatggctgggggccaggtgtttctgttagaggccaagtattattgacacaggattgcaaacacacaaacaattggaacagagcactctgaaaggccattttttaagcattttaaaatctattctctccccctttctccctggatgattcaggaagctgacattgtttcctcaaggcagaattttcctggttctgttttctcagccagttgctgtggaaggagaatgctttctttgtggcctcatctgtggtttcgtgtccctctgaaggaaactagtttccactgtgtaacaggcagacatgtaactatttaaagcacagttcagtcctaaaagggtctgggagaaccagatgatgtactaggtgaagcattgcattgtgggaatcacaaagcaaatagtactccagaaagacaaatatcagaagcttcctattctttttttttttttttttttttttgagacagggtctttctctgttgcccaggctagagtgcactggtgatcacggctcactctagccttgaattcctgggcccaagcaattctcccacctcagcctcctgagtagctgggactacaagtgtgcaccaccatgcctggctaattttttgaatttttgtagtgatgggatctcgctctgttgcccagggtggtctcgaactcctggcctcaagcgatcctcccacctcgacctcccaaagtgctgggattacaggtgtgagccacctcgcctgggcccccttctccatatgcctccaaaaacatgtccctggagagtagcctgctcccacactgtcactggatgtcatggggccaataaaatctcctgcaattgtgtatctca

SEQ ID NO: 187279 - DNA, 1287 bp, Homo sapiens
  Payload ID: 16874
  Gene Symbol: SUMF2
  Gene Name: sulfatase modifying factor 2
  ENST ID: ENST00000395435
  CDS Start-End: 2-712
catgagggcgcatgcgcagcggggccgtgggtgtacgcggcgcagcgcggcagtcctgatggcccggcatgggttaccgctgctgcccctgctgtcgctcctggtcggcgcgtggctcaagctaggaaatggacaggctactagcatggtccaactgcagggtgggagattcctgatgggaacaaattctccagacagcagagatggtgacgggcctgtgcgggaggcgacagtgaaaccctttgccatcgacatatttcctgtcaccaacaaagatttcagggattttgtcagggagaaaaagtatcggacagaagctgagatgtttggatggagctttgtctttgaggactttgtctctgatgagctgagaaacaaagccacccagccaatgaagggaaagttccccaagggagacaaagctgaggatggcttccatggagtctccccagtgaatgctttccccgcccagaacaactacgggctctatgacctcctggggaacgtgtgggagtggacagcatcaccgtaccaggctgctgagcaggacatgcgcgtcctccggggggcatcctggatcgacacagctgatggctctgccaatcaccgggcccgggtcaccaccaggatgggcaacactccagattcagcctcagacaacctcggtttccgctgtgctgcagacgcaggccggccgccaggggagctgtaagcagccgggtggtgacaaggagaaaagccttctagggtcactgtcattccctggccatgttgcaaacagcgcaattccaagctcgagagcttcagcctcaggaaagaacttccccttccctgtctcccatccctctgtggcaggcgcctctcaccagggcaggagaggactcagcctcctgtgttttggagaaggggcccaatgtgtgttgacgatggctgggggccaggtgtttctgttagaggccaagtattattgacacaggattgcaaacacacaaacaattggaacagagcactctgaaaggccattttttaagcattttaaaatctattctctccccctttctccctggatgattcaggaagctgacattgtttcctcaaggcagaattttcctggttctgttttctcagccagttgctgtggaaggagaatgctttctttgtggcctcatctgtggtttcgtgtccctctgaaggaaactagtttccactgtgtaacaggcagacatgtaactatttaaagcacagttcagtcctaaaagggtctgggagaaccagatgatgtactag

SEQ ID NO: 187280 - DNA, 1683 bp, Homo sapiens
  Payload ID: 16874
  Gene Symbol: SUMF2
  Gene Name: sulfatase modifying factor 2
  ENST ID: ENST00000395436
  CDS Start-End: 254-1171
gcaatggtatgacgcacaaaagcaatcttaaggggaatgaaaactgtccaaaggttcagaaaagtagtgaaggggcctctggaacggccgggaccctcaacgtggttttccttaattccctgggcggtcctgaaggtggtgtggccagtcctccgcctcgctccgtcagtttccccctgctgaactattgggtgcggggcgggtggtggcgcagcctgcgcatgtgcataggggtcgactgccgctgcggtgcatgagggcgcatgcgcagcggggccgtgggtgtacgcggcgcagcgcggcagtcctgatggcccggcatgggttaccgctgctgcccctgctgtcgctcctggtcggcgcgtggctcaagctaggaaatggacaggctactagcatggtccaactgcagggtgggagattcctgatgggaacaaattctccagacagcagagatggtgacgggcctgtgcgggaggcgacagtgaaaccctttgccatcgacatatttcctgtcaccaacaaagatttcagggattttgtcagggagaaaaagtatcggacagaagctgagatgtttggatggagctttgtctttgaggactttgtctctgatgagctgagaaacaaagccacccagccaatgaagcctgcaggtcctggctctggcatccgagagagactggagcacccagtgttacacgtgagctggaatgacgcccgtgcctactgtgcttggcggggaaaacgactgcccacggaggaagagtgggagtttgccgcccgagggggcttgaagggtcaagtttacccatgggggaactggttccagccaaaccgcaccaacctgtggcagggaaagttccccaagggagacaaagctgaggatggcttccatggagtctccccagtgaatgctttccccgcccagaacaactacgggctctatgacctcctggggaacgtgtgggagtggacagcatcaccgtaccaggctgctgagcaggacatgcgcgtcctccggggggcatcctggatcgacacagctgatggctctgccaatcaccgggcccgggtcaccaccaggatgggcaacactccagattcagcctcagacaacctcggtttccgctgtgctgcagacgcaggccggccgccaggggagctgtaagcagccgggtggtgacaaggagaaaagccttctagggtcactgtcattccctggccatgttgcaaacagcgcaattccaagctcgagagcttcagcctcaggaaagaacttccccttccctgtctcccatccctctgtggcaggcgcctctcaccagggcaggagaggactcagcctcctgtgttttggagaaggggcccaatgtgtgttgacgatggctgggggccaggtgtttctgttagaggccaagtattattgacacaggattgcaaacacacaaacaattggaacagagcactctgaaaggccattttttaagcattttaaaatctattctctccccctttctccctggatgattcaggaagctgacattgtttcctcaaggcagaattttcctggttctgttttctcagccagttgctgtggaaggagaatgctttctttgtggcctcatctgtggtttcgtgtccctctgaaggaaactagtttccactgtgtaacaggcagac

SEQ ID NO: 187281 - DNA, 1771 bp, Homo sapiens
  Payload ID: 16874
  Gene Symbol: SUMF2
  Gene Name: sulfatase modifying factor 2
  ENST ID: ENST00000438133
  CDS Start-End: 5-457
cctgatggcccggcatgggttaccgctgctgcccctgctgtcgctcctggtcggcgcgtggctcaagctaggaaatggacaggctactagcatggtccaactgcagggtgggagattcctgatgggaacaaattctccagacagcagagatggtgacgggcctgtgcgggaggcgacagtgaaaccctttgccatcgacatatttcctgtcaccaacaaagatttcagggattttgtcagggagaaaaagtatcggacagaagctgagatgtttggatggagctttgtctttgaggactttgtctctgatgagctgagaaacaaagccacccagccaatgaaggtcaagtttacccatgggggaactggttccagccaaaccgcaccaacctgtggcagggaaagttccccaagggagacaaagctgaggatggcttccatggagtctccccagtgaatgctttccccgcccagaacaactacgggctctatgacctcctggggaacgtgtgggagtggacagcatcaccgtaccaggctgctgagcaggacatgcgcgtcctccggggggcatcctggatcgacacagctgatggctctgccaatcaccgggcccgggtcaccaccaggatgggcaacactccagattcagcctcagacaacctcggtttccgctgtgctgcagacgcaggccggccgccaggggagctgtaagcagccgggtggtgacaaggagaaaagccttctagggtcactgtcattccctggccatgttgcaaacagcgcaattccaagctcgagagcttcagcctcaggaaagaacttccccttccctgtctcccatccctctgtggcaggcgcctctcaccagggcaggagaggactcagcctcctgtgttttggagaaggggcccaatgtgtgttgacgatggctgggggccaggtgtttctgttagaggccaagtattattgacacaggattgcaaacacacaaacaattggaacagagcactctgaaaggccattttttaagcattttaaaatctattctctccccctttctccctggatgattcaggaagctgacattgtttcctcaaggcagaattttcctggttctgttttctcagccagttgctgtggaaggagaatgctttctttgtggcctcatctgtggtttcgtgtccctctgaaggaaactagtttccactgtgtaacaggcagacatgtaactatttaaagcacagttcagtcctaaaagggtctgggagaaccagatgatgtactaggtgaagcattgcattgtgggaatcacaaagcaaatagtactccagaaagacaaatatcagaagcttcctattctttttttttttttttttttttttgagacagggtctttctctgttgcccaggctagagtgcactggtgatcacggctcactctagccttgaattcctgggcccaagcaattctcccacctcagcctcctgagtagctgggactacaagtgtgcaccaccatgcctggctaattttttgaatttttgtagtgatgggatctcgctctgttgcccagggtggtctcgaactcctggcctcaagcgatcctcccacctcgacctcccaaagtgctgggattacaggtgtgagccacctcgcctgggcccccttctccatatgcctccaaaaacatgtccctggagagtagcctgctcccacactgtcactggatgtcatggggccaataaaatctcctgcaattgtgtatctc

SEQ ID NO: 187282 - DNA, 1249 bp, Homo sapiens
  Payload ID: 16874
  Gene Symbol: SUMF2
  Gene Name: sulfatase modifying factor 2
  ENST ID: ENST00000447501
  CDS Start-End: 3-554
tgatggcccggcatgggttaccgctgctgcccctgctgtcgctcctggtcggcgcgtggctcaagctaggaaatggacaggctactagcatggtccaactgcagggtgggagattcctgatgggaacaaattctccagacagcagagatggtgacgggcctgtgcgggaggcgacagtgaaaccctttgccatcgacatatttcctgtcaccaacaaagatttcagggattttgtcagggagaaaaagtatcggacagaagctgagatgtttggatggagctttgtctttgaggactttgtctctgatgagctgagaaacaaagccacccagccaatgaagtctgtactctggtggcttccagtggaaaaggcattttggaggcagcctgcaggtcctggctctggcatccgagagagactggagcacccagtgttacacgtcaagtttacccatgggggaactggttccagccaaaccgcaccaacctgtggcagggaaagttccccaagggagacaaagctgaggatggcttccatggagtctccccagtgaatgctttccccgcccagaacaactacgggctctatgacctcctggggaacgtgtgggagtggacagcatcaccgtaccaggctgctgagcaggacatgcgcgtcctccggggggcatcctggatcgacacagctgatggctctgccaatcaccgggcccgggtcaccaccaggactggcacaggctcaggacctgtcctcacaccaggcttctttccagaccatgctctccccagccctcatgctccctgatcatggccggccctgcggatgaggcaggcaagatgggtaagccctaggcctttttctcaggacgtgtctgtcctctctccccttctctgctggcaggatgggcaacactccagattcagcctcagacaacctcggtttccgctgtgctgcagacgcaggccggccgccaggggagctgtaagcagccgggtggtgacaaggagaaaagccttctagggtcactgtcattccctggccatgttgcaaacagcgcaattccaagctcgagagcttcagcctcaggaaagaacttccccttccctgtctcccatccctctgtggcaggcgcctctcaccagggcaggagaggactcagcctcctgtgttttggagaaggggcccaatgtgtgttgacgatggctgggggccaggtgtttctgttagaggccaagtattattgacaca

SEQ ID NO: 187283 - DNA, 2052 bp, Homo sapiens
  Payload ID: 16874
  Gene Symbol: SUMF2
  Gene Name: sulfatase modifying factor 2
  ENST ID: ENST00000434526
  CDS Start-End: 32-994
tgtgcataggggtcgactgccgctgcggtgcatgagggcgcatgcgcagcggggccgtgggtgtacgcggcgcagcgcggcagtcctgatggcccggcatgggttaccgctgctgcccctgctgtcgctcctggtcggcgcgtggctcaagctaggaaatggacaggctactagcatggtccaactgcagggtgggagattcctgatgggaacaaattctccagacagcagagatggtgacgggcctgtgcgggaggcgacagtgaaaccctttgccatcgacatatttcctgtcaccaacaaagatttcagggattttgtcagggagaaaaagtatcggacagaagctgagatgtttggatggagctttgtctttgaggactttgtctctgatgagctgagaaacaaagccacccagccaatgaagtctgtactctggtggcttccagtggaaaaggcattttggaggcagcctgcaggtcctggctctggcatccgagagagactggagcacccagtgttacacgtgagctggaatgacgcccgtgcctactgtgcttggcggggaaaacgactgcccacggaggaagagtgggagtttgccgcccgagggggcttgaagggtcaagtttacccatgggggaactggttccagccaaaccgcaccaacctgtggcagggaaagttccccaagggagacaaagctgaggatggcttccatggagtctccccagtgaatgctttccccgcccagaacaactacgggctctatgacctcctggggaacgtgtgggagtggacagcatcaccgtaccaggctgctgagcaggacatgcgcgtcctccggggggcatcctggatcgacacagctgatggctctgccaatcaccgggcccgggtcaccaccaggatgggcaacactccagattcagcctcagacaacctcggtttccgctgtgctgcagacgcaggccggccgccaggggagctgtaagcagccgggtggtgacaaggagaaaagccttctagggtcactgtcattccctggccatgttgcaaacagcgcaattccaagctcgagagcttcagcctcaggaaagaacttccccttccctgtctcccatccctctgtggcaggcgcctctcaccagggcaggagaggactcagcctcctgtgttttggagaaggggcccaatgtgtgttgacgatggctgggggccaggtgtttctgttagaggccaagtattattgacacaggattgcaaacacacaaacaattggaacagagcactctgaaaggccattttttaagcattttaaaatctattctctccccctttctccctggatgattcaggaagctgacattgtttcctcaaggcagaattttcctggttctgttttctcagccagttgctgtggaaggagaatgctttctttgtggcctcatctgtggtttcgtgtccctctgaaggaaactagtttccactgtgtaacaggcagacatgtaactatttaaagcacagttcagtcctaaaagggtctgggagaaccagatgatgtactaggtgaagcattgcattgtgggaatcacaaagcaaatagtactccagaaagacaaatatcagaagcttcctattctttttttttttttttttttttttgagacagggtctttctctgttgcccaggctagagtgcactggtgatcacggctcactctagccttgaattcctgggcccaagcaattctcccacctcagcctcctgagtagctgggactacaagtgtgcaccaccatgcctggctaattttttgaatttttgtagtgatgggatctcgctctgttgcccagggtggtctcgaactcctggcctcaagcgatcctcccacctcgacctcccaaagtgctgggattacaggtgtgagccacctcgcctgggcccccttctccatatgcctccaaaaacatgtccctggagagtagcctgctcccacactgtcactggatgtcatggggccaataaaatctcctgcaattgtgtatctca

SEQ ID NO: 187284 - DNA, 1171 bp, Homo sapiens
  Payload ID: 16874
  Gene Symbol: SUMF2
  Gene Name: sulfatase modifying factor 2
  ENST ID: ENST00000413756
  CDS Start-End: 24-1082
cgcggcgcagcgcggcagtcctgatggcccggcatgggttaccgctgctgcccctgctgtcgctcctggtcggcgcgtggctcaagctaggaaatggacaggctactagcatggtccaactgcagggtgggagattcctgatgggaacaaattctccagacagcagagatggtgacgggcctgtgcgggaggcgacagtgaaaccctttgccatcgacatatttcctgtcaccaacaaagatttcagggattttgtcagggagaaaaagtatcggacagaagctgagatgtttggatggagctttgtctttgaggactttgtctctgatgagctgagaaacaaagccacccagccaatgaagtctgtactctggtggcttccagtggaaaaggcattttggaggcagcctgcaggtcctggctctggcatccgagagagactggagcacccagtgttacacgtgagctggaatgacgcccgtgcctactgtgcttggcggggaaaacgactgcccacggaggaagagtgggagtttgccgcccgagggggcttgaagggtcaagtttacccatgggggaactggttccagccaaaccgcaccaacctgtggcagggaaagttccccaagggagacaaagctgaggatggcttccatggagtctccccagtgaatgctttccccgcccagaacaactacgggctctatgacctcctggggaacgtgtgggagtggacagcatcaccgtaccaggctgctgagcaggacatgcgcgtcctccggggggcatcctggatcgacacagctgatggctctgccaatcaccgggcccgggtcaccaccagagtcttgctctgttgtccaggctggagtgcagtggcacagtctcagctcactacagcctcaaactgccaggctctagcgattcttccacctcagctcctcaagtatctgggactacaggatgggcaacactccagattcagcctcagacaacctcggtttccgctgtgctgcagacgcaggccggccgccaggggagctgtaagcagccgggtggtgacaaggagaaaagccttctagggtcactgtcattccctggccatgttgcaaacagcgcaattccaagctcgagagcttcagcctcaggaaagaacttccccttccctgtc

SEQ ID NO: 187285 - DNA, 1792 bp, Homo sapiens
  Payload ID: 16874
  Gene Symbol: SUMF2
  Gene Name: sulfatase modifying factor 2
  ENST ID: ENST00000423763
  CDS Start-End: 12-509
cggcagtcctgatggcccggcatgggttaccgctgctgcccctgctgtcgctcctggtcggcgcgtggctcaagctaggaaatggacaggctactagcatggtccaactgcagggtgggagattcctgatgggaacaaattctccagacagcagagatggtgacgggcctgtgcgggaggcgacagtgaaaccctttgccatcgacatatttcctgtcaccaacaaagatttcagggattttgtcagggagaaaaagtatcggacagaagctgagatgtttggatggagctttgtctttgaggactttgtctctgatgagctgagaaacaaagccacccagccaatgaagtctgtactctggtggcttccagtggaaaaggcattttggaggcaggtcaagtttacccatgggggaactggttccagccaaaccgcaccaacctgtggcagggaaagttccccaagggagacaaagctgaggatggcttccatggagtctccccagtgaatgctttccccgcccagaacaactacgggctctatgacctcctggggaacgtgtgggagtggacagcatcaccgtaccaggctgctgagcaggacatgcgcgtcctccggggggcatcctggatcgacacagctgatggctctgccaatcaccgggcccgggtcaccaccaggatgggcaacactccagattcagcctcagacaacctcggtttccgctgtgctgcagacgcaggccggccgccaggggagctgtaagcagccgggtggtgacaaggagaaaagccttctagggtcactgtcattccctggccatgttgcaaacagcgcaattccaagctcgagagcttcagcctcaggaaagaacttccccttccctgtctcccatccctctgtggcaggcgcctctcaccagggcaggagaggactcagcctcctgtgttttggagaaggggcccaatgtgtgttgacgatggctgggggccaggtgtttctgttagaggccaagtattattgacacaggattgcaaacacacaaacaattggaacagagcactctgaaaggccattttttaagcattttaaaatctattctctccccctttctccctggatgattcaggaagctgacattgtttcctcaaggcagaattttcctggttctgttttctcagccagttgctgtggaaggagaatgctttctttgtggcctcatctgtggtttcgtgtccctctgaaggaaactagtttccactgtgtaacaggcagacatgtaactatttaaagcacagttcagtcctaaaagggtctgggagaaccagatgatgtactaggtgaagcattgcattgtgggaatcacaaagcaaatagtactccagaaagacaaatatcagaagcttcctattctttttttttttttttttttttttgagacagggtctttctctgttgcccaggctagagtgcactggtgatcacggctcactctagccttgaattcctgggcccaagcaattctcccacctcagcctcctgagtagctgggactacaagtgtgcaccaccatgcctggctaattttttgaatttttgtagtgatgggatctcgctctgttgcccagggtggtctcgaactcctggcctcaagcgatcctcccacctcgacctcccaaagtgctgggattacaggtgtgagccacctcgcctgggcccccttctccatatgcctccaaaaacatgtccctggagagtagcctgctcccacactgtcactggatgtcatggg

SEQ ID NO: 187286 - DNA, 1683 bp, Homo sapiens
  Payload ID: 16874
  Gene Symbol: SUMF2
  Gene Name: sulfatase modifying factor 2
  ENST ID: ENST00000436782
  CDS Start-End: 36-344
gccgtgggtgtacgcggcgcagcgcggcagtcctgatggcccggcatgggttaccgctgctgcccctgctgtcgctcctggtcggcgcgtggctcaagctaggaaatggacaggctactagcatggtccaactgcagggtgggagattcctgatgggaacaaattctccagacagcagagatggtgacgggcctgtgcgggaggcgacagtgaaaccctttgccatcgacatatttcctgtcaccaacaaagatttcaggtcaagtttacccatgggggaactggttccagccaaaccgcaccaacctgtggcagggaaagttccccaagggagacaaagctgaggatggcttccatggagtctccccagtgaatgctttccccgcccagaacaactacgggctctatgacctcctggggaacgtgtgggagtggacagcatcaccgtaccaggctgctgagcaggacatgcgcgtcctccggggggcatcctggatcgacacagctgatggctctgccaatcaccgggcccgggtcaccaccaggatgggcaacactccagattcagcctcagacaacctcggtttccgctgtgctgcagacgcaggccggccgccaggggagctgtaagcagccgggtggtgacaaggagaaaagccttctagggtcactgtcattccctggccatgttgcaaacagcgcaattccaagctcgagagcttcagcctcaggaaagaacttccccttccctgtctcccatccctctgtggcaggcgcctctcaccagggcaggagaggactcagcctcctgtgttttggagaaggggcccaatgtgtgttgacgatggctgggggccaggtgtttctgttagaggccaagtattattgacacaggattgcaaacacacaaacaattggaacagagcactctgaaaggccattttttaagcattttaaaatctattctctccccctttctccctggatgattcaggaagctgacattgtttcctcaaggcagaattttcctggttctgttttctcagccagttgctgtggaaggagaatgctttctttgtggcctcatctgtggtttcgtgtccctctgaaggaaactagtttccactgtgtaacaggcagacatgtaactatttaaagcacagttcagtcctaaaagggtctgggagaaccagatgatgtactaggtgaagcattgcattgtgggaatcacaaagcaaatagtactccagaaagacaaatatcagaagcttcctattctttttttttttttttttttttttgagacagggtctttctctgttgcccaggctagagtgcactggtgatcacggctcactctagccttgaattcctgggcccaagcaattctcccacctcagcctcctgagtagctgggactacaagtgtgcaccaccatgcctggctaattttttgaatttttgtagtgatgggatctcgctctgttgcccagggtggtctcgaactcctggcctcaagcgatcctcccacctcgacctcccaaagtgctgggattacaggtgtgagccacctcgcctgggcccccttctccatatgcctccaaaaacatgtccctggagagtagcctgctcccacactgtcactggatgtcatggggccaataaaatctcctgcaattgtgta

SEQ ID NO: 187287 - DNA, 912 bp, Homo sapiens
  Payload ID: 16874
  Gene Symbol: SUMF2
  Gene Name: sulfatase modifying factor 2
  ENST ID: ENST00000451338
  CDS Start-End: 1-912
catgggttaccgctgctgcccctgctgtcgctcctggtcggcgcgtggctcaagctaggaaatggacaggctactagcatggtccaactgcagggtgggagattcctgatgggaacaaattctccagacagcagagatggtgacgggcctgtgcgggaggcgacagtgaaaccctttgccatcgacatatttcctgtcaccaacaaagatttcagggattttgtcagggagaaaaagtatcggacagaagctgagatgtttggatggagctttgtctttgaggactttgtctctgatgagctgagaaacaaagccacccagccaatgaagtcggggaggtgcctttgctgggccggagcatcttgcagtcggtctccttctttttcgcagtctgtactctggtggcttccagtggaaaaggcattttggaggcagcctgcaggtcctggctctggcatccgagagagactggagcacccagtgttacacgtgagctggaatgacgcccgtgcctactgtgcttggcggggaaaacgactgcccacggaggaagagtgggagtttgccgcccgagggggcttgaagggtcaagtttacccatgggggaactggttccagccaaaccgcaccaacctgtggcagggaaagttccccaagggagacaaagctgaggatggcttccatggagtctccccagtgaatgctttccccgcccagaacaactacgggctctatgacctcctggggaacgtgtgggagtggacagcatcaccgtaccaggctgctgagcaggacatgcgcgtcctccggggggcatcctggatcgacacagctgatggctctgccaatcaccgggcccgggtcaccaccaggatgggcaacactccagattcagcctcagacaacctcggt

SEQ ID NO: 187288 - DNA, 881 bp, Homo sapiens
  Payload ID: 16874
  Gene Symbol: SUMF2
  Gene Name: sulfatase modifying factor 2
  ENST ID: ENST00000413952
  CDS Start-End: 1-881
atgagggcgcatgcgcagcggggccgtgggtgtacgcggcgcagcgcggcagtcctgatggcccggcatgggttaccgctgctgcccctgctgtcgctcctggtcggcgcgtggctcaagctaggaaatggacaggctactagcatggtccaactgcagggtgggagattcctgatgggaacaaattctccagacagcagagatggtgacgggcctgtgcgggaggcgacagtgaaaccctttgccatcgacatatttcctgtcaccaacaaagatttcaggtacatcagggattttgtcagggagaaaaagtatcggacagaagctgagatgtttggatggagctttgtctttgaggactttgtctctgatgagctgagaaacaaagccacccagccaatgaagtctgtactctggtggcttccagtggaaaaggcattttggaggcagcctgcaggtcctggctctggcatccgagagagactggagcacccagtgttacacgtgagctggaatgacgcccgtgcctactgtgcttggcggggaaaacgactgcccacggaggaagagtgggagtttgccgcccgagggggcttgaagggtcaagtttacccatgggggaactggttccagccaaaccgcaccaacctgtggcagggaaagttccccaagggagacaaagctgaggatggcttccatggagtctccccagtgaatgctttccccgcccagaacaactacgggctctatgacctcctggggaacgtgtgggagtggacagcatcaccgtaccaggctgctgagcaggacatgcgcgtcctccggggggcatcctggatcgacacagctgatggctctgccaatcaccgggcccgggtcac

SEQ ID NO: 187289 - DNA, 913 bp, Homo sapiens
  Payload ID: 16874
  Gene Symbol: SUMF2
  Gene Name: sulfatase modifying factor 2
  ENST ID: ENST00000452216
  CDS Start-End: 48-203
atgcgcagcggggccgtgggtgtacgcggcgcagcgcggcagtcctgatggcccggcatgggttaccgctgctgcccctgctgtcgctcctggtcggcgcgtggctcaagctagggattttgtcagggagaaaaagtatcggacagaagctgagatgtttggatggagctttgtctttgaggactttgtctctgatgagctgagaaacaaagccacccagccaatgaagtctgtactctggtggcttccagtggaaaaggcattttggaggcagcctgcaggtcctggctctggcatccgagagagactggagcacccagtgttacacgtgagctggaatgacgcccgtgcctactgtgcttggcggggaaaacgactgcccacggaggaagagtgggagtttgccgcccgagggggcttgaagggtcaagtttacccatgggggaactggttccagccaaaccgcaccaacctgtggcagggaaagttccccaagggagacaaagctgaggatggcttccatggagtctccccagtgaatgctttccccgcccagaacaactacgggctctatgacctcctggggaacgtgtgggagtggacagcatcaccgtaccaggctgctgagcaggacatgcgcgtcctccggggggcatcctggatcgacacagctgatggctctgccaatcaccgggcccgggtcaccaccaggatgggcaacactccagattcagcctcagacaacctcggtttccgctgtgctgcagacgcaggccggccgccaggggagctgtaagcagccgggtggtgacaaggagaaaagccttctagggtcactgtcattccctggccatgttgcaaacagcgcaattccaagctcgagagcttcagcctcaggaaagaacttcccctt

SEQ ID NO: 187290 - DNA, 947 bp, Homo sapiens
  Payload ID: 16874
  Gene Symbol: SUMF2
  Gene Name: sulfatase modifying factor 2
  ENST ID: ENST00000437307
  CDS Start-End: 29-727
gtgtacgcggcgcagcgcggcagtcctgatggcccggcatgggttaccgctgctgcccctgctgtcgctcctggtcggcgcgtggctcaagctaggaaatggacaggctactagcatggtccaactgcagggtgggagattcctgatgggaacaaattctccagacagcagagatggtgacgggcctgtgcgggaggcgacagtgaaaccctttgccatcgacatatttcctgtcaccaacaaagatttcagggattttgtcagggagaaaaagtatcggacagaagctgagatgtttggatggagctttgtctttgaggactttgtctctgatgagctgagaaacaaagccacccagccaatgaagtctgtactctggtggcttccagtggaaaaggcattttggaggcagggaaagttccccaagggagacaaagctgaggatggcttccatggagtctccccagtgaatgctttccccgcccagaacaactacgggctctatgacctcctggggaacgtgtgggagtggacagcatcaccgtaccaggctgctgagcaggacatgcgcgtcctccggggggcatcctggatcgacacagctgatggctctgccaatcaccgggcccgggtcaccaccaggatgggcaacactccagattcagcctcagacaacctcggtttccgctgtgctgcagacgcaggccggccgccaggggagctgtaagcagccgggtggtgacaaggagaaaagccttctagggtcactgtcattccctggccatgttgcaaacagcgcaattccaagctcgagagcttcagcctcaggaaagaacttccccttccctgtctcccatccctctgtggcaggcgcctctcaccagggcaggagaggactcagcctcctgtgttttggagaaggggcccaatgtgtgttgacgatggct

SEQ ID NO: 187291 - DNA, 2003 bp, Homo sapiens
  Payload ID: 16875
  Gene Symbol: SQRDL
  Gene Name: sulfide quinone reductase-like (yeast)
  Uniprot ID: Q9Y6N5
  ENST ID: ENST00000260324
  CDS Start-End: 387-1739
agcgtcaggtggcctcggtgtcctccgcctgtgcgccccagcctgcggggccgcccttcagggcgcgcaaggggcgagtctgtccagccggcagcaccccaggccggatggacgcttgttcctggttctgtgccccgtgagcgctcaacgccctggtgtgttcactgaccatggtgcctgggctgcggcgccgggcggggcacggcgggacttttcgggacctttcctggggggagcctcgctttccccgcctccagcctccgcccggatggcaggcgggcggggccccagtccaggccttgagacccagaagggagcgaaggtttttgctgcgccaacgcagtgaccgaaggctccgctcacgcccggcctgatcctgcctgaagatggtgccactggtggctgtggtatcagggccccgtgcccagctctttgcctgcctgctcaggctgggcactcagcaggtcggcccccttcagctgcacaccggggccagccatgcggccaggaaccattatgaggtgctggtgctgggtgggggcagtggcggaatcaccatggctgcccgcatgaagaggaaagtgggtgcagagaatgtggccattgttgagcccagtgagagacatttctaccagccaatctggacactggtgggtgctggtgccaaacaattgtcctcatctggtcgtcccacggcaagtgtgattccatctggtgtagaatggatcaaagctagagtgactgagttgaacccagacaagaactgcattcacacagatgacgacgagaagatctcctaccgatatcttattattgctctcggaatccagctggactatgagaagattaaaggcctacctgaaggtttcgctcatcccaaaatagggtcgaattattcagttaagactgtagagaagacatggaaagctctgcaggacttcaaagagggcaatgccatcttcaccttcccaaatactccagtgaagtgtgctggagcccctcagaagatcatgtacttatcagaagcctacttcaggaagacagggaagcgatccaaggccaatatcattttcaacacttctcttggagccattttcggggttaagaagtatgcagatgccctgcaggagatcatccaggagcggaacctcactgttaactacaagaaaaacctcattgaagtccgagccgataaacaagaggctgtatttgagaacctggacaaaccaggagagacccaagtgatttcatatgaaatgcttcatgtcacacctccaatgagcccaccagatgtcctcaagaccagtcctgtggctgatgctgctggttgggtggatgtggataaagaaactctgcaacacaggaggtacccaaatgtgtttgggattggggactgcaccaaccttcctacgtcaaagaccgctgctgcagtagctgcccagtcaggaatacttgataggacaatttctgtaattatgaagaatcaaacaccaacaaagaagtatgatggctacacatcatgtccactggtgaccggctacaaccgtgtgattcttgctgagtttgactacaaagcagagccgctagaaaccttcccctttgatcaaagcaaagagcgcctttccatgtatctcatgaaagctgacctgatgcctttcctgtattggaatatgatgctaaggggttactggggaggaccagcgtttctgcgcaagttgtttcatctaggtatgagttaaggatggctcagcacttgctcatcttggatggcttctgggccaaaactgcagtcactgaatgaccaagagcagcacgaaggacttggaacctatccttgtaaagagttccttgatgggtaatggtgaccaaatgcctcccttttcagtacctttgaacagcaaccatgtgggctactcatgatgggcttgattctttgggaataataaaatgaaataatacttttattttctgaataaaagtttgtcactgattgtgttctatga

SEQ ID NO: 187292 - DNA, 713 bp, Homo sapiens
  Payload ID: 16875
  Gene Symbol: SQRDL
  Gene Name: sulfide quinone reductase-like (yeast)
  ENST ID: ENST00000566934
  CDS Start-End: 1-545
gtggcggaatcaccatggctgcccgcatgaagaggaaagtgggtgcagagaatgtggccattgttgagcccagtgagagacatttctaccagccaatctggacactggtgggtgctggtgccaaacaattgtcctcatctggtcgtcccacggcaagtgtgattccatctggtgtagaatggatcaaagctagagtgactgagttgaacccagacaagaactgcattcacacagatgacgacgagaagatctcctaccgatatcttattattgctctcggaatccagctggactatgagaagattaaaggcctacctgaaggtttcgctcatcccaaaatagggtcgaattattcagttaagactgtagagaagacatggaaagctctgcaggacttcaaagagggcaatgccatcttcaccttcccaaatactccagtgaagtgtgctggagcccctcagaagatcatgtacttatcagaagcctacttcaggaaggtatgcttcctttctggggacagagatgagcagggcggacagtgctaattcactgattgcaagaattccattttatctctattgtaatcccttttttatctcggaatttttattacatgtgtacaaaattagttaactggaagtttataaaatataaaagaggagaaaatcactcatgatccaattgctttaataaagctgcagttttcaatttga

SEQ ID NO: 187293 - DNA, 566 bp, Homo sapiens
  Payload ID: 16875
  Gene Symbol: SQRDL
  Gene Name: sulfide quinone reductase-like (yeast)
  ENST ID: ENST00000565997
  CDS Start-End: 1-373
ggctgatgctgctggttgggtggatgtggataaagaaactctgcaacacaggaggtacccaaatgtgtttgggattggggactgcaccaaccttcctacgtcaaagaccgctgctgcagtagctgcccagtcaggaatacttgataggacaatttctgtaattatgaagaatcaaacaccaacaaagaagtatgatggctacacatcatgtccactggtgaccggctacaaccgtgtgattcttgctgagtttgactacaaagcagagccgctagaaaccttcccctttgatcaaagcaaagagcgcctttccatgtatctcatgaaagctgacctgatgcctttcctgtattggaatatgatgctaaggtaagtgcactgcctggttcctggatgaggaaagggatttgtagcacatctccacccaaaggggatgcagcctcttttcttcattattagcagtgaccaagtgttctgtcttccatgctctaggccctcttttgctgctggataaataataatagtaaatcactttcacataccaagtactctatcatctgctacct

SEQ ID NO: 187294 - DNA, 1792 bp, Homo sapiens
  Payload ID: 16875
  Gene Symbol: SQRDL
  Gene Name: sulfide quinone reductase-like (yeast)
  Uniprot ID: Q9Y6N5
  ENST ID: ENST00000568606
  CDS Start-End: 190-1542
ctcattttctcttgccgccaccatgtaagaagcgcctttcgcctccctccatgattctgaggcctccccagccacatggtacttgtatgcctagacagcgggcacagggcttgctggacacagaaggcaaggactcagagaatatccaccagatgaaagaatgactgcatgacctgatcctgcctgaagatggtgccactggtggctgtggtatcagggccccgtgcccagctctttgcctgcctgctcaggctgggcactcagcaggtcggcccccttcagctgcacaccggggccagccatgcggccaggaaccattatgaggtgctggtgctgggtgggggcagtggcggaatcaccatggctgcccgcatgaagaggaaagtgggtgcagagaatgtggccattgttgagcccagtgagagacatttctaccagccaatctggacactggtgggtgctggtgccaaacaattgtcctcatctggtcgtcccacggcaagtgtgattccatctggtgtagaatggatcaaagctagagtgactgagttgaacccagacaagaactgcattcacacagatgacgacgagaagatctcctaccgatatcttattattgctctcggaatccagctggactatgagaagattaaaggcctacctgaaggtttcgctcatcccaaaatagggtcgaattattcagttaagactgtagagaagacatggaaagctctgcaggacttcaaagagggcaatgccatcttcaccttcccaaatactccagtgaagtgtgctggagcccctcagaagatcatgtacttatcagaagcctacttcaggaagacagggaagcgatccaaggccaatatcattttcaacacttctcttggagccattttcggggttaagaagtatgcagatgccctgcaggagatcatccaggagcggaacctcactgttaactacaagaaaaacctcattgaagtccgagccgataaacaagaggctgtatttgagaacctggacaaaccaggagagacccaagtgatttcatatgaaatgcttcatgtcacacctccaatgagcccaccagatgtcctcaagaccagtcctgtggctgatgctgctggttgggtggatgtggataaagaaactctgcaacacaggaggtacccaaatgtgtttgggattggggactgcaccaaccttcctacgtcaaagaccgctgctgcagtagctgcccagtcaggaatacttgataggacaatttctgtaattatgaagaatcaaacaccaacaaagaagtatgatggctacacatcatgtccactggtgaccggctacaaccgtgtgattcttgctgagtttgactacaaagcagagccgctagaaaccttcccctttgatcaaagcaaagagcgcctttccatgtatctcatgaaagctgacctgatgcctttcctgtattggaatatgatgctaaggggttactggggaggaccagcgtttctgcgcaagttgtttcatctaggtatgagttaaggatggctcagcacttgctcatcttggatggcttctgggccaaaactgcagtcactgaatgaccaagagcagcacgaaggacttggaacctatccttgtaaagagttccttgatgggtaatggtgaccaaatgcctcccttttcagtacctttgaacagcaaccatgtgggctactcatgatgggcttgattctttgggaataataaaatgaaataatacttttattttctgaataaaagtttgtcactg

SEQ ID NO: 187295 - DNA, 613 bp, Homo sapiens
  Payload ID: 16875
  Gene Symbol: SQRDL
  Gene Name: sulfide quinone reductase-like (yeast)
  ENST ID: ENST00000561735
  CDS Start-End: 192-613
gttggcacccaggggcggaagcgtcaggtggcctcggtgtcctccgcctgtgcgccccagcctgcggggccgcccttcagggcgcgcaaggggcgagtctgtccagccggcagcaccccaggccggatggacgcttgttcctggttctgtgccccgtgagcgctcaacgccctgcctgatcctgcctgaagatggtgccactggtggctgtggtatcagggccccgtgcccagctctttgcctgcctgctcaggctgggcactcagcaggtcggcccccttcagctgcacaccggggccagccatgcggccaggaaccattatgaggtgctggtgctgggtgggggcagtggcggaatcaccatggctgcccgcatgaagaggaaagtgggtgcagagaatgtggccattgttgagcccagtgagagacatttctaccagccaatctggacactggtgggtgctggtgccaaacaattgtcctcatctggtcgtcccacggcaagtgtgattccatctggtgtagaatggatcaaagctagagtgactgagttgaacccagacaagaactgcattcacacagatgacgacgagaagatctcctaccgatatct

SEQ ID NO: 187296 - DNA, 567 bp, Homo sapiens
  Payload ID: 16875
  Gene Symbol: SQRDL
  Gene Name: sulfide quinone reductase-like (yeast)
  ENST ID: ENST00000563296
  CDS Start-End: 454-567
agtactggaggatcagcctctttgctctgatcttcctcctgagccttccctttcttgtgataaggatccctttcactgttccattctctatttccacccattcctgttgccagcccttcctgcccacgtgtctgcaaatcttcccagagccctgatttggatttattttccttctcccggatgttcttgaattggggtgtgttcctcttagtgctagctcctcctatcacttcttcttcccatcctttaatgatacttctttcagtttcccatatccccaagtgcactttcattcctcgcaaacttcacatgggtaggaatcaagtctgatttttttcaacagtgtatgcctagacagcgggcacagggcttgctggacacagaaggcaaggactcagagaatatccaccagatgaaagaatgactgcatgagtaacctgatcctgcctgaagatggtgccactggtggctgtggtatcagggccccgtgcccagctctttgcctgcctgctcaggctgggcactcagcaggtcggcccccttcagctgcacaccggggccagccat

SEQ ID NO: 187297 - DNA, 527 bp, Homo sapiens
  Payload ID: 16875
  Gene Symbol: SQRDL
  Gene Name: sulfide quinone reductase-like (yeast)
  ENST ID: ENST00000565227
  CDS Start-End: 309-527
aaagacagtactggaggatcagcctctttgctctgatcttcctcctgagccttccctttcttgtgataaggatccctttcactgttccattctctatttccacccattcctgttgccagcccttcctgcccacgtgtctgcaaatcttcccagagccctgatttggatttattttccttctcccggatgttcttgaattgggtgtatgcctagacagcgggcacagggcttgctggacacagaaggcaaggactcagagaatatccaccagatgaaagaatgactgcatgacctgatcctgcctgaagatggtgccactggtggctgtggtatcagggccccgtgcccagctctttgcctgcctgctcaggctgggcactcagcaggtcggcccccttcagctgcacaccggggccagccatgcggccaggaaccattatgaggtgctggtgctgggtgggggcagtggcggaatcaccatggctgcccgcatgaagaggaaagtgggtgcagagaatgtggccatt

SEQ ID NO: 187298 - DNA, 569 bp, Homo sapiens
  Payload ID: 16875
  Gene Symbol: SQRDL
  Gene Name: sulfide quinone reductase-like (yeast)
  ENST ID: ENST00000561493
  CDS Start-End: 146-569
gcagggagttttcccatgttccaggaggcagccagcttgtaactagcaagcattgctatgtttgtatttctgatacattttctaaaagagatcgcagaacaaagggtcctgactcaccaaggatacagcctgatcctgcctgaagatggtgccactggtggctgtggtatcagggccccgtgcccagctctttgcctgcctgctcaggctgggcactcagcaggtcggcccccttcagctgcacaccggggccagccatgcggccaggaaccattatgaggtgctggtgctgggtgggggcagtggcggaatcaccatggctgcccgcatgaagaggaaagtgggtgcagagaatgtggccattgttgagcccagtgagagacatttctaccagccaatctggacactggtgggtgctggtgccaaacaattgtcctcatctggtcgtcccacggcaagtgtgattccatctggtgtagaatggatcaaagctagagtgactgagttgaacccagacaagaactgcattcacacagatgacgacgagaagatctcctaccgatatctta

SEQ ID NO: 187299 - DNA, 2698 bp, Homo sapiens
  Payload ID: 16876
  Gene Symbol: SRXN1
  Gene Name: sulfiredoxin 1
  Uniprot ID: Q9BYN0
  ENST ID: ENST00000381962
  CDS Start-End: 186-599
cggcacctggcgagcggagccggagtcgggctggggaccgcggggtcgaggccggaccgcggcggggtcgggggagaaacgcgcgctgccctggcacgggcccccccccccggccgcgcggaatggtatggcccggccggagttaaggccggggggaggcggcgagtcccgcggcggcggcgacgatggggctgcgtgcaggaggaacgctgggcagggccggcgcgggtcggggggcgcccgaggggcccgggccgagcggcggcgcgcagggcggcagcatccactcgggccgcatcgccgcggtgcacaacgtgccgctgagcgtgctcatccggccgctgccgtccgtgttggaccccgccaaggtgcagagcctcgtggacacgatccgggaggacccagacagcgtgccccccatcgatgtcctctggatcaaaggggcccagggaggtgactacttctactcctttgggggctgccaccgctacgcggcctaccagcaactgcagcgagagaccatccccgccaagcttgtccagtccactctctcagacctaagggtgtacctgggagcatccacaccagacttgcagtagcagcctccttggcacctgctgccaccttcaagagcccagaagacacacctggcctccagcaggctgggccatgcagaagggatagcaggggtgcattctctttgcacctggcgagagggtctgactctgggcacccctctcaccagctacaaggccttggactcactgtacagtgtgggagccccagttcccacctctgtgacaataggatcatggccttacccttgaagcattaccgagaaggagaacagagatgggcttgaagagccacgtgctgccggctccaaattcccaaggacaaggatccctctgcatttttgtctatgtaacctcttatatggactacattcagctgcaaggaaaggaaaaccttgattgcagtggtttaaacaaacagaagattgtttttccacatagcatggattctggagatgggtggctaatggtattggttcaacaactccacgaaggtaggggtcacgtcttggatccttttgccttaatctcagtgctcgttacttcatggtcccaagatggctgctgtatccccaagaatcatgtctgcgttcaaggaaggaggggtggaggaagaggaagggccaaactagctggacccgtcaccttctatcagaaagtaaaacctcgtcagaagtctgtttcctgctctctccctctgcatatcttcacttagatgcccttggcccgagccagctaccattgcacctctagctgcaaacaaagctaagacagcagggaacagaattgtcatggctgaatagaccaatcgtgttccatctactgagactggcacactgcctcctgcaataaaactgggatcccattaccaagagagaaatgcagaattgtgtaccagttagcttttgctgtgtaacaaaccatccccaaacttggcagctagaaacaaaccctgtattttcccacaatcctatgggttggcaatttgggctgggctcaacagggcagttctgctgctcacacctgggatccctcatggagctaaggtcagctgttacctcagctgggcctggatggtctaggatagccttactcacttgcctggcaggtgacaggctgttggctggaattgcttggttctcctccatgtggcctctccagcaggctagctcaggcttattcacatgatggcttcaggattccaaagagagtgagagtagaagctgaaagacttcttgagttcttggcctggaactgggactaggacagtgtcacttctgctaagttcttttggtcagagcaaatcacaaggctttacccagattcaagggatgagaaacagactacatgtcttgatgaggggaaccacaaagagcttgtggccatttttcacctatcacaaataattttggatgggtatttatttggataaaggtatttccctcttccccctttctctctgtctcatggggcctcactctgccaagttggaaggcactaagacattgtcctggccctcagggtctaggggaagaggtgttggggcaggaagtgagtctctccatgggctggacccactgtagtaggagtgcctccttgtctgcactgctggtatggggttaggccaggtaggacattccagaggggcttctgaaaaccaagagtccctggggaaagggaacagagtaaggcaggccttgttctcactgccctctaagggaacttggtcactcggcacttttaagcctcagtttctccagttcaataataaggacaagagcttttcccatgcattctctttccccgggaaagttgactgaggtgaccagtaatagaattgaaaagggagagtgtcttcagtgcaatgtggcatcctggattgggtcttggaacaaaaacaggacattagtgggaaaattggaaatctgaaaaaagtctgaattttagttaatataccaatttcagtctcttggttttgacagatgtaccatggtgatgtaagatgttgaccttggggtaggctgggtgaagggtatacaggaactctttgtactatctctgcaacttctctgtaaatctagtatcattccaaaataaaagtttatttaatttaaaaaaaaaaa

SEQ ID NO: 187300 - DNA, 2364 bp, Homo sapiens
  Payload ID: 16877
  Gene Symbol: SUOX
  Gene Name: sulfite oxidase
  Uniprot ID: P51687
  ENST ID: ENST00000266971
  CDS Start-End: 229-1866
agtgagaggtcacttactgcagccggacataacggcgctggccccgccccttctcgagaactcgcagagctgggctggtaaaattgcagtgctgaagacactggacccgcaaaaggctgtccctcccaaacctgggattctgggctcactgagttcacctgcgagtcagccctacctgcactgctctggtctagtacaaacaggctgctggcattgaggtctgctacaatgctgctgctgcacagagctgtggtcctcaggctccaacaggcctgcagactcaagtcaatcccctcaaggatctgcattcaggcctgctccacaaatgattcatttcagccccagcgccccagcctcaccttctctggtgataactccagcacccagggatggagagtcatggggaccctattaggtctcggtgcagtgttggcctatcaggaccatcggtgtagggctgctcaggagtcaacacacatatacactaaggaggaagtgagttcccacaccagccctgagactgggatctgggtgactctgggctctgaggtctttgatgtcacagaatttgtggacctacatccaggggggccttcaaagctgatgctagcagctgggggtcccctagagcccttctgggccctctatgctgttcacaaccagtcccatgtgcgtgagttactggctcagtacaagattggggagctgaatcctgaagacaaggtagcccccaccgtggagacctctgacccttatgctgatgatcctgtacgtcacccagccctgaaggtcaacagccagcggccctttaatgcagagcctccccctgagctgctgacagaaaactacatcacacccaaccctatcttcttcacccggaaccatctgcctgtacctaacctggatccagacacctatcgcttacacgtagtaggagcacctgggggtcagtcactgtctctttccctggatgacttgcacaactttcccaggtacgagatcacagtcactctgcagtgtgccggcaaccgacgctctgagatgactcaggtcaaagaagtaaaaggtctggagtggagaacaggagccatcagcactgcacgctgggctggggcacggctctgtgatgtgttagcccaggctggccaccaactctgtgaaactgaggcccacgtctgctttgagggactggactcagaccctactgggactgcctatggagcatccatccctctggctcgggccatggaccctgaagctgaggtcctgctggcatatgagatgaatgggcagcctctgccacgtgaccacggcttccctgtgcgtgtggtggttcctggagtggtgggtgcccgccatgtcaaatggctgggcagagtgagtgtgcagccagaggaaagttacagccactggcaacggcgggattacaaaggcttctctccatctgtggactgggagactgtagattttgactctgctccatccattcaggaacttcctgtccagtcggccatcacagagccccgggatggagagactgtagaatcaggggaggtgaccatcaagggctatgcatggagtggtggtggcagggctgtgatccgggtggatgtgtctctggatgggggcctaacctggcaggtggctaagctggatggagaggaacagcgccccaggaaggcctgggcatggcgtctgtggcagttgaaagcccctgtgccagctggacaaaaggaactgaacattgtttgtaaggctgtggatgatggttacaatgtgcagccagacaccgtggccccaatctggaacctgcgaggtgttctcagcaatgcctggcatcgtgtccatgtctatgtctccccatgagcatggaaaggagccacctccacccctttccccacccattagcctcactgcttcagaaaaatctttcccacctttcaacttcttggatcacaactctggccttcctaagccatacccaagtacacatatagcacatttcacccaaggaccttccctctttggacactatgttacatacccctcttggcctttgaacctgtgccaggaagtgtgagctgttacagcaaggggctagaagtgaaaaaagtaattctggagacaagcactattttctcttcctaccccacctccatttctaatgcctactgccatcaaggccttgttttgcttttctttttggattgttcagagaaatgtgtgtggcatgtgtaagaaaagtgtatatactatcttatactacctctccaggttgccagagagttgcgaggagagcaaggggcacaaccgtctccctttatagttctacttttctaataaatagtctgtttaagatcataa

SEQ ID NO: 187301 - DNA, 2306 bp, Homo sapiens
  Payload ID: 16877
  Gene Symbol: SUOX
  Gene Name: sulfite oxidase
  Uniprot ID: P51687
  ENST ID: ENST00000356124
  CDS Start-End: 171-1808
aatggttgagccacccgcttccagccaatggctgagggataagctgaggggagtgagaggtcacttactgcagccggacataacggcgctggccccgccccttctcgagaactcgcagagctgggctggtaaaattgcagtgctgaagacactggacccggtctgctacaatgctgctgctgcacagagctgtggtcctcaggctccaacaggcctgcagactcaagtcaatcccctcaaggatctgcattcaggcctgctccacaaatgattcatttcagccccagcgccccagcctcaccttctctggtgataactccagcacccagggatggagagtcatggggaccctattaggtctcggtgcagtgttggcctatcaggaccatcggtgtagggctgctcaggagtcaacacacatatacactaaggaggaagtgagttcccacaccagccctgagactgggatctgggtgactctgggctctgaggtctttgatgtcacagaatttgtggacctacatccaggggggccttcaaagctgatgctagcagctgggggtcccctagagcccttctgggccctctatgctgttcacaaccagtcccatgtgcgtgagttactggctcagtacaagattggggagctgaatcctgaagacaaggtagcccccaccgtggagacctctgacccttatgctgatgatcctgtacgtcacccagccctgaaggtcaacagccagcggccctttaatgcagagcctccccctgagctgctgacagaaaactacatcacacccaaccctatcttcttcacccggaaccatctgcctgtacctaacctggatccagacacctatcgcttacacgtagtaggagcacctgggggtcagtcactgtctctttccctggatgacttgcacaactttcccaggtacgagatcacagtcactctgcagtgtgccggcaaccgacgctctgagatgactcaggtcaaagaagtaaaaggtctggagtggagaacaggagccatcagcactgcacgctgggctggggcacggctctgtgatgtgttagcccaggctggccaccaactctgtgaaactgaggcccacgtctgctttgagggactggactcagaccctactgggactgcctatggagcatccatccctctggctcgggccatggaccctgaagctgaggtcctgctggcatatgagatgaatgggcagcctctgccacgtgaccacggcttccctgtgcgtgtggtggttcctggagtggtgggtgcccgccatgtcaaatggctgggcagagtgagtgtgcagccagaggaaagttacagccactggcaacggcgggattacaaaggcttctctccatctgtggactgggagactgtagattttgactctgctccatccattcaggaacttcctgtccagtcggccatcacagagccccgggatggagagactgtagaatcaggggaggtgaccatcaagggctatgcatggagtggtggtggcagggctgtgatccgggtggatgtgtctctggatgggggcctaacctggcaggtggctaagctggatggagaggaacagcgccccaggaaggcctgggcatggcgtctgtggcagttgaaagcccctgtgccagctggacaaaaggaactgaacattgtttgtaaggctgtggatgatggttacaatgtgcagccagacaccgtggccccaatctggaacctgcgaggtgttctcagcaatgcctggcatcgtgtccatgtctatgtctccccatgagcatggaaaggagccacctccacccctttccccacccattagcctcactgcttcagaaaaatctttcccacctttcaacttcttggatcacaactctggccttcctaagccatacccaagtacacatatagcacatttcacccaaggaccttccctctttggacactatgttacatacccctcttggcctttgaacctgtgccaggaagtgtgagctgttacagcaaggggctagaagtgaaaaaagtaattctggagacaagcactattttctcttcctaccccacctccatttctaatgcctactgccatcaaggccttgttttgcttttctttttggattgttcagagaaatgtgtgtggcatgtgtaagaaaagtgtatatactatcttatactacctctccaggttgccagagagttgcgaggagagcaaggggcacaaccgtctccctttatagttctacttttctaataaatagtctgtttaagatcataa

SEQ ID NO: 187302 - DNA, 2860 bp, Homo sapiens
  Payload ID: 16877
  Gene Symbol: SUOX
  Gene Name: sulfite oxidase
  Uniprot ID: P51687
  ENST ID: ENST00000394109
  CDS Start-End: 725-2362
gtaatatagggtttggtgcaatctgtggtttcaaacatctactgggggtcgtagaacatatccccagtggataagggggtactactgtacttgttggctcttcatgttagctctgctaggcagatgtcatttcagagatgaggaagcaagttcagaacggcttggaatcttgctcaggaaatcgggctggttaatgaataacaagagatccagtttcacaaacccaaggcattttgcccccagaatctgggcttcttcacccatttaggctgtcactacttttttttcacttttttatccctgtttaagtcagtctgacccacagttgtcctctgctgacttcagaaataataatctggccagtagacatttggtttcggtcctttaggcccttcgccccaggcatcgttctctatggtggacaaagttcagaatggaagatgggagaaaggtgattctgattctagaagcacccatccctcctaccccattccccacccgcattacctgccatcctgtcagcacagtctgtctctgaagtgctccaagttttctctaagggcccatttggactcccactctcaagactcctcacttgcccagaaagctccttgctgaccttctctgtgtcttcctctcacccattcccttaggcctccctaatatcccctcccagggtctccctatcttgatcccagaatcttccttctacaggtctgctacaatgctgctgctgcacagagctgtggtcctcaggctccaacaggcctgcagactcaagtcaatcccctcaaggatctgcattcaggcctgctccacaaatgattcatttcagccccagcgccccagcctcaccttctctggtgataactccagcacccagggatggagagtcatggggaccctattaggtctcggtgcagtgttggcctatcaggaccatcggtgtagggctgctcaggagtcaacacacatatacactaaggaggaagtgagttcccacaccagccctgagactgggatctgggtgactctgggctctgaggtctttgatgtcacagaatttgtggacctacatccaggggggccttcaaagctgatgctagcagctgggggtcccctagagcccttctgggccctctatgctgttcacaaccagtcccatgtgcgtgagttactggctcagtacaagattggggagctgaatcctgaagacaaggtagcccccaccgtggagacctctgacccttatgctgatgatcctgtacgtcacccagccctgaaggtcaacagccagcggccctttaatgcagagcctccccctgagctgctgacagaaaactacatcacacccaaccctatcttcttcacccggaaccatctgcctgtacctaacctggatccagacacctatcgcttacacgtagtaggagcacctgggggtcagtcactgtctctttccctggatgacttgcacaactttcccaggtacgagatcacagtcactctgcagtgtgccggcaaccgacgctctgagatgactcaggtcaaagaagtaaaaggtctggagtggagaacaggagccatcagcactgcacgctgggctggggcacggctctgtgatgtgttagcccaggctggccaccaactctgtgaaactgaggcccacgtctgctttgagggactggactcagaccctactgggactgcctatggagcatccatccctctggctcgggccatggaccctgaagctgaggtcctgctggcatatgagatgaatgggcagcctctgccacgtgaccacggcttccctgtgcgtgtggtggttcctggagtggtgggtgcccgccatgtcaaatggctgggcagagtgagtgtgcagccagaggaaagttacagccactggcaacggcgggattacaaaggcttctctccatctgtggactgggagactgtagattttgactctgctccatccattcaggaacttcctgtccagtcggccatcacagagccccgggatggagagactgtagaatcaggggaggtgaccatcaagggctatgcatggagtggtggtggcagggctgtgatccgggtggatgtgtctctggatgggggcctaacctggcaggtggctaagctggatggagaggaacagcgccccaggaaggcctgggcatggcgtctgtggcagttgaaagcccctgtgccagctggacaaaaggaactgaacattgtttgtaaggctgtggatgatggttacaatgtgcagccagacaccgtggccccaatctggaacctgcgaggtgttctcagcaatgcctggcatcgtgtccatgtctatgtctccccatgagcatggaaaggagccacctccacccctttccccacccattagcctcactgcttcagaaaaatctttcccacctttcaacttcttggatcacaactctggccttcctaagccatacccaagtacacatatagcacatttcacccaaggaccttccctctttggacactatgttacatacccctcttggcctttgaacctgtgccaggaagtgtgagctgttacagcaaggggctagaagtgaaaaaagtaattctggagacaagcactattttctcttcctaccccacctccatttctaatgcctactgccatcaaggccttgttttgcttttctttttggattgttcagagaaatgtgtgtggcatgtgtaagaaaagtgtatatactatcttatactacctctccaggttgccagagagttgcgaggagagcaaggggcacaaccgtctccctttatagttctacttttctaataaatagtctgtttaagatcataa

SEQ ID NO: 187303 - DNA, 2394 bp, Homo sapiens
  Payload ID: 16877
  Gene Symbol: SUOX
  Gene Name: sulfite oxidase
  Uniprot ID: P51687
  ENST ID: ENST00000394115
  CDS Start-End: 298-1935
gaactcgcagagctgggctggtaaaattgcagtgctgaagacactggacccgcaaaaggctgtccctcccaaacctgggattctgggctcactgagttcacctgcgagtcagccctacctgcactgctctggtctagtacaaacaggctgctggcattgagggacggagtctccaactcctggcctctagcagtcctcctgtgtaggtctcccaaagtgctagtgtgtccggaattggtgggttcttggtctcactgacttcaagaatgaagccgcggaccctcgcagtctgctacaatgctgctgctgcacagagctgtggtcctcaggctccaacaggcctgcagactcaagtcaatcccctcaaggatctgcattcaggcctgctccacaaatgattcatttcagccccagcgccccagcctcaccttctctggtgataactccagcacccagggatggagagtcatggggaccctattaggtctcggtgcagtgttggcctatcaggaccatcggtgtagggctgctcaggagtcaacacacatatacactaaggaggaagtgagttcccacaccagccctgagactgggatctgggtgactctgggctctgaggtctttgatgtcacagaatttgtggacctacatccaggggggccttcaaagctgatgctagcagctgggggtcccctagagcccttctgggccctctatgctgttcacaaccagtcccatgtgcgtgagttactggctcagtacaagattggggagctgaatcctgaagacaaggtagcccccaccgtggagacctctgacccttatgctgatgatcctgtacgtcacccagccctgaaggtcaacagccagcggccctttaatgcagagcctccccctgagctgctgacagaaaactacatcacacccaaccctatcttcttcacccggaaccatctgcctgtacctaacctggatccagacacctatcgcttacacgtagtaggagcacctgggggtcagtcactgtctctttccctggatgacttgcacaactttcccaggtacgagatcacagtcactctgcagtgtgccggcaaccgacgctctgagatgactcaggtcaaagaagtaaaaggtctggagtggagaacaggagccatcagcactgcacgctgggctggggcacggctctgtgatgtgttagcccaggctggccaccaactctgtgaaactgaggcccacgtctgctttgagggactggactcagaccctactgggactgcctatggagcatccatccctctggctcgggccatggaccctgaagctgaggtcctgctggcatatgagatgaatgggcagcctctgccacgtgaccacggcttccctgtgcgtgtggtggttcctggagtggtgggtgcccgccatgtcaaatggctgggcagagtgagtgtgcagccagaggaaagttacagccactggcaacggcgggattacaaaggcttctctccatctgtggactgggagactgtagattttgactctgctccatccattcaggaacttcctgtccagtcggccatcacagagccccgggatggagagactgtagaatcaggggaggtgaccatcaagggctatgcatggagtggtggtggcagggctgtgatccgggtggatgtgtctctggatgggggcctaacctggcaggtggctaagctggatggagaggaacagcgccccaggaaggcctgggcatggcgtctgtggcagttgaaagcccctgtgccagctggacaaaaggaactgaacattgtttgtaaggctgtggatgatggttacaatgtgcagccagacaccgtggccccaatctggaacctgcgaggtgttctcagcaatgcctggcatcgtgtccatgtctatgtctccccatgagcatggaaaggagccacctccacccctttccccacccattagcctcactgcttcagaaaaatctttcccacctttcaacttcttggatcacaactctggccttcctaagccatacccaagtacacatatagcacatttcacccaaggaccttccctctttggacactatgttacatacccctcttggcctttgaacctgtgccaggaagtgtgagctgttacagcaaggggctagaagtgaaaaaagtaattctggagacaagcactattttctcttcctaccccacctccatttctaatgcctactgccatcaaggccttgttttgcttttctttttggattgttcagagaaatgtgtgtggcatgtgtaagaaaagtgtatatactatcttatactacctctccaggttgccagagagttgcgaggagagcaaggggcacaaccgtctccctttata

SEQ ID NO: 187304 - DNA, 556 bp, Homo sapiens
  Payload ID: 16877
  Gene Symbol: SUOX
  Gene Name: sulfite oxidase
  ENST ID: ENST00000547586
  CDS Start-End: 429-556
aactcgcagagctgggctggtaaaattgcagtgctgaagacactggacccgcaaaaggctgtccctcccaaacctgggattctgggctcactgagttcacctgcgagtcagccctacctgcactgctctggtctagtacaaacaggctgctggcattgagggacggagtctccaactcctggcctctagcagtcctcctgtgtaggtctcccaaagtgctagtgtgtccggaattggtgggttcttggtctcactgacttcaagaatgaagccgcggaccctcgcagtgagtgttacagttcttaaaggcagcgtgtccggagtttgttccttctgatgttcagatgtgtttggagtttcttccttctggtgggttcgtgctcttgctggctcaggagtgaagctgcagaccttcacagtctgctacaatgctgctgctgcacagagctgtggtcctcaggctccaacaggcctgcagactcaagtcaatcccctcaaggatctgcattcaggcctgctccacaaatgattcatttcagccccagcgccccagcct

SEQ ID NO: 187305 - DNA, 906 bp, Homo sapiens
  Payload ID: 16877
  Gene Symbol: SUOX
  Gene Name: sulfite oxidase
  ENST ID: ENST00000551841
  CDS Start-End: 120-434
caaaaggctgtccctcccaaacctgggattctgggctcactgagttcacctgcgagtcagccctacctgcactgctctggtctagtacaaacaggctgctggcattgaggtctgctacaatgctgctgctgcacagagctgtggtcctcaggctccaacaggcctgcagactcaagtcaatcccctcaaggatctgcattcaggcctgctccacaaatgattcatttcagccccagcgccccagcctcaccttctctggtgataactccagcacccagggatggagagtcatggggaccctattaggtctcggtgcagtgttggcctatcaggaccatcggtgtagggctgctcaggagtcaacacacatatacactaaggaggaagtacgagatcacagtcactctgcagtgtgccggcaaccgacgctctgagatgactcaggtcaaagaagtaaaaggtctggagtggagaacaggagccatcagcactgcacgctgggctggggcacggctctgtgatgtgttagcccaggctggccaccaactctgtgaaactgaggcccacgtctgctttgagggactggactcagaccctactgggactgcctatggagcatccatccctctggctcgggccatggaccctgaagctgaggtcctgctggcatatgagatgaatgggcagcctctgccacgtgaccacggcttccctgtgcgtgtggtggttcctggagtggtgggtgcccgccatgtcaaatggctgggcagagtgagtgtgcagccagaggaaagttacagccactggcaacggcgggattacaaaggcttctctccatctgtggactgggagactgtagattttgactctgctccatccattcaggaacttcctgtccagtcggcc

SEQ ID NO: 187306 - DNA, 952 bp, Homo sapiens
  Payload ID: 16877
  Gene Symbol: SUOX
  Gene Name: sulfite oxidase
  ENST ID: ENST00000546833
  CDS Start-End: 468-952
actggacccggtaaggagactgggggtggtaaagaagctggggaggaagggctgctgagctgggcagcggagggggccttggtgtccagctgtgctccgaacctcaagggcaacaaaactatcagtacctgcctccactccttctgtctgggtgctcttgagatcgcggggtgttgccgcaagacccttttgtgcctggatgccggacgtatgttcctacctaacgtgcccatggggagtgaggggtcatcacctgcaccaacgggtggcatttctgtattacagcaaaaggctgtccctcccaaacctgggattctgggctcactgagttcacctgcgagtcagccctacctgcactgctctggtctagtacaaacaggctgctggcattgaggcccttcgccccaggcatcgttctctatggtggacaaagttcagaatggaagatgggagaaaggtctgctacaatgctgctgctgcacagagctgtggtcctcaggctccaacaggcctgcagactcaagtcaatcccctcaaggatctgcattcaggcctgctccacaaatgattcatttcagccccagcgccccagcctcaccttctctggtgataactccagcacccagggatggagagtcatggggaccctattaggtctcggtgcagtgttggcctatcaggaccatcggtgtagggctgctcaggagtcaacacacatatacactaaggaggaagtgagttcccacaccagccctgagactgggatctgggtgactctgggctctgaggtctttgatgtcacagaatttgtggacctacatccaggggggccttcaaagctgatgctagcagctgggggtcccctagagcccttctgggccctctatgctgttcacaaccagtcccatgtgcgtgagttactggctcagtacaagattggggagctgaatcc

SEQ ID NO: 187307 - DNA, 543 bp, Homo sapiens
  Payload ID: 16877
  Gene Symbol: SUOX
  Gene Name: sulfite oxidase
  ENST ID: ENST00000552258
  CDS Start-End: 181-543
agagctgggctggtaaaattgcagtgctgaagacactggacccgggacggagtctccaactcctggcctctagcagtcctcctgtgtaggtctcccaaagtgctagtgtgtccggaattggtgggttcttggtctcactgacttcaagaatgaagccgcggaccctcgcagtctgctacaatgctgctgctgcacagagctgtggtcctcaggctccaacaggcctgcagactcaagtcaatcccctcaaggatctgcattcaggcctgctccacaaatgattcatttcagccccagcgccccagcctcaccttctctggtgataactccagcacccagggatggagagtcatggggaccctattaggtctcggtgcagtgttggcctatcaggaccatcggtgtagggctgctcaggagtcaacacacatatacactaaggaggaagtgagttcccacaccagccctgagactgggatctgggtgactctgggctctgaggtctttgatgtcacagaatttgtggacctacatccagggggg

SEQ ID NO: 187308 - DNA, 2352 bp, Homo sapiens
  Payload ID: 16877
  Gene Symbol: SUOX
  Gene Name: sulfite oxidase
  Uniprot ID: P51687
  ENST ID: ENST00000548274
  CDS Start-End: 217-1854
agctgggctggtaaaattgcagtgctgaagacactggacccgagacaggttttccccattttggccaggctggtctcaaactcctgacctcaggtgatttgcccgcctcagcctcccaaagtgctgggattacagacgtgagccactgcgccgggcattgttgttaatctcttactgtgggtaatttagtaattaaactataagaggtctgctacaatgctgctgctgcacagagctgtggtcctcaggctccaacaggcctgcagactcaagtcaatcccctcaaggatctgcattcaggcctgctccacaaatgattcatttcagccccagcgccccagcctcaccttctctggtgataactccagcacccagggatggagagtcatggggaccctattaggtctcggtgcagtgttggcctatcaggaccatcggtgtagggctgctcaggagtcaacacacatatacactaaggaggaagtgagttcccacaccagccctgagactgggatctgggtgactctgggctctgaggtctttgatgtcacagaatttgtggacctacatccaggggggccttcaaagctgatgctagcagctgggggtcccctagagcccttctgggccctctatgctgttcacaaccagtcccatgtgcgtgagttactggctcagtacaagattggggagctgaatcctgaagacaaggtagcccccaccgtggagacctctgacccttatgctgatgatcctgtacgtcacccagccctgaaggtcaacagccagcggccctttaatgcagagcctccccctgagctgctgacagaaaactacatcacacccaaccctatcttcttcacccggaaccatctgcctgtacctaacctggatccagacacctatcgcttacacgtagtaggagcacctgggggtcagtcactgtctctttccctggatgacttgcacaactttcccaggtacgagatcacagtcactctgcagtgtgccggcaaccgacgctctgagatgactcaggtcaaagaagtaaaaggtctggagtggagaacaggagccatcagcactgcacgctgggctggggcacggctctgtgatgtgttagcccaggctggccaccaactctgtgaaactgaggcccacgtctgctttgagggactggactcagaccctactgggactgcctatggagcatccatccctctggctcgggccatggaccctgaagctgaggtcctgctggcatatgagatgaatgggcagcctctgccacgtgaccacggcttccctgtgcgtgtggtggttcctggagtggtgggtgcccgccatgtcaaatggctgggcagagtgagtgtgcagccagaggaaagttacagccactggcaacggcgggattacaaaggcttctctccatctgtggactgggagactgtagattttgactctgctccatccattcaggaacttcctgtccagtcggccatcacagagccccgggatggagagactgtagaatcaggggaggtgaccatcaagggctatgcatggagtggtggtggcagggctgtgatccgggtggatgtgtctctggatgggggcctaacctggcaggtggctaagctggatggagaggaacagcgccccaggaaggcctgggcatggcgtctgtggcagttgaaagcccctgtgccagctggacaaaaggaactgaacattgtttgtaaggctgtggatgatggttacaatgtgcagccagacaccgtggccccaatctggaacctgcgaggtgttctcagcaatgcctggcatcgtgtccatgtctatgtctccccatgagcatggaaaggagccacctccacccctttccccacccattagcctcactgcttcagaaaaatctttcccacctttcaacttcttggatcacaactctggccttcctaagccatacccaagtacacatatagcacatttcacccaaggaccttccctctttggacactatgttacatacccctcttggcctttgaacctgtgccaggaagtgtgagctgttacagcaaggggctagaagtgaaaaaagtaattctggagacaagcactattttctcttcctaccccacctccatttctaatgcctactgccatcaaggccttgttttgcttttctttttggattgttcagagaaatgtgtgtggcatgtgtaagaaaagtgtatatactatcttatactacctctccaggttgccagagagttgcgaggagagcaaggggcacaaccgtctccctttatagttctacttttctaataaatagtctgtttaagatcataa

SEQ ID NO: 187309 - DNA, 2511 bp, Homo sapiens
  Payload ID: 16877
  Gene Symbol: SUOX
  Gene Name: sulfite oxidase
  Uniprot ID: P51687
  ENST ID: ENST00000550065
  CDS Start-End: 9-1646
ctgctacaatgctgctgctgcacagagctgtggtcctcaggctccaacaggcctgcagactcaagtcaatcccctcaaggatctgcattcaggcctgctccacaaatgattcatttcagccccagcgccccagcctcaccttctctggtgataactccagcacccagggatggagagtcatggggaccctattaggtctcggtgcagtgttggcctatcaggaccatcggtgtagggctgctcaggagtcaacacacatatacactaaggaggaagtgagttcccacaccagccctgagactgggatctgggtgactctgggctctgaggtctttgatgtcacagaatttgtggacctacatccaggggggccttcaaagctgatgctagcagctgggggtcccctagagcccttctgggccctctatgctgttcacaaccagtcccatgtgcgtgagttactggctcagtacaagattggggagctgaatcctgaagacaaggtagcccccaccgtggagacctctgacccttatgctgatgatcctgtacgtcacccagccctgaaggtcaacagccagcggccctttaatgcagagcctccccctgagctgctgacagaaaactacatcacacccaaccctatcttcttcacccggaaccatctgcctgtacctaacctggatccagacacctatcgcttacacgtagtaggagcacctgggggtcagtcactgtctctttccctggatgacttgcacaactttcccaggtacgagatcacagtcactctgcagtgtgccggcaaccgacgctctgagatgactcaggtcaaagaagtaaaaggtctggagtggagaacaggagccatcagcactgcacgctgggctggggcacggctctgtgatgtgttagcccaggctggccaccaactctgtgaaactgaggcccacgtctgctttgagggactggactcagaccctactgggactgcctatggagcatccatccctctggctcgggccatggaccctgaagctgaggtcctgctggcatatgagatgaatgggcagcctctgccacgtgaccacggcttccctgtgcgtgtggtggttcctggagtggtgggtgcccgccatgtcaaatggctgggcagagtgagtgtgcagccagaggaaagttacagccactggcaacggcgggattacaaaggcttctctccatctgtggactgggagactgtagattttgactctgctccatccattcaggaacttcctgtccagtcggccatcacagagccccgggatggagagactgtagaatcaggggaggtgaccatcaagggctatgcatggagtggtggtggcagggctgtgatccgggtggatgtgtctctggatgggggcctaacctggcaggtggctaagctggatggagaggaacagcgccccaggaaggcctgggcatggcgtctgtggcagttgaaagcccctgtgccagctggacaaaaggaactgaacattgtttgtaaggctgtggatgatggttacaatgtgcagccagacaccgtggccccaatctggaacctgcgaggtgttctcagcaatgcctggcatcgtgtccatgtctatgtctccccatgagcatggaaaggagccacctccacccctttccccacccattagcctcactgcttcagaaaaatctttcccacctttcaacttcttggatcacaactctggccttcctaagccatacccaagtacacatatagcacatttcacccaaggaccttccctctttggacactatgttacatacccctcttggcctttgaacctgtgccaggaagtgtgagctgagagcaaggggcacaaccgtctccctttatagttctacttttctaataaatagtctgtttaagatcataactcttgggcctggggagtgagcctattgcaggaggaaggatgcatttgtactgggatgtataatgagattagaccaaaacaaacaaaactggggaggaagacagagaggaagtaggcttgtaggttaagaagtagggcttccggctgagcacagtggctcacgcctgtaatcccagcacttgggaggccaaggcaggtggatcacttgaggtcaggagttcgagaccagcctggccaacatggcaaaacccagtctctaccaaaaatacaaaaattagctgggtgtggtggtgggtgcctgtaatcccagctacttgggaggctgaggcaggagaatcgcttgaaccaaggaggcagagttcaagcaattctgtctcagcctcccaggtagctgggacgacaggcgcacaccgccacgcccggctaatttcttttgtattttagtagagatgggtttcaccatgttgcccaggctggtctcgaactcctgagctcaggcagtacgtctgcctcggcctcccaaagtgctaggattacaggcgtgagccaccaagcccggcttttttttttttttttt

SEQ ID NO: 187310 - DNA, 1780 bp, Homo sapiens
  Payload ID: 16878
  Gene Symbol: SULT1E1
  Gene Name: sulfotransferase family 1E, estrogen-preferring, member 1
  Uniprot ID: P49888
  ENST ID: ENST00000226444
  CDS Start-End: 114-998
caaatgcagaagtggttctcatctttttttgcagcttaagatctgccttggtatttgaagagatataaactagatcaatttctttcacaggatcaactaaacagtgtaccacaatgaattctgaacttgactattatgaaaagtttgaagaagtccatgggattctaatgtataaagattttgtcaaatattgggataatgtggaagcgttccaggcaagaccagatgatcttgtcattgccacctaccctaaatctggtacaacctgggttagtgaaattgtgtatatgatctataaagagggtgatgtggaaaagtgcaaagaagatgtaatttttaatcgaatacctttcctggaatgcagaaaagaaaacctcatgaatggagtaaaacaattagatgagatgaattctcctagaattgtgaagactcatttgccacctgaacttcttcctgcctcattttgggaaaaggattgtaagataatctatctttgccggaatgcaaaggatgtggctgtttccttttattatttctttctaatggtggctggtcatccaaatcctggatcctttccagagtttgtggagaaattcatgcaaggacaggttccttatggttcctggtataaacatgtaaaatcttggtgggaaaagggaaagagtccacgtgtactatttcttttctacgaagacctgaaagaggatatcagaaaagaggtgataaaattgatacatttcctggaaaggaagccatcagaggagcttgtggacaggattatacatcatacttcgttccaagagatgaagaacaatccatccacaaattacacaacactgccagacgaaattatgaaccagaaattgtcgcccttcatgagaaagggaattacaggagactggaaaaatcactttacagtagccctgaatgaaaaatttgataaacattatgagcagcaaatgaaggaatctacactgaagtttcgaactgagatctaagaaggtctttctttacttaacatatctgatattaaagatttcttttcattattctccactttttcttattttagattgctagaaaagacataatcatggattatgttgacattttctttttaaatttttgtttaactttttttttttttttttgagacagagtctcactctgttgcctaggctggaggacagtggcacaatcatggctgattgcagccttgacctccttgactcaattgatcctcccatctcagcctcccaagtagctaggactacagacatgtgcaaccatgtttggctaatttttttaatgtttttttgtagagatgaggtcttattatattgtccaggctggtcttgaattcctgggctcaagcttcccaagtagctgcaacaacaggcacacaccaccatgctcaactaattttatttctattttttgtatagacaggggcttgctatagtgtccaggctggtctgaaacccttgagctcaagtgatcttcccacaccagcctcccaaaatactgggattacaggcttgagcctccatgcctggcccaggtaacatgtttattgagctgtacatgcatatgagaaataagaaacttttttttcctactatcatctcttaaattttgttttctttttcttttgcttcctcttcttcttttctattttttataaatatcatgcacaactataacctatgggaatgatgtagtaacacagattattcatcttgttagagttgtattaaaaataaacaagcatttcaaatta

SEQ ID NO: 187311 - DNA, 716 bp, Homo sapiens
  Payload ID: 16878
  Gene Symbol: SULT1E1
  Gene Name: sulfotransferase family 1E, estrogen-preferring, member 1
  ENST ID: ENST00000506796
  CDS Start-End: 1-383
atggttcctggtataaacatgtaaaatcttggtgggaaaagggaaagagtccacgtgtactatttcttttctacgaagacctgaaagaggatatcagaaaagaggtgataaaattgatacatttcctggaaaggaagccatcagaggagcttgtggacaggattatacatcatacttcgttccaagagatgaagaacaatccatccacaaattacacaacactgccagacgaaattatgaaccagaaattgtcgcccttcatgagaaagggaattacaggagactggaaaaatcactttacagtagccctgaatgaaaaatttgataaacattatgagcagcaaatgaaggaatctacactgaagtttcgaactgagatctaagaagacaggggcttgctatagtgtccaggctggtctgaaacccttgagctcaagtgatcttcccacaccagcctcccaaaatactgggattacaggcttgagcctccatgcctggcccaggtctaatgtcttcagggtccagtaaaagtacagcgtcataaaagacctccttctgctccctttgctgacacctaccttagcctcgtaagccagaagacttgaaaaggttctggtccacatctcagggatgacctggatcagtgaaatattggatttgatctttaacaatggggatgcagagaaatgtaaacgtgatgcaatatacaagcgagt

SEQ ID NO: 187312 - DNA, 2468 bp, Homo sapiens
  Payload ID: 16879
  Gene Symbol: SULT4A1
  Gene Name: sulfotransferase family 4A, member 1
  Uniprot ID: Q9BR01
  ENST ID: ENST00000330884
  CDS Start-End: 122-976
cggagctgccgccgcgcgccggtggggcgcgagcgtgtgcggggcgcgggcgcgggcgcgggcgcgggcgcgtgcgggctgcgagccgggaggcggcggcggcgacggcgacggcggcggcatggcggagagcgaggccgagacccccagcaccccgggggagttcgagagcaagtacttcgagttccatggcgtgcggctgccgcccttctgccgcgggaagatggaggagatcgccaacttcccggtgcggcccagcgacgtgtggatcgtcacctaccccaagtccggcaccagcttgctgcaggaggtggtctacttggtgagccagggcgctgaccccgatgagatcggcttgatgaacatcgacgagcagctcccggtcctggagtacccacagccgggcctggacatcatcaaggaactgacctctccccgcctcatcaagagccacctgccctaccgctttctgccctctgacctccacaatggagactccaaggtcatctatatggctcgcaaccccaaggatctggtggtgtcttattatcagttccaccgctctctgcggaccatgagctaccgaggcacctttcaagaattctgccggaggtttatgaatgataagctgggctacggctcctggtttgagcacgtgcaggagttctgggagcaccgcatggactcgaacgtgctttttctcaagtatgaagacatgcatcgggacctggtgacgatggtggagcagctggccagattcctgggggtgtcctgtgacaaggcccagctggaagccctgacggagcactgccaccagctggtggaccagtgctgcaacgctgaggccctgcccgtgggccggggaagagttgggctgtggaaggacatcttcaccgtctccatgaatgagaagtttgacttggtgtataaacagaagatgggaaagtgtgacctcacgtttgacttttatttataataacagaaacaacaacctgcatgctcacaatacccagacagtctactagccaaaagtcctgtatgcattcatttattccttgctggacaaactctggaagcagcgtgtgaaacagcgggggaagggaagagcggcgtgagcggagggagtgtgatgattcccaaccgaaagcagctgtctcgcctttagaacgtgcagcctctccatgtctgattacaaacagtctccacattgcagttccaatggcctggaccgtaaggataaagcctgtaatatatgcaactagaatgtctgccttttcaaccccgtattattgtattttatagagcttttcactggaaatctacataaatgtcagtaaaccaaataaaagttcatttccaaggggaatcaggagcgagccacacccgaatggtagaaagatctcagggttaactctttatttttgtagttttattatctaaggcacagccattctgttctcacttggttctgagatagtggtgagaacagaggatgagttgggtctgttggggggaatctggacacttgtttattctgacggagttcacttcttcagaaccttcctgaaatgagcagaaattgttcactaggtcttcagaatggacgtccttctgccagagacttccagcgggcggctccaaaggcccaatgcagaggagcccgcggagcatgtgctgagggaagtctgcctggtgaggctggcaggtgggagtctaatgcagtcaggagcatttgcatgcagtgggtggagagtcggccaccaaaggaccgagttgcgctcggaatttgagctgaattccacagccttactttgtttcctgaagtgatagcctactaatgctggcaagcagatgcttaatagtaaatttctaaaatccccgggtctttatcattcagtttgttctgtgcacctgaggcgctcagccgtgggaggaccattttgcgagtgtagccctgtttcactcggatcaggttggcacggccgcctgcgtgtctgtccacctcatccctccgtgtatctgagggagtaaaggtgaggtctttattgcttcactgcctaattttctcacccacattcgctgaagcgatggagagtcgggggccagtagccagccaaccccgtggggaccggggttgtctgtcatttatgtggctggaaagcacccaaagtggtggtcaggagggtcgctgctgtggaaggggtctccgttcttggtgctgtatttgaaacgggtgtagagagaagcttgtgtttttgtttgtaatggggagaagcgtggccaggcaggtggcacgtggcatcgcatggtgggctcggcagcaccttgcctgtgtttctgtgagggaggctgctttctgtgaaatttcatttatatttttctatttttagtactgtatggatgttactgagcactacacatgatccttctgtgcttgcttgcatctttaataaagacatgttcccggc

SEQ ID NO: 187313 - DNA, 2561 bp, Homo sapiens
  Payload ID: 16879
  Gene Symbol: SULT4A1
  Gene Name: sulfotransferase family 4A, member 1
  Uniprot ID: Q9BR01
  ENST ID: ENST00000422525
  CDS Start-End: 89-871
cgtgtgcggggcgcgggcgcgggcgcgggcgcgggcgcgtgcgggctgcgagccgggaggcggcggcggcgacggcgacggcggcggcatggcggagagcgaggccgagacccccagcaccccgggggagttcgagagcaagtacttcgagttccatggcgtgcggctgccgcccttctgccgcgggaagatggaggagatcgccaacttcccggtgcggcccagcgacgtgtggatcgtcacctaccccaagtccggcaccagcttgctgcaggaggtggtctacttggtgagccagggcgctgaccccgatgagatcggcttgatgaacatcgacgagcagctcccggtcctggagtacccacagccgggcctggacatcatcaaggaactgacctctccccgcctcatcaagagccacctgccctaccgctttctgccctctgacctccacaatggagactccaaggtcatctatatggctcgcaaccccaaggatctggtggtgtcttattatcagttccaccgctctctgcggaccatgagctaccgaggcacctttcaagaattctgccggaggtttatgaatgataagctgggctacggctcctggtttgagcacgtgcaggagttctgggagcaccgcatggactcgaacgtgctttttctcaagtatgaagacatgcatcgggacctggtgacgatggtggagcagctggccagattcctgggggtgtcctgtgacaaggcccagctggaagccctgacggagcactgccaccagctggtggaccagtgctgcaacgctgaggccctgcccgtgggccgggcacattgcgtctttgctcggaagatcttcttgagttggtgagaatgcagggccgagtagccagctgcattgcttagatttgattcatgtcacagcataaattgtcttgattccaaatcctaaaccaggaagagttgggctgtggaaggacatcttcaccgtctccatgaatgagaagtttgacttggtgtataaacagaagatgggaaagtgtgacctcacgtttgacttttatttataataacagaaacaacaacctgcatgctcacaatacccagacagtctactagccaaaagtcctgtatgcattcatttattccttgctggacaaactctggaagcagcgtgtgaaacagcgggggaagggaagagcggcgtgagcggagggagtgtgatgattcccaaccgaaagcagctgtctcgcctttagaacgtgcagcctctccatgtctgattacaaacagtctccacattgcagttccaatggcctggaccgtaaggataaagcctgtaatatatgcaactagaatgtctgccttttcaaccccgtattattgtattttatagagcttttcactggaaatctacataaatgtcagtaaaccaaataaaagttcatttccaaggggaatcaggagcgagccacacccgaatggtagaaagatctcagggttaactctttatttttgtagttttattatctaaggcacagccattctgttctcacttggttctgagatagtggtgagaacagaggatgagttgggtctgttggggggaatctggacacttgtttattctgacggagttcacttcttcagaaccttcctgaaatgagcagaaattgttcactaggtcttcagaatggacgtccttctgccagagacttccagcgggcggctccaaaggcccaatgcagaggagcccgcggagcatgtgctgagggaagtctgcctggtgaggctggcaggtgggagtctaatgcagtcaggagcatttgcatgcagtgggtggagagtcggccaccaaaggaccgagttgcgctcggaatttgagctgaattccacagccttactttgtttcctgaagtgatagcctactaatgctggcaagcagatgcttaatagtaaatttctaaaatccccgggtctttatcattcagtttgttctgtgcacctgaggcgctcagccgtgggaggaccattttgcgagtgtagccctgtttcactcggatcaggttggcacggccgcctgcgtgtctgtccacctcatccctccgtgtatctgagggagtaaaggtgaggtctttattgcttcactgcctaattttctcacccacattcgctgaagcgatggagagtcgggggccagtagccagccaaccccgtggggaccggggttgtctgtcatttatgtggctggaaagcacccaaagtggtggtcaggagggtcgctgctgtggaaggggtctccgttcttggtgctgtatttgaaacgggtgtagagagaagcttgtgtttttgtttgtaatggggagaagcgtggccaggcaggtggcacgtggcatcgcatggtgggctcggcagcaccttgcctgtgtttctgtgagggaggctgctttctgtgaaatttcatttatatttttctatttttagtactgtatggatgttactgagcactacacatgatccttctgtgcttgcttgcatctttaataaagacatgttcccgg

SEQ ID NO: 187314 - DNA, 2239 bp, Homo sapiens
  Payload ID: 16879
  Gene Symbol: SULT4A1
  Gene Name: sulfotransferase family 4A, member 1
  ENST ID: ENST00000432404
  CDS Start-End: 25-252
ggcggcgacggcgacggcggcggcatggcggagagcgaggccgagacccccagcaccccgggggagttcgagagcaagtacttcgagttccatggcgtgcggctgccgcccttctgccgcgggaagatggaggagatcgccaacttcccggtgcggcccagcgacgtgtggatcgtcacctaccccaagtccggaactgacctctccccgcctcatcaagagccacctgccctaccgctttctgccctctgacctccacaatggagactccaaggtcatctatatggctcgcaaccccaaggatctggtggtgtcttattatcagttccaccgctctctgcggaccatgagctaccgaggcacctttcaagaattctgccggaggtttatgaatgataagctgggctacggctcctggtttgagcacgtgcaggagttctgggagcaccgcatggactcgaacgtgctttttctcaagtatgaagacatgcatcgggacctggtgacgatggtggagcagctggccagattcctgggggtgtcctgtgacaaggcccagctggaagccctgacggagcactgccaccagctggtggaccagtgctgcaacgctgaggccctgcccgtgggccggggaagagttgggctgtggaaggacatcttcaccgtctccatgaatgagaagtttgacttggtgtataaacagaagatgggaaagtgtgacctcacgtttgacttttatttataataacagaaacaacaacctgcatgctcacaatacccagacagtctactagccaaaagtcctgtatgcattcatttattccttgctggacaaactctggaagcagcgtgtgaaacagcgggggaagggaagagcggcgtgagcggagggagtgtgatgattcccaaccgaaagcagctgtctcgcctttagaacgtgcagcctctccatgtctgattacaaacagtctccacattgcagttccaatggcctggaccgtaaggataaagcctgtaatatatgcaactagaatgtctgccttttcaaccccgtattattgtattttatagagcttttcactggaaatctacataaatgtcagtaaaccaaataaaagttcatttccaaggggaatcaggagcgagccacacccgaatggtagaaagatctcagggttaactctttatttttgtagttttattatctaaggcacagccattctgttctcacttggttctgagatagtggtgagaacagaggatgagttgggtctgttggggggaatctggacacttgtttattctgacggagttcacttcttcagaaccttcctgaaatgagcagaaattgttcactaggtcttcagaatggacgtccttctgccagagacttccagcgggcggctccaaaggcccaatgcagaggagcccgcggagcatgtgctgagggaagtctgcctggtgaggctggcaggtgggagtctaatgcagtcaggagcatttgcatgcagtgggtggagagtcggccaccaaaggaccgagttgcgctcggaatttgagctgaattccacagccttactttgtttcctgaagtgatagcctactaatgctggcaagcagatgcttaatagtaaatttctaaaatccccgggtctttatcattcagtttgttctgtgcacctgaggcgctcagccgtgggaggaccattttgcgagtgtagccctgtttcactcggatcaggttggcacggccgcctgcgtgtctgtccacctcatccctccgtgtatctgagggagtaaaggtgaggtctttattgcttcactgcctaattttctcacccacattcgctgaagcgatggagagtcgggggccagtagccagccaaccccgtggggaccggggttgtctgtcatttatgtggctggaaagcacccaaagtggtggtcaggagggtcgctgctgtggaaggggtctccgttcttggtgctgtatttgaaacgggtgtagagagaagcttgtgtttttgtttgtaatggggagaagcgtggccaggcaggtggcacgtggcatcgcatggtgggctcggcagcaccttgcctgtgtttctgtgagggaggctgctttctgtgaaatttcatttatatttttctatttttagtactgtatggatgttactgagcactacacatgatccttctgtgcttgcttgcatctttaataaagacatgttcccgg

SEQ ID NO: 187315 - DNA, 1162 bp, Homo sapiens
  Payload ID: 16880
  Gene Symbol: SULT1A1
  Gene Name: sulfotransferase family, cytosolic, 1A, phenol-preferring, member 1
  Uniprot ID: P50225
  ENST ID: ENST00000314752
  CDS Start-End: 82-969
cctgcattccccacacaacacccacaatcagccactgcgggcgaggagggcacgaggccaggttcccaagagctcaggaacatggagctgatccaggacacctcccgcccgccactggagtacgtgaagggggtcccgctcatcaagtactttgcagaggcactggggcccctgcagagcttccaggcccggcctgatgacctgctcatcagcacctaccccaagtccggcactacctgggtaagccagattctggacatgatctaccagggtggtgacctggagaagtgtcaccgagctcccatcttcatgcgggtgcccttccttgagttcaaagccccagggattccctcagggatggagactctgaaagacacaccggccccacgactcctgaagacacacctgcccctggctctgctcccccagactctgttggatcagaaggtcaaggtggtctatgttgcccgcaacgcaaaggatgtggcagtttcctactaccacttctaccacatggccaaggtgcaccctgagcctgggacctgggacagcttcctggagaagttcatggtcggagaagtgtcctacggatcctggtaccagcacgtgcaggagtggtgggagctgagccgcacccaccctgttctctacctcttctatgaagacatgaaggagaacccgaaaagggagattcaaaagatcctggagtttgtggggcgctccctgccagaggagaccgtggacttcgtggttcagcacacgtcgttcaaggagatgaagaagaaccctatgaccaactacaccaccgtcccccaggagttcatggaccacagcatctcccccttcatgaggaaaggcatggctggggactggaagaccaccttcaccgtggcgcagaatgagcgcttcgatgcggactatgcggagaagatggcaggctgcagcctcagcttccgctctgagctgtgagaggggctcctggagtcactgcagagggagtgtgcgaatcaaacctgaccaagcggctcaagaataaaatatgaattgagggcccgggacggtaggtcatgtctgtaatcccagcaatttggaggctgaggtgggaggatcatttgagcccaggagttcgagaccaacctgggcaacatagtgagattctgtt

SEQ ID NO: 187316 - DNA, 1282 bp, Homo sapiens
  Payload ID: 16880
  Gene Symbol: SULT1A1
  Gene Name: sulfotransferase family, cytosolic, 1A, phenol-preferring, member 1
  Uniprot ID: P50225
  ENST ID: ENST00000350842
  CDS Start-End: 390-1043
ggctgctgcagcgcagtagctgctggaggctggcgaggcccggaggcggtgcaggaagcctccgaccacgcgggctcctgatcgcgggcgcccacagcgcggacatggcgggctggtggccggcgttgtcgcgcacggcccggcgccacccgtggcccaccaacgtgctgctctacgttgctcgagcaacgtagctctacgctctacgagcgtgccgtagctcgctcgtctccgccggggacgtgctgcagcaacggctgcagggccgctaggccgactggcgccagacgcggcgcgtggccacgttggtggtgaccttccacgccaacttcaactacgtgtggctgggcctgctggagcgcgcgctcccgggccgagcgccgcgcgccatgctggccaagttgctgtgcgaccaggtggtcggtgcgcccatcgcggtctcggccttctacgccggtatgagcattctccagggaaaggatgacatatttttggacctgaaacagaaattctggaacacctatatggtggtctatgttgcccgcaacgcaaaggatgtggcagtttcctactaccacttctaccacatggccaaggtgcaccctgagcctgggacctgggacagcttcctggagaagttcatggtcggagaagtgtcctacggatcctggtaccagcacgtgcaggagtggtgggagctgagccgcacccaccctgttctctacctcttctatgaagacatgaaggagaacccgaaaagggagattcaaaagatcctggagtttgtggggcgctccctgccagaggagaccgtggacttcgtggttcagcacacgtcgttcaaggagatgaagaagaaccctatgaccaactacaccaccgtcccccaggagttcatggaccacagcatctcccccttcatgaggaaaggcatggctggggactggaagaccaccttcaccgtggcgcagaatgagcgcttcgatgcggactatgcggagaagatggcaggctgcagcctcagcttccgctctgagctgtgagaggggctcctggagtcactgcagagggagtgtgcgaatcaaacctgaccaagcggctcaagaataaaatatgaattgagggcccgggacggtaggtcatgtctgtaatcccagcaatttggaggctgaggtgggaggatcatttgagcccaggagttcgagaccaacctgggcaacatagtgagattctgttaaaaaaataaaataaaataaaaccaatttttaaaaagagaataaaa

SEQ ID NO: 187317 - DNA, 1386 bp, Homo sapiens
  Payload ID: 16880
  Gene Symbol: SULT1A1
  Gene Name: sulfotransferase family, cytosolic, 1A, phenol-preferring, member 1
  Uniprot ID: P50225
  ENST ID: ENST00000395607
  CDS Start-End: 275-1162
tttccacatgtgaggggctgaggggctcaaggaggggagcatctccactgggtggaggctgggggtcccagcaggaagtggtgagacaaagggcgctggctggcagggagacagcacaggaaggtcctagagcttcctcagtgcagctggactctcctggagaccttcacacaccctgacatctgggccttgcccgacgagggtgctttcactggtctgcaccatggcccaggccctgggattttgaacagctccgcaggtgaatgaaaggaacatggagctgatccaggacacctcccgcccgccactggagtacgtgaagggggtcccgctcatcaagtactttgcagaggcactggggcccctgcagagcttccaggcccggcctgatgacctgctcatcagcacctaccccaagtccggcactacctgggtaagccagattctggacatgatctaccagggtggtgacctggagaagtgtcaccgagctcccatcttcatgcgggtgcccttccttgagttcaaagccccagggattccctcagggatggagactctgaaagacacaccggccccacgactcctgaagacacacctgcccctggctctgctcccccagactctgttggatcagaaggtcaaggtggtctatgttgcccgcaacgcaaaggatgtggcagtttcctactaccacttctaccacatggccaaggtgcaccctgagcctgggacctgggacagcttcctggagaagttcatggtcggagaagtgtcctacggatcctggtaccagcacgtgcaggagtggtgggagctgagccgcacccaccctgttctctacctcttctatgaagacatgaaggagaacccgaaaagggagattcaaaagatcctggagtttgtggggcgctccctgccagaggagaccgtggacttcgtggttcagcacacgtcgttcaaggagatgaagaagaaccctatgaccaactacaccaccgtcccccaggagttcatggaccacagcatctcccccttcatgaggaaaggcatggctggggactggaagaccaccttcaccgtggcgcagaatgagcgcttcgatgcggactatgcggagaagatggcaggctgcagcctcagcttccgctctgagctgtgagaggggctcctggagtcactgcagagggagtgtgcgaatcaaacctgaccaagcggctcaagaataaaatatgaattgagggcccgggacggtaggtcatgtctgtaatcccagcaatttggaggctgaggtgggaggatcatttgagcccaggagttcgagaccaacctgggcaacatagtgagattctgttaaaaaaataaaataaaataaaaccaattttt

SEQ ID NO: 187318 - DNA, 1871 bp, Homo sapiens
  Payload ID: 16880
  Gene Symbol: SULT1A1
  Gene Name: sulfotransferase family, cytosolic, 1A, phenol-preferring, member 1
  Uniprot ID: P50225
  ENST ID: ENST00000395609
  CDS Start-End: 760-1647
cgaggcccggaggcggtgcaggaagcctccgaccacgcgggctcctgatcgcgggcgcccacagcgcggacatggcgggctggtggccggcgttgtcgcgcacggcccggcgccacccgtggcccaccaacgtgctgctctacgttgctcgagcaacgtagctctacgctctacgagcgtgccgtagctcgctcgtctccgccggggacgtgctgcagcaacggctgcagggccgctaggccgactggcgccagacgcggcgcgtggccacgttggtggtgaccttccacgccaacttcaactacgtgtggctgggcctgctggagcgcgcgctcccgggccgagcgccgcgcgccatgctggccaagttgctgtgcgaccaggtggtcggtgcgcccatcgcggtctcggccttctacgccggtatgagcattctccagggaaaggatgacatatttttggacctgaaacagaaattctggaacacctatatgcaaactcagtcgtggctttggagatcactttaagcttgtctccagctggcacactaaggagggtaatggagaagctcccccacccccaaccccaccccttccttccggaagcaaatctaagtccagccccggctccagatccctcccacagtggacctaggaaaccctcagctcagagaacaaccctgcattccccacacaacacccacaatcagccactgcgggcgaggagggcacgaggccaggttcccaagagctcaggaacatggagctgatccaggacacctcccgcccgccactggagtacgtgaagggggtcccgctcatcaagtactttgcagaggcactggggcccctgcagagcttccaggcccggcctgatgacctgctcatcagcacctaccccaagtccggcactacctgggtaagccagattctggacatgatctaccagggtggtgacctggagaagtgtcaccgagctcccatcttcatgcgggtgcccttccttgagttcaaagccccagggattccctcagggatggagactctgaaagacacaccggccccacgactcctgaagacacacctgcccctggctctgctcccccagactctgttggatcagaaggtcaaggtggtctatgttgcccgcaacgcaaaggatgtggcagtttcctactaccacttctaccacatggccaaggtgcaccctgagcctgggacctgggacagcttcctggagaagttcatggtcggagaagtgtcctacggatcctggtaccagcacgtgcaggagtggtgggagctgagccgcacccaccctgttctctacctcttctatgaagacatgaaggagaacccgaaaagggagattcaaaagatcctggagtttgtggggcgctccctgccagaggagaccgtggacttcgtggttcagcacacgtcgttcaaggagatgaagaagaaccctatgaccaactacaccaccgtcccccaggagttcatggaccacagcatctcccccttcatgaggaaaggcatggctggggactggaagaccaccttcaccgtggcgcagaatgagcgcttcgatgcggactatgcggagaagatggcaggctgcagcctcagcttccgctctgagctgtgagaggggctcctggagtcactgcagagggagtgtgcgaatcaaacctgaccaagcggctcaagaataaaatatgaattgagggcccgggacggtaggtcatgtctgtaatcccagcaatttggaggctgaggtgggaggatcatttgagcccaggagttcgagaccaacctgggcaacatagtgagattctgttaaaaaaataaaataaaataaaaccaattttt

SEQ ID NO: 187319 - DNA, 1653 bp, Homo sapiens
  Payload ID: 16880
  Gene Symbol: SULT1A1
  Gene Name: sulfotransferase family, cytosolic, 1A, phenol-preferring, member 1
  ENST ID: ENST00000564818
  CDS Start-End: 56-226
ctacgtgtggctgggcctgctggagcgcgcgctcccgggccgagcgccgcgcgccatgctggccaagttgctgtgcgaccaggtggtcggtgcgcccatcgcggtctcggccttctacgccggtatgagcattctccagggaaaggatgacatatttttggacctgaaacagaaattctggaacacctatatgcaaactcagtcgtggctttggagatcactttaagcttgtctccagctggcacactaaggagggtaatggagaagctcccccacccccaaccccaccccttccttccggaagcaaatctaagtccagccccggctccagatccctcccacagtggacctaggaaaccctcagctcagagaacaaccctgcattccccacacaacacccacaatcagccactgcgggcgaggagggcacgaggccaggttcccaagagctcagctctggcccctagtagcagctcagttcctcaatgggccgtgtttgtcctggagcccagatggactgtggccaggaacatggagctgatccaggacacctcccgcccgccactggagtacgtgaagggggtcccgctcatcaagtactttgcagaggcactggggcccctgcagagcttccaggcccggcctgatgacctgctcatcagcacctaccccaagtccggcactacctgggtaagccagattctggacatgatctaccagggtggtgacctggagaagtgtcaccgagctcccatcttcatgcgggtgcccttccttgagttcaaagccccagggattccctcagggatggagactctgaaagacacaccggccccacgactcctgaagacacacctgcccctggctctgctcccccagactctgttggatcagaaggtcaaggtggtctatgttgcccgcaacgcaaaggatgtggcagtttcctactaccacttctaccacatggccaaggtgcaccctgagcctgggacctgggacagcttcctggagaagttcatggtcggagaagtgtcctacggatcctggtaccagcacgtgcaggagtggtgggagctgagccgcacccaccctgttctctacctcttctatgaagacatgaaggagaacccgaaaagggagattcaaaagatcctggagtttgtggggcgctccctgccagaggagaccgtggacttcgtggttcagcacacgtcgttcaaggagatgaagaagaaccctatgaccaactacaccaccgtcccccaggagttcatggaccacagcatctcccccttcatgaggaaaggcatggctggggactggaagaccaccttcaccgtggcgcagaatgagcgcttcgatgcggactatgcggagaagatggcaggctgcagcctcagcttccgctctgagctgtgagaggggctcctggagtcactgcagagggagtgtgcgaatcaaacctgaccaagcggctcaagaataaaatatgaattgagggcccgggacggtaggtcatgtctgtaatcccagcaatttggaggctgaggtgggaggatcatttgagcccaggagttcgagaccaacctgggcaacatagtgagattctgttaaaaaaataaaataaaataaaaccaatttttaaaaagagaa

SEQ ID NO: 187320 - DNA, 615 bp, Homo sapiens
  Payload ID: 16880
  Gene Symbol: SULT1A1
  Gene Name: sulfotransferase family, cytosolic, 1A, phenol-preferring, member 1
  ENST ID: ENST00000567512
  CDS Start-End: 107-615
ggaaaccctcagctcagagaacaaccctgcattccccacacaacacccacaatcagccactgcgggcgaggagggcacgaggccaggttcccaagagctcaggaacatggagctgatccaggacacctcccgcccgccactggagtacgtgaagggggtcccgctcatcaagtactttgcagaggcactggggcccctgcagagcttccaggcccggcctgatgacctgctcatcagcacctaccccaagtccgggatggagactctgaaagacacaccggccccacgactcctgaagacacacctgcccctggctctgctcccccagactctgttggatcagaaggtcaaggtggtctatgttgcccgcaacgcaaaggatgtggcagtttcctactaccacttctaccacatggccaaggtgcaccctgagcctgggacctgggacagcttcctggagaagttcatggtcggagaagtgtcctacggatcctggtaccagcacgtgcaggagtggtgggagctgagccgcacccaccctgttctctacctcttctatgaagacatgaaggagaacccgaaaagggagattcaaaagatcctggagtttgtggg

SEQ ID NO: 187321 - DNA, 1876 bp, Homo sapiens
  Payload ID: 16880
  Gene Symbol: SULT1A1
  Gene Name: sulfotransferase family, cytosolic, 1A, phenol-preferring, member 1
  ENST ID: ENST00000562058
  CDS Start-End: 357-527
cgaggcccggaggcggtgcaggaagcctccgaccacgcgggctcctgatcgcgggcgcccacagcgcggacatggcgggctggtggccggcgttgtcgcgcacggcccggcgccacccgtggcccaccaacgtgctgctctacgttgctcgagcaacgtagctctacgctctacgagcgtgccgtagctcgctcgtctccgccggggacgtgctgcagcaacggctgcagggccgctaggccgactggcgccagacgcggcgcgtggccacgttggtggtgaccttccacgccaacttcaactacgtgtggctgggcctgctggagcgcgcgctcccgggccgagcgccgcgcgccatgctggccaagttgctgtgcgaccaggtggtcggtgcgcccatcgcggtctcggccttctacgccggtatgagcattctccagggaaaggatgacatatttttggacctgaaacagaaattctggaacacctatatgcaaactcagtcgtggctttggagatcactttaagcttgtctccagctggcacactaaggagggtaatggagaagctcccccacccccaaccccaccccttccttccggaagcaaatctaagtccagccccggctccagatccctcccacagtggacctaggaaaccctcagctcagagaacaaccctgcattccccacacaacacccacaatcagccactgcgggcgaggagggcacgaggccaggttcccaagagctcaggaacatggagctgatccaggacacctcccgcccgccactggagtacgtgaagggggtcccgctcatcaagtactttgcagaggcactggggcccctgcagagcttccaggcccggcctgatgacctgctcatcagcacctaccccaagtccggcactacctgggtaagccagattctggacatgatctaccagggtggtgacctggagaagtgtcaccgagctcccatcttcatgcgggtgcccttccttgagttcaaagccccagggattccctcagggatggagactctgaaagacacaccggccccacgactcctgaagacacacctgcccctggctctgctcccccagactctgttggatcagaaggtcaaggtggtctatgttgcccgcaacgcaaaggatgtggcagtttcctactaccacttctaccacatggccaaggtgcaccctgagcctgggacctgggacagcttcctggagaagttcatggtcggagaagtgtcctacggatcctggtaccagcacgtgcaggagtggtgggagctgagccgcacccaccctgttctctacctcttctatgaagacatgaaggagaacccgaaaagggagattcaaaagatcctggagtttgtggggcgctccctgccagaggagaccgtggacttcgtggttcagcacacgtcgttcaaggagatgaagaagaaccctatgaccaactacaccaccgtcccccaggagttcatggaccacagcatctcccccttcatgaggaaaggcatggctggggactggaagaccaccttcaccgtggcgcagaatgagcgcttcgatgcggactatgcggagaagatggcaggctgcagcctcagcttccgctctgagctgtgagaggggctcctggagtcactgcagagggagtgtgcgaatcaaacctgaccaagcggctcaagaataaaatatgaattgagggcccgggacggtaggtcatgtctgtaatcccagcaatttggaggctgaggtgggaggatcatttgagcccaggagttcgagaccaacctgggcaacatagtgagattctgttaaaaaaataaaataaaataaaaccaatttttaaaaa

SEQ ID NO: 187322 - DNA, 939 bp, Homo sapiens
  Payload ID: 16880
  Gene Symbol: SULT1A1
  Gene Name: sulfotransferase family, cytosolic, 1A, phenol-preferring, member 1
  ENST ID: ENST00000566189
  CDS Start-End: 96-939
acacccacaatcagccactgcgggcgaggagggcacgaggccaggttcccaagagctcagggaacgggcctggctctggcccctgacgcaggaacatggagctgatccaggacacctcccgcccgccactggagtacgtgaagggggtcccgctcatcaagtactttgcagaggcactggggcccctgcagagcttccaggcccggcctgatgacctgctcatcagcacctaccccaagtccggcactacctgggtaagccagattctggacatgatctaccagggtggtgacctggagaagtgtcaccgagctcccatcttcatgcgggtgcccttccttgagttcaaagccccagggattccctcagggatggagactctgaaagacacaccggccccacgactcctgaagacacacctgcccctggctctgctcccccagactctgttggatcagaaggtcaaggtggtctatgttgcccgcaacgcaaaggatgtggcagtttcctactaccacttctaccacatggccaaggtgcaccctgagcctgggacctgggacagcttcctggagaagttcatggtcggagaagtgtcctacggatcctggtaccagcacgtgcaggagtggtgggagctgagccgcacccaccctgttctctacctcttctatgaagacatgaaggagaacccgaaaagggagattcaaaagatcctggagtttgtggggcgctccctgccagaggagaccgtggacttcgtggttcagcacacgtcgttcaaggagatgaagaagaaccctatgaccaactacaccaccgtcccccaggagttcatggaccacagcatctcccccttcatgaggaaaggcatggctggggactggaagaccaccttcaccgtggcgcagaatgagcgcttcgatgcggactatgcgg

SEQ ID NO: 187323 - DNA, 1651 bp, Homo sapiens
  Payload ID: 16880
  Gene Symbol: SULT1A1
  Gene Name: sulfotransferase family, cytosolic, 1A, phenol-preferring, member 1
  ENST ID: ENST00000563493
  CDS Start-End: 429-686
accgctcaggagctcctggaggaggcaggtgcaggtgccggctgctgcagcgcagtagctgctggaggctggcgaggcccggaggcggtgcaggaagcctccgaccacgcgggctcctgatcgcgggcgcccacagcgcggacatggcgggctggtggccggcgttgtcgcgcacggcccggcgccacccgtggcccaccaacgtgctgctctacgttgctcgagcaacgtagctctacgctctacgagcgtgccgtagctcgctcgtctccgccggggacgtgctgcagcaacggctgcagggccgctaggccgactggcgccagacgcggcgcgtggccacgttggtggtgaccttccacgccaacttcaactacgtgtggctgggcctgctggagcgcgcgctcccgggccgagcgccgcgcgccatgctggccaagttgctgtgcgaccaggtggtcggtgcgcccatcgcggtctcggccttctacgccggtatgagcattctccagggaaaggatgacatatttttggacctgaaacagaaattctggaacacctatatggaacatggagctgatccaggacacctcccgcccgccactggagtacgtgaagggggtcccgctcatcaagtactttgcagaggcactggggcccctgcagagcttccaggcccggcctgatgacctgctcatcagcacctaccccaagtccggcactacctgggtaagccagattctggacatgatctaccagggtggtgacctggagaagtgtcaccgagctcccatcttcatgcgggtgcccttccttgagttcaaagccccagggattccctcagggatggagactctgaaagacacaccggccccacgactcctgaagacacacctgcccctggctctgctcccccagactctgttggatcagaaggtcaaggtggtctatgttgcccgcaacgcaaaggatgtggcagtttcctactaccacttctaccacatggccaaggtgcaccctgagcctgggacctgggacagcttcctggagaagttcatggtcggagaagtgtcctacggatcctggtaccagcacgtgcaggagtggtgggagctgagccgcacccaccctgttctctacctcttctatgaagacatgaaggagaacccgaaaagggagattcaaaagatcctggagtttgtggggcgctccctgccagaggagaccgtggacttcgtggttcagcacacgtcgttcaaggagatgaagaagaaccctatgaccaactacaccaccgtcccccaggagttcatggaccacagcatctcccccttcatgaggaaaggcatggctggggactggaagaccaccttcaccgtggcgcagaatgagcgcttcgatgcggactatgcggagaagatggcaggctgcagcctcagcttccgctctgagctgtgagaggggctcctggagtcactgcagagggagtgtgcgaatcaaacctgaccaagcggctcaagaataaaatatgaattgagggcccgggacggtaggtcatgtctgtaatcccagcaatttggaggctgaggtgggaggatcatttgagcccaggagttcgagaccaacctgggcaacatagtgagattctgtt

SEQ ID NO: 187324 - DNA, 1578 bp, Homo sapiens
  Payload ID: 16880
  Gene Symbol: SULT1A1
  Gene Name: sulfotransferase family, cytosolic, 1A, phenol-preferring, member 1
  Uniprot ID: P50225
  ENST ID: ENST00000569554
  CDS Start-End: 66-953
ccactttcttgctgttgtgatggtggtaagggaacgggcctggctctggcccctgacgcaggaacatggagctgatccaggacacctcccgcccgccactggagtacgtgaagggggtcccgctcatcaagtactttgcagaggcactggggcccctgcagagcttccaggcccggcctgatgacctgctcatcagcacctaccccaagtccggcactacctgggtaagccagattctggacatgatctaccagggtggtgacctggagaagtgtcaccgagctcccatcttcatgcgggtgcccttccttgagttcaaagccccagggattccctcagggatggagactctgaaagacacaccggccccacgactcctgaagacacacctgcccctggctctgctcccccagactctgttggatcagaaggtcaaggtggtctatgttgcccgcaacgcaaaggatgtggcagtttcctactaccacttctaccacatggccaaggtgcaccctgagcctgggacctgggacagcttcctggagaagttcatggtcggagaagtgtcctacggatcctggtaccagcacgtgcaggagtggtgggagctgagccgcacccaccctgttctctacctcttctatgaagacatgaaggagaacccgaaaagggagattcaaaagatcctggagtttgtggggcgctccctgccagaggagaccgtggacttcgtggttcagcacacgtcgttcaaggagatgaagaagaaccctatgaccaactacaccaccgtcccccaggagttcatggaccacagcatctcccccttcatgaggaaaggcatggctggggactggaagaccaccttcaccgtggcgcagaatgagcgcttcgatgcggactatgcggagaagatggcaggctgcagcctcagcttccgctctgagctgtgagaggggctcctggagtcactgcagagggagtgtgcgaatcaaacctgaccaagcggctcaagaataaaatatgaattgagggcccgggacggtaggtcatgtctgtaatcccagcaatttggaggctgaggtgggaggatcatttgagcccaggagttcgagaccaacctgggcaacatagtgagattctgttaaaaaaataaaataaaataaaaccaatttttaaaaagagaataaaatatgattgtgggccaggcagagtggctcatgcctgtaatcccagcaatttgagaagttgaggctagaggatcactggaggacaggagtttgggaccagcctgttcaacattacaagacatcatccctacaaaaatttgagaaaattatctgtacgtgatggtgggcacctgtagtcccagctacttgacaagtgaaggcaggaggatcgcctgagccagggaggttatggctgcagtgggctgactgggctaatccactcaagcctgagggacagagcaaatcttgcttgagaaataaataaaatacaatttacttaacataaattatgattcaggaccagtctggccaacatggtgaaaccccgtctctactaaaaaaaaaaaaa

SEQ ID NO: 187325 - DNA, 1090 bp, Homo sapiens
  Payload ID: 16881
  Gene Symbol: SULT1A2
  Gene Name: sulfotransferase family, cytosolic, 1A, phenol-preferring, member 2
  Uniprot ID: P50226
  ENST ID: ENST00000335715
  CDS Start-End: 118-1005
acactgacctaagaaaccctcagcacagacaacacccctgcattccccacacaacacccacactcagccactgcgggcgaggagggcacaaggccaggttcccaagagctcaggaacatggagctgatccaggacatctctcgcccgccactggagtacgtgaagggggtcccgctcatcaagtactttgcagaggcactggggcccctgcagagcttccaggcccggcctgatgacctgctcatcagcacctaccccaagtccggcaccacctgggtgagccagattctggacatgatctaccagggcggtgacctggaaaagtgtcaccgagctcccatcttcatgcgggtgcccttccttgagttcaaagtcccagggattccctcagggatggagactctgaaaaacacaccagccccacgactcctgaagacacacctgcccctggctctgctcccccagactctgttggatcagaaggtcaaggtggtctatgttgcccgcaacgcaaaggatgtggcggtttcctactaccacttctaccacatggccaaagtgtaccctcaccctgggacctgggaaagcttcctggagaagttcatggctggagaagtgtcctatgggtcctggtaccagcacgtgcaagagtggtgggagctgagccgcacccaccctgttctctacctcttctatgaagacatgaaggagaaccccaaaagggagattcaaaagatcctggagtttgtggggcgctccctgccagaggagactgtggacctcatggttgagcacacgtcgttcaaggagatgaagaagaaccctatgaccaactacaccaccgtccgccgggagttcatggaccacagcatctcccccttcatgaggaaaggcatggctggggactggaagaccaccttcaccgtggcgcagaatgagcgcttcgatgcggactatgcgaagaagatggcaggctgcagcctcagcttccgctctgagctgtgagaggggttcctggagtcactgcagagggagtgtgcgaatcaagcctgaccaagaggctccagaataaagtatgatttgtgttcaa

SEQ ID NO: 187326 - DNA, 1322 bp, Homo sapiens
  Payload ID: 16881
  Gene Symbol: SULT1A2
  Gene Name: sulfotransferase family, cytosolic, 1A, phenol-preferring, member 2
  Uniprot ID: P50226
  ENST ID: ENST00000395630
  CDS Start-End: 352-1239
gtttgtcctggagcccagatggactgtggccgggcaagtggatcacaggcctggccagcctaggagttgccacatgtgaggggccgaggggctcaaggaggggaacatcggggagaggagcctactgggtggaggctgggggtcccagcaggaaatggtgagacaaagggcgctggctggcaggaagacagcacaggaaggtcctagaggttcctcagtgcagctggactctcctggagaccttcacacaccctgacatctgggccccgcgccacgagggtgctttcactggtctgcaccatggcccaggccctgggattttgaacagctccgcaggtgaatgaaaggaacatggagctgatccaggacatctctcgcccgccactggagtacgtgaagggggtcccgctcatcaagtactttgcagaggcactggggcccctgcagagcttccaggcccggcctgatgacctgctcatcagcacctaccccaagtccggcaccacctgggtgagccagattctggacatgatctaccagggcggtgacctggaaaagtgtcaccgagctcccatcttcatgcgggtgcccttccttgagttcaaagtcccagggattccctcagggatggagactctgaaaaacacaccagccccacgactcctgaagacacacctgcccctggctctgctcccccagactctgttggatcagaaggtcaaggtggtctatgttgcccgcaacgcaaaggatgtggcggtttcctactaccacttctaccacatggccaaagtgtaccctcaccctgggacctgggaaagcttcctggagaagttcatggctggagaagtgtcctatgggtcctggtaccagcacgtgcaagagtggtgggagctgagccgcacccaccctgttctctacctcttctatgaagacatgaaggagaaccccaaaagggagattcaaaagatcctggagtttgtggggcgctccctgccagaggagactgtggacctcatggttgagcacacgtcgttcaaggagatgaagaagaaccctatgaccaactacaccaccgtccgccgggagttcatggaccacagcatctcccccttcatgaggaaaggcatggctggggactggaagaccaccttcaccgtggcgcagaatgagcgcttcgatgcggactatgcgaagaagatggcaggctgcagcctcagcttccgctctgagctgtgagaggggttcctggagtcactgcagagggagtgtgcgaatcaagcctgaccaagaggctccagaataaagtatgatttgtgttc

SEQ ID NO: 187327 - DNA, 1540 bp, Homo sapiens
  Payload ID: 16881
  Gene Symbol: SULT1A2
  Gene Name: sulfotransferase family, cytosolic, 1A, phenol-preferring, member 2
  ENST ID: ENST00000534108
  CDS Start-End: 445-1110
atcggggagaggagcctactgggtggaggctgggggtcccagcaggaaatggtgagacaaagggcgctggctggcaggaagacagcacaggaaggtcctagaggttcctcagtgcagctggactctcctggagaccttcacacaccctgacatctgggccccgcgccacgagggtgctttcactggtctgcaccatggcccaggccctgggattttgaacagctccgcaggtgaatgaaaggtgaggccaggctggggaaccaccacattagagcccgacctggttttcagccccagccccgccactgactggccttgtgagtgcgggcaagtcactcagcctccctaggcctcagtgacttccctgaaagcaagaattccactttcttgctgttgtgatggtggtaagggaacgggcctggctctggcccctgacgcaggaacatggagctgatccaggacatctctcgcccgccactggagtacgtgaagggggtcccgctcatcaagtactttgcagaggcactggggcccctgcagagcttccaggcccggcctgatgacctgctcatcagcacctaccccaagtccggcaccacctgggtgagccagattctggacatgatctaccagggcggtgacctggaaaagtgtcaccgagctcccatcttcatgcgggtgcccttccttgagttcaaagtcccagggattccctcaggtgtgtgtgtcctgggtgcaaggggagtggaggaagacagggctggggcttcagctcaccagaccttccctgacccactgctcagggatggagactctgaaaaacacaccagccccacgactcctgaagacacacctgcccctggctctgctcccccagactctgttggatcagaaggtcaaggtggtctatgttgcccgcaacgcaaaggatgtggcggtttcctactaccacttctaccacatggccaaagtgtaccctcaccctgggacctgggaaagcttcctggagaagttcatggctggagaagtgtcctatgggtcctggtaccagcacgtgcaagagtggtgggagctgagccgcacccaccctgttctctacctcttctatgaagacatgaaggagcaatccaagcctccactgaggagccctctgctgctcagaaccccaaaagggagattcaaaagatcctggagtttgtggggcgctccctgccagaggagactgtggacctcatggttgagcacacgtcgttcaaggagatgaagaagaaccctatgaccaactacaccaccgtccgccgggagttcatggaccacagcatctcccccttcatgaggaaaggcatggctggggactggaagaccaccttcaccgtggcgcagaatgagcgcttcgatgcggactatgcgaagaagatggcaggctgcagcctcagcttccgctctgagctgtgagaggggttcctggagtcactgcagagggagtgtgcgaatcaagcctgaccaagaggctccagaataaagtatgatttgtgttcaa

SEQ ID NO: 187328 - DNA, 1991 bp, Homo sapiens
  Payload ID: 16881
  Gene Symbol: SULT1A2
  Gene Name: sulfotransferase family, cytosolic, 1A, phenol-preferring, member 2
  ENST ID: ENST00000533150
  CDS Start-End: 1118-1906
ctcagccactgcgggcgaggagggcacaaggccaggttcccaagagctcaggtgagtgacacaccggaatggcccaggacgccctcaccctgctcagcttgtggctccaacattccagaagccgaggcctctgctatccctgccctctccccatggatatcccatttcagacaaccccggccggcctgaatccccctcccttccttttttttttttccggggaggccaggtcttgctgtcaccgaggctggagtgctgtgggatcctggccactgcagccttgaattcctgggctcaagtgattctcctgcctcagtagctaggactacagaccctcaccatcctgcctggatagttttaaaaaatatttttaaaagatttttagagatggggtcttccaatgctgcccagattggtctccaaattctggcctcagcctccctagggtctgggattacaggtgggagccaccctgcccaggatcctccttttgctgagtcatcacagttttgctcattcccacatcaggctctggcccccaataccagctcagttgctcaatgggctgtttgtcctggagcccagatggactgtggccgggcaagtggatcacaggcctggccagcctaggagttgccacatgtgaggggccgaggggctcaaggaggggaacatcggggagaggagcctactgggtggaggctgggggtcccagcaggaaatggtgagacaaagggcgctggctggcaggaagacagcacaggaaggtcctagaggttcctcagtgcagctggactctcctggagaccttcacacaccctgacatctgggccccgcgccacgagggtgctttcactggtctgcaccatggcccaggccctgggattttgaacagctccgcaggtgaatgaaaggtgaggccaggctggggaaccaccacattagagcccgacctggttttcagccccagccccgccactgactggccttgtgagtgcgggcaagtcactcagcctccctaggcctcagtgacttccctgaaagcaagaattccactttcttgctgttgtgatggtggtaagggaacgggcctggctctggcccctgacgcaggaacatggagctgatccaggacatctctcgcccgccactggagtacgtgaagggggtcccgctcatcaagtactttgcagaggcactggggcccctgcagagcttccaggcccggcctgatgacctgctcatcagcacctaccccaagtccggcaccacctgggtgagccagattctggacatgatctaccagggcggtgacctggaaaagtgtcaccgagctcccatcttcatgcgggtgcccttccttgagttcaaagtcccagggattccctcaggtgtgtgtgtcctgggtgcaaggggagtggaggaagacagggctggggcttcagctcaccagaccttccctgacccactgctcagggatggagactctgaaaaacacaccagccccacgactcctgaagacacacctgcccctggctctgctcccccagactctgttggatcagaaggtcaagcaatccaagcctccactgaggagccctctgctgctcagaaccccaaaagggagattcaaaagatcctggagtttgtggggcgctccctgccagaggagactgtggacctcatggttgagcacacgtcgttcaaggagatgaagaagaaccctatgaccaactacaccaccgtccgccgggagttcatggaccacagcatctcccccttcatgaggaaaggcatggctggggactggaagaccaccttcaccgtggcgcagaatgagcgcttcgatgcggactatgcgaagaagatggcaggctgcagcctcagcttccgctctgagctgtgagaggggttcctggagtcactgcagagggagtgtgcgaatcaagcctgaccaagaggctccagaataaagtatgatttgtgttcaa

SEQ ID NO: 187329 - DNA, 773 bp, Homo sapiens
  Payload ID: 16881
  Gene Symbol: SULT1A2
  Gene Name: sulfotransferase family, cytosolic, 1A, phenol-preferring, member 2
  ENST ID: ENST00000526384
  CDS Start-End: 198-773
agacagcacaggaaggtcctagaggttcctcagtgcagctggactctcctggagaccttcacacaccctgacatctgggccccgcgccacgagggtgctttcactggtctgcaccatggcccaggccctgggattttgaacagctccgcaggtgaatgaaagggaacgggcctggctctggcccctgacgcaggaacatggagctgatccaggacatctctcgcccgccactggagtacgtgaagggggtcccgctcatcaagtactttgcagaggcactggggcccctgcagagcttccaggcccggcctgatgacctgctcatcagcacctaccccaagtccggcaccacctgggtgagccagattctggacatgatctaccagggcggtgacctggaaaagtgtcaccgagctcccatcttcatgcgggtgcccttccttgagttcaaagtcccagggattccctcagggatggagactctgaaaaacacaccagccccacgactcctgaagacacacctgcccctggctctgctcccccagactctgttggatcagaaggtcaaggtggtctatgttgcccgcaacgcaaaggatgtggcggtttcctactaccacttctaccacatggccaaagtgtaccctcaccctgggacctgggaaagcttcctggagaagttcatggctggagaagtgtcctatgggtcctggtaccagcacgtgcaagagtggtgggagctgagccgcacccaccctgttctctacctcttc

SEQ ID NO: 187330 - DNA, 1097 bp, Homo sapiens
  Payload ID: 16882
  Gene Symbol: SULT1A3
  Gene Name: sulfotransferase family, cytosolic, 1A, phenol-preferring, member 3
  Uniprot ID: P0DMM9
  ENST ID: ENST00000338971
  CDS Start-End: 102-989
accctcagggcagagagcagccctacactccctacaccacacccatactcagcccctgcaggcaaggagagaacaggtcaggttcccgagagctcaggaacatggagctgatccaggacacctcccgcccgccactggagtacgtgaagggggtcccgctcatcaagtactttgcagaggcactggggcccctgcagagcttccaagcccgacctgatgacctgctcatcaacacctaccccaagtctggcaccacctgggtgagccagatactggacatgatctaccagggcggcgacctagagaagtgtaaccgggctcccatctacgtacgggtgcccttccttgaggtcaatgatccaggggaaccctcagggctggagactctgaaagacacaccgcccccacggctcatcaagtcacacctgcccctggctctgctccctcagactctgttggatcagaaggtcaaggtggtctatgttgcccgaaacccaaaggacgtggcggtctcctactaccatttccaccgtatggaaaaggcgcaccctgagcctgggacctgggacagcttcctggaaaagttcatggctggagaagtgtcctacgggtcctggtaccagcacgtgcaggagtggtgggagctgagccgcacccaccctgttctctacctcttctatgaagacatgaaggagaaccccaaaagggagattcaaaagatcctggagtttgtggggcgctccctgccagaggagaccatggacttcatggttcagcacacgtcgttcaaggagatgaagaagaaccctatgaccaactacaccaccgtcccccaggagctcatggaccacagcatctcccccttcatgaggaaaggcatggctggggactggaagaccaccttcaccgtggcgcagaatgagcgcttcgatgcggactatgcggagaagatggcaggctgcagcctcagcttccgctctgagctgtgagaggggctcctggagtcactgcagagggagtgtgcgaatctaccctgaccaatgggctcaagaataaagtatgatttttgagtcaggcacagtggctcatgtctgcaa

SEQ ID NO: 187331 - DNA, 1326 bp, Homo sapiens
  Payload ID: 16882
  Gene Symbol: SULT1A3
  Gene Name: sulfotransferase family, cytosolic, 1A, phenol-preferring, member 3
  Uniprot ID: P0DMM9
  ENST ID: ENST00000395138
  CDS Start-End: 49-936
caatgggctgtgtttgttctggagcccagatggactgtggccaggaacatggagctgatccaggacacctcccgcccgccactggagtacgtgaagggggtcccgctcatcaagtactttgcagaggcactggggcccctgcagagcttccaagcccgacctgatgacctgctcatcaacacctaccccaagtctggcaccacctgggtgagccagatactggacatgatctaccagggcggcgacctagagaagtgtaaccgggctcccatctacgtacgggtgcccttccttgaggtcaatgatccaggggaaccctcagggctggagactctgaaagacacaccgcccccacggctcatcaagtcacacctgcccctggctctgctccctcagactctgttggatcagaaggtcaaggtggtctatgttgcccgaaacccaaaggacgtggcggtctcctactaccatttccaccgtatggaaaaggcgcaccctgagcctgggacctgggacagcttcctggaaaagttcatggctggagaagtgtcctacgggtcctggtaccagcacgtgcaggagtggtgggagctgagccgcacccaccctgttctctacctcttctatgaagacatgaaggagaaccccaaaagggagattcaaaagatcctggagtttgtggggcgctccctgccagaggagaccatggacttcatggttcagcacacgtcgttcaaggagatgaagaagaaccctatgaccaactacaccaccgtcccccaggagctcatggaccacagcatctcccccttcatgaggaaaggcatggctggggactggaagaccaccttcaccgtggcgcagaatgagcgcttcgatgcggactatgcggagaagatggcaggctgcagcctcagcttccgctctgagctgtgagaggggctcctggagtcactgcagagggagtgtgcgaatctaccctgaccaatgggctcaagaataaagtatgatttttgagtcaggcacagtggctcatgtctgcaatcccagcgatttgggaggttgagctggtaggatcacaataggccacgaatttgagaccagcctggtaaaatagtgagacctcatctctacaaagatgtaaaaaaattagccacatgtgctggcacttacctgtagtcccagctacttgggaagcagaggctggaggatcatttcagcccaggaggttgtggatacagtgagttatgacatgcccattcactacagcctggatgacaagcaagaccctccctccaaagaaaataaagctcaattaaaataaaa

SEQ ID NO: 187332 - DNA, 906 bp, Homo sapiens
  Payload ID: 16882
  Gene Symbol: SULT1A3
  Gene Name: sulfotransferase family, cytosolic, 1A, phenol-preferring, member 3
  Uniprot ID: P0DMM9
  ENST ID: ENST00000563322
  CDS Start-End: 1-906
atggagctgatccaggacacctcccgcccgccactggagtacgtgaagggggtcccgctcatcaagtactttgcagaggcactggggcccctgcagagcttccaagcccgacctgatgacctgctcatcaacacctaccccaagtctggcaccacctgggtgagccagatactggacatgatctaccagggcggcgacctagagaagtgtaaccgggctcccatctacgtacgggtgcccttccttgaggtcaatgatccaggggaaccctcagggctggagactctgaaagacacaccgcccccacggctcatcaagtcacacctgcccctggctctgctccctcagactctgttggatcagaaggtcaaggtggtctatgttgcccgaaacccaaaggacgtggcggtctcctactaccatttccaccgtatggaaaaggcgcaccctgagcctgggacctgggacagcttcctggaaaagttcatggctggagaagtgtcctacgggtcctggtaccagcacgtgcaggagtggtgggagctgagccgcacccaccctgttctctacctcttctatgaagacatgaaggaggagccctctgctgctcagaaccccaaaagggagattcaaaagatcctggagtttgtggggcgctccctgccagaggagaccatggacttcatggttcagcacacgtcgttcaaggagatgaagaagaaccctatgaccaactacaccaccgtcccccaggagctcatggaccacagcatctcccccttcatgaggaaaggcatggctggggactggaagaccaccttcaccgtggcgcagaatgagcgcttcgatgcggactatgcggagaagatggcaggctgcagcctcagcttccgctctgagctgtga

SEQ ID NO: 187333 - DNA, 405 bp, Homo sapiens
  Payload ID: 16882
  Gene Symbol: SULT1A3
  Gene Name: sulfotransferase family, cytosolic, 1A, phenol-preferring, member 3
  ENST ID: ENST00000569485
  CDS Start-End: 1-405
ctacgtacgggtgcccttccttgaggtcaatgatccaggggaaccctcagggctggagactctgaaagacacaccgcccccacggctcatcaagtcacacctgcccctggctctgctccctcagactctgttggatcagaaggtcaaggtggtctatgttgcccgaaacccaaaggacgtggcggtctcctactaccatttccaccgtatggaaaaggcgcaccctgagcctgggacctgggacagcttcctggaaaagttcatggctggagaagtgtcctacgggtcctggtaccagcacgtgcaggagtggtgggagctgagccgcacccaccctgttctctacctcttctatgaagacatgaaggaggagctcatggaccacagcatctcccccttcatgag

SEQ ID NO: 187334 - DNA, 858 bp, Homo sapiens
  Payload ID: 16882
  Gene Symbol: SULT1A3
  Gene Name: sulfotransferase family, cytosolic, 1A, phenol-preferring, member 3
  ENST ID: ENST00000563638
  CDS Start-End: 1-152
tgcccttccttgaggtcaatgatccaggggaaccctcagggctggagactctgaaagacacaccgcccccacggctcatcaagtcacacctgcccctggctctgctccctcagactctgttggatcagaaggtcaagagcgcaatcgtgtgatctcggttcactgcaaccaccgcctcctgggttcaagcaattctcctgcttcagcctcccaaggagctgggattacaggtggtctatgttgcccgaaacccaaaggacgtggcggtctcctactaccatttccaccgtatggaaaaggcgcaccctgagcctgggacctgggacagcttcctggaaaagttcatggctggagaagtgtcctacgggtcctggtaccagcacgtgcaggagtggtgggagctgagccgcacccaccctgttctctacctcttctatgaagacatgaaggagaaccccaaaagggagattcaaaagatcctggagtttgtggggcgctccctgccagaggagaccatggacttcatggttcagcacacgtcgttcaaggagatgaagaagaaccctatgaccaactacaccaccgtcccccaggagctcatggaccacagcatctcccccttcatgaggaaaggcatggctggggactggaagaccaccttcaccgtggcgcagaatgagcgcttcgatgcggactatgcggagaagatggcaggctgcagcctcagcttccgctctgagctgtgagaggggctcctggagtcactgcagagggagtgtgcgaatctaccctgaccaatgggctcaagaataaagtatgatttttgagtcaggcacagtggctcatgtctgcaatccc

SEQ ID NO: 187335 - DNA, 1390 bp, Homo sapiens
  Payload ID: 16883
  Gene Symbol: SULT1A4
  Gene Name: sulfotransferase family, cytosolic, 1A, phenol-preferring, member 4
  Uniprot ID: P0DMN0
  ENST ID: ENST00000360423
  CDS Start-End: 102-989
accctcagggcagagagcagccctacactccctacaccacacccatactcagcccctgcaggcaaggagagaacaggtcaggttcccgagagctcaggaacatggagctgatccaggacacctcccgcccgccactggagtacgtgaagggggtcccgctcatcaagtactttgcagaggcactggggcccctgcagagcttccaagcccgacctgatgacctgctcatcaacacctaccccaagtctggcaccacctgggtgagccagatactggacatgatctaccagggcggcgacctagagaagtgtaaccgggctcccatctacgtacgggtgcccttccttgaggtcaatgatccaggggaaccctcagggctggagactctgaaagacacaccgcccccacggctcatcaagtcacacctgcccctggctctgctccctcagactctgttggatcagaaggtcaaggtggtctatgttgcccgaaacccaaaggacgtggcggtctcctactaccatttccaccgtatggaaaaggcgcaccctgagcctgggacctgggacagcttcctggaaaagttcatggctggagaagtgtcctacgggtcctggtaccagcacgtgcaggagtggtgggagctgagccgcacccaccctgttctctacctcttctatgaagacatgaaggagaaccccaaaagggagattcaaaagatcctggagtttgtggggcgctccctgccagaggagaccatggacttcatggttcagcacacgtcgttcaaggagatgaagaagaaccctatgaccaactacaccaccgtcccccaggagctcatggaccacagcatctcccccttcatgaggaaaggcatggctggggactggaagaccaccttcaccgtggcgcagaatgagcgcttcgatgcggactatgcggagaagatggcaggctgcagcctcagcttccgctctgagctgtgagaggggctcctggagtcactgcagagggagtgtgcgaatctaccctgaccaatgggctcaagaataaagtatgatttttgagtcaggcacagtggctcatgtctgcaatcccagcgatttgggaggttgagctggtaggatcacaataggccacgaatttgagaccagcctggtaaaatagtgagacctcatctctacaaagatgtaaaaaaattagccacatgtgctggcacttacctgtagtcccagctacttgggaagcagaggctggaggatcatttcagcccaggaggttgtggatacagtgagttatgacatgcccattcactacagcctggatgacaagcaagaccctccctccaaagaaaataaagctcaaaataaaatatgatttgtgttca

SEQ ID NO: 187336 - DNA, 740 bp, Homo sapiens
  Payload ID: 16883
  Gene Symbol: SULT1A4
  Gene Name: sulfotransferase family, cytosolic, 1A, phenol-preferring, member 4
  ENST ID: ENST00000569544
  CDS Start-End: 5-268
gaacatggagctgatccaggacacctcccgcccgccactggagtacgtgaagggggtcccgctcatcaagtactttgcagaggcactggggcccctgcagagcttccaagcccgacctgatgacctgctcatcaacacctaccccaagtctggcaccacctgggtgagccagatactggacatgatctaccagggcggcgacctagagaagtgtaaccgggctcccatctacgtacgggtgcccttccttgagggctggagactctgaaagacacaccgcccccacggctcatcaagtcacacctgcccctggctctgctccctcagactctgttggatcagaaggtcaaggtggtctatgttgcccgaaacccaaaggacgtggcggtctcctactaccatttccaccgtatggaaaaggcgcaccctgagcctgggacctgggacagcttcctggaaaagttcatggctggagaagtgtcctacgggtcctggtaccagcacgtgcaggagtggtgggagctgagccgcacccaccctgttctctacctcttctatgaagacatgaaggagaaccccaaaagggagattcaaaagatcctggagtttgtggggcgctccctgccagaggagaccatggacttcatggttcagcacacgtcgttcaaggagatgaagaagaaccctatgaccaactacaccaccgtcccccaggagctcatggaccacagcatctcccc

SEQ ID NO: 187337 - DNA, 906 bp, Homo sapiens; identical to SEQ ID NO: 187332
  Payload ID: 16883
  Gene Symbol: SULT1A4
  Gene Name: sulfotransferase family, cytosolic, 1A, phenol-preferring, member 4
  ENST ID: ENST00000565290
  CDS Start-End: 1-906

SEQ ID NO: 187338 - DNA, 858 bp, Homo sapiens; identical to SEQ ID NO: 187334
  Payload ID: 16883
  Gene Symbol: SULT1A4
  Gene Name: sulfotransferase family, cytosolic, 1A, phenol-preferring, member 4
  ENST ID: ENST00000563944
  CDS Start-End: 1-152

SEQ ID NO: 187339 - DNA, 7115 bp, Homo sapiens
  Payload ID: 16884
  Gene Symbol: SULT1B1
  Gene Name: sulfotransferase family, cytosolic, 1B, member 1
  Uniprot ID: O43704
  ENST ID: ENST00000310613
  CDS Start-End: 299-1189
ggaacttgcctcatgtgtgtgtatgtgtgtgtgtgtgattgtgggtgtgggtagtttaacctttttatatcttagctgcctgtaaactcagtgattgctacgttcagatcaaaccttgaacttttttttttctggtgccaggagccttcctgtgctccccattgcctgccagaaccaccaccgtttcccatggttactctacagcagcttcactgcctgaaaatgaaaactgaacaaagggattaaattgtgagaacaactgtcaatctattatatatttgtacaatctggtattaaaatgctttccccaaaagatattctgcgaaaagatctgaagttggtccatggttatcccatgacctgtgcttttgcaagcaactgggaaaaaattgaacagttccatagcagaccagatgacattgtgatagccacttatcctaaatcaggtactacttgggttagtgaaattatagacatgattctaaatgatggagatattgaaaaatgtaagcgaggttttattactgaaaaagttccaatgttggaaatgactctccctggattaagaacatcaggtatagaacaattggagaagaatccatcaccccggattgtgaaaacacatctaccgactgatcttcttcctaaatctttctgggaaaacaattgcaagatgatttatctggctcgtaatgccaaggatgtttcagtctcatattaccattttgacttaatgaataatttacagccttttcctggtacctgggaagaatatctggagaaattcttaactggaaaagtggcctatggttcctggtttactcatgttaaaaactggtggaagaaaaaggaagaacacccaatactttttttgtactatgaagatatgaaagagaatccaaaggaggaaatcaagaagatcattagatttctagagaagaacctgaatgatgagatcttggataggatcatccatcacacctcatttgaagtgatgaaggacaatcctttggtaaattatacacatctaccaactacagtgatggatcatagcaaatccccttttatgcgtaaagggacggctggtgactggaagaattacttcaccgtggcccaaaatgagaaatttgatgctatttatgagacagaaatgtccaaaactgcacttcaattccgcacagagatttaaagtgtctaaatcacacatctgaagaaataagagattgtctgtagttgattgaaacgagggcagttatgaattgatttgggcaatcaaatgaatttataaaggagaataatatgcttttaatatgttgattcttttcaatgttattaatcagatcccagttttgttcctttgattctgagtttccaaattctctaaggctaaagttcattgttaactttttgtaacaaaggaacaatgtaaccacaggctcttcctgcctttttctacactagtactgataagaaagaagggatttattttacttaatctcccatatattatgatttagaattaagttcccctccctagtaccatggtccaagaaatgctgttttcataatgagactatatttcctaactctgccccaatttccctttgccgaaaatttgacccaggacactgtgttccactgctgtctaccgagtttcaagttgttctctgagtcatagctcatcttcctgcagtgcctctatttggataacaaagttcatgtccccgatcatgtagttcagattttggaaatcttttttctatatcatacctaatgtctaagtctccgaaaggcaaacgcctacaatagtctctgtaggattggttacctgggaactggagctctgttctgaaaagcagccctgagggctgtgacctacttcttatggggagtcctctttttcccaacagacccgtttgaacttcagagaaatcacctactgctgtgttctggtcaccatttgggaacttcagttacttaatcttatatttggatagatttggataccttaatagcacctttaatatcctagacatgatcataacctctgcaaaatatttcccaatctggtgcccaaggaagactctctaggctgaatctccactctgccctcttgacccaatgttccttctacttattattacatgcttatatctatttgtgtggtctctgatctatgttttcttggaacatttatatatatatatatatatatatatatatatatatatatatatatatatgtacattttattattatactttaagttccaggttacatgtgcacaatgtgcaggtttgttatatatgcatacatgtgccatgttggtgtgctgcatccattaactcgtcatttacattaggtatacctcctaatgctatccttcccccctccctccaccccacaacaggccccagtgtgtgatgttacctttcctgtgtccaagtgttctcatcgttcaattcccaccaatgactaagaacatgaggtgtttggtttttttgttcttgcaatagtttgctgaaaagtatggtttccagctttatccatgtccctacaaaggacatgaactcatcattttttatggctgcacagtattctatggtgtatatgtgccacattttcttaatccagtctatcattgatggacatttgggttggttccaagtctttgctattgtgaatagtgccgcaataaatatacgtgtgcatgtgtctttatagcagcatgatttataatcctttgggtatatacccagtaatgggatggctgggtcaaatggtatttctagttctagatctctgaggaattgccacactgtcttccacaatggttgaactagtttacactcccaccaaaagtgtaaaagtgttcctatttctccacatcctttccagcacctgttgtttcctgactttttaatgattgccattctaactggtgtgagatggtatctcattgtggttttgatttgcatttccctgatggccagtgatgatgagcattttttcatgtgtctgttggctgcataaatgtcttcttttgagaagtatctgttcatattctttgcacacttgttgatggggttgttttttttttcttgtaaatttgtttgagttctttgtagattctggatattagccctttgtcagatgagtagattgcaaaaattttctcccattctgtaggttgcctgttcacgctgatggtagtttcttttgctgtgcagaagctctttagtttaattagatcccatttgtcaattttggcttttgttgccattgcttttggtgttttagacatgaagtccttgcccatgcctatgtcctgaatgatattgcctaggttttcttctagggtttttatggttttaggtcttacatttaagtctttaatccatcttgaattaatttttgtataaggtgtaaggaagggatccaggttctgctttctacatatggctagccagttttcccagcaccatttattaaatagggaatcctttccccattgcttgttttcgtcaggtttgtcaaagatcagataattgtagatgtgtagtattatttctgagggctctgttctgttccattggtctatatctctgttttggtccagtaccatgctgttttggttactgtagccttgtagtatagtttgaagtcaggtagtatgatgcttccagctttgctcttttggcttaggattgacttggcaatgcgggctcttttttggtttcttatgaactttaaagtagttttttccaattctgtgaagaaagtcattggtagcttaatggggatggcattgaatctataaatgaccttgggcagtatggccattttcatgatattgattcttcctatccatgagcatggaatgttcttctatttgtttgtatcctcttttatttcattgagcagtggtttgtagttctccttgaagtgatccttcacatcccttgtaagttggattcctaggtattttattctctttgaagcaattgtgaatgggagttcactcctgatttggctctctgtctgttattggtgtataagaatgcttgtgatttttgtacattgattttgtatcctgagactttgctgaagttgcttatcagcttaaggagattttgggctgagacaatggggttttctacatatacaatcatgtcatctgcaaacagggacaatttgacttcctcttctcctaattgaataccctttatttctttctcctgcctgattgccctggccagaacttccaacactatgttgaataggagtggtgagagacggcatccctgtcttgtgccagttttcaaagggaatgcttccaggttttgcccatgcagtatgatattggctggtggtttgtcatagagggctctccttattttgagatacattccatcaatacctaatttattgagagtttttagcatgaaggctgttgaattttgtcaaaggccttttctgcatctattgagataatcatgtggtttttgtctttggttctgtttatatgctggattacatttattgatttgcatatgttgaaccagccttgaatcccagggatgaagcccacttgatcatggtggataagctttttgatgtgctgctggattcggtttgccagtattttattgaggatttttgcatcaatgttcatcagggttattggtctaaaattctctttttttgttgtgtctctgccaggctttggtatcaggatgatgctggcctcataaaatgagttagggaggattccctccttttctgttcattggaatagtttcagaaggaatggtaccagctcctccttggacctctggtagaattcagctgtgaatctatctggtcctggacttcttttggttggtaagctattaattattgcctctatttcagagcatgttatttttctattcagagattcaacttcttcctggtttattcttgggagggtgtatgtgtcgaggaatttatccatttcttctagattttctagtttatttgcgtagaggtgtttttagtattctctgacggtagtttgtatttctgtgggatcatcggtggtgatatcccctttatctttttttattgcatctatttgattcttctctcttttcttctttattagtcttgctggtggtctatcaattttgttgatcttttcgaaaaaccagctcctgaattcactgattttttgaaggggtttttgtgtctttgtctccttcagttatgctctgatcttaactccagcttggcattagaagtagttgtttatatccccatgtgcagcaaagtctttttcctgagatcatatcacatgtgccaagttatatgccaagccatggttctcaagctgaaggtacagtaccctgggcccttacttgttctgaaaggggtgggggtggtggttttggacatactgttagactttctgagccacaactgaggtagctatggcttatcgtattttgacttcacaggtgaatctccgctgtcagccaggaatagccaggaatagctaaaatagctccttaagctgtaacatttctcttttccaaccccagcaaaggattggtctagtggtaacaacaaacctcatagaagtagtacacctattattctggagatacttgcttctatagatttattacaatatgttttataaagtattttagagtatataatttgtgtttatgttccacagaaacatattttataggagttaatcttgactatctaaaggtattgtgaactagttccagctttctccaatacccttgtccacgagaagtaaactaaatcatgtatctatttcctctattatctttattaaataataagttaatgtggcctgaatatatacggatttctgatactatggtctattactgagggaaaaaacaccactaaactatcctctaatctgtgtaatagattagctacactttcttcactagcaagataaaataatttccacattttctagttttactttgtagaaataactctctgtaattggactgtattcaacgaaaacttagtaagttgtaattatgcctcaggtatgtttctatgcactgagtgaagagtggagataaaaatagaatttagattttcctttactttttaaataggttgttgcctcttatatatttattctatgatgcaaatgtcactatcctaattcctcagtttatgtttaacagcacacagtggcacttctatgattcaaatacatttgataccctttgaaatcaatcagaatactgcaaaattaatttttctaaaacaatgcttttatcgttatttctcctgttgaatcatcagtacaatttccaaatgaaaacacttaaaataatctcatattacaatctttctctaacagaaccatgatgtaaggacagtgataacaaatatctgacaatgatatgattatttcctcatccatggaaattttccttaataaactaaagggctattttctaaaaagccaaagcattgcttacaagaacttttcatcatgacatggatagacactcagattcatacattcaaagggaagtgtcatgtattccctttcaatccaccctattctattgtgttatcttcctaaattattttctatctacattcttcattctctttcccattgaccctatgttctgtgtgataaaaattgcgtcattggaggcttttgaaggttaagtattatgccccatttcaccattaatcaacatacaacccttctccatattttgtaattcctttcatatacagaaaaaaagatactataatttcttcaaaatgcttgatattaatgatatatgggaaaacaattattttgtgcagcaatcttcagataactgggaaaggccggggaaaaagagagatactggtggttatcaatgacccatgtataaattgtttttattatgtaagctgtcttcacaaatgtcttcttatgtatgatcattagaactgttttatatatatatgtaaaatttccacattatcgagacattactttcagcagtgaagtaatccttttttaactgccacttaatgaattcaataaaatataatttattgtattttg

SEQ ID NO: 187340 - DNA, 694 bp, Homo sapiens
  Payload ID: 16884
  Gene Symbol: SULT1B1
  Gene Name: sulfotransferase family, cytosolic, 1B, member 1
  ENST ID: ENST00000510821
  CDS Start-End: 228-694
cttgaacttttttttttctggtgccaggagccttcctgtgctccccattgcctgccagaaccaccaccgtttcccatggttactctacagcagcttcactgcctgaaaatgaaaactgaacaaagggattaaattgtgagtggaactgaagcatgcaaggaatggaggtcttctcaagaaactaacaactgtcaatctattatatatttgtacaatctggtattaaaatgctttccccaaaagatattctgcgaaaagatctgaagttggtccatggttatcccatgacctgtgcttttgcaagcaactgggaaaaaattgaacagttccatagcagaccagatgacattgtgatagccacttatcctaaatcaggtactacttgggttagtgaaattatagacatgattctaaatgatggagatattgaaaaatgtaagcgaggttttattactgaaaaagttccaatgttggaaatgactctccctggattaagaacatcaggtatagaacaattggagaagaatccatcaccccggattgtgaaaacacatctaccgactgatcttcttcctaaatctttctgggaaaacaattgcaagatgatttatctggctcgtaatgccaaggatgtttcagtctcatattaccattttgacttaatgaataatttacagccttttcctggtacctg

SEQ ID NO: 187341 - DNA, 572 bp, Homo sapiens
  Payload ID: 16884
  Gene Symbol: SULT1B1
  Gene Name: sulfotransferase family, cytosolic, 1B, member 1
  ENST ID: ENST00000512870
  CDS Start-End: 353-572
actagttgagatacaaatccttctatccaagattcactattgaggactaaaaattattgatacacaaaacaacttgaatggatatcaacggaattaccctgaatgaaaaaaaaagctaatctcaaaaggagaaccctttatcctaagagagcagagggatgaagatccatcttctgtaactttttctgctgaataaaggagccttcctgtgctccccattgcctgccagaaccaccaccgtttcccatggttactctacagcagcttcactgcctgaaaatgaaaactgaacaaagggattaaattgtgagatattctgcgaaaagatctgaagttggtccatggttatcccatgacctgtgcttttgcaagcaactgggaaaaaattgaacagttccatagcagaccagatgacattgtgatagccacttatcctaaatcaggtactacttgggttagtgaaattatagacatgattctaaatgatggagatattgaaaaatgtaagcgaggttttattactgaaaaagttccaatgttggaaatgactctccctggattaagaacatcag

SEQ ID NO: 187342 - DNA, 2795 bp, Homo sapiens
  Payload ID: 16885
  Gene Symbol: SULT1C2
  Gene Name: sulfotransferase family, cytosolic, 1C, member 2
  Uniprot ID: O00338
  ENST ID: ENST00000251481
  CDS Start-End: 454-1344
agcttcgaggccagtgggaggagggaggggccaggcagctgagggccaggaaagatgtgaaaaactctagctggtgaccgagaggaggagtagagtgtgcccttagttcatatgaactagagggagttggtatttgcacagcagtcagggtcacatgagtgatcatggtacagtgagaagttctccctcccagggccaggtcacagggtttgtttctgttcaatccggattcttccagtaaaagcttcaacttcccacactgaagctgagagcctcccaaagtgctggctacctgctgagcgcccccgtaactctgacacagtagtaatttgagcctctgcaattgccgtctgcttcctgtgaaagtcctttccgtgcccactgacccttgagtgggcctttgagctgctgactttcagctggaacttgaagggaccccaaccctgagacactatggccctgacctcagacctggggaaacagataaaactgaaagaggtggaggggaccctcctgcagcctgcaactgtggacaactggagccagatccagagcttcgaggccaaaccagatgatctcctcatctgcacctaccctaaagcagggacaacgtggattcaggaaattgtggatatgattgaacagaatggggacgtggagaagtgccagcgagccatcatccaacaccgccatcctttcattgagtgggctcggccaccccaaccttctggtgtggaaaaagccaaagcaatgccctctccacggatactaaagactcacctttccactcagctgctgccaccgtctttctgggaaaacaactgcaagttcctttatgtagctcgaaatgccaaagactgtatggtttcctactaccatttccaaaggatgaaccacatgcttcctgaccctggtacctgggaagagtattttgaaaccttcatcaatggaaaagtggtttggggttcctggtttgaccacgtgaaaggatggtgggagatgaaagacagacaccagattctcttcctcttctatgaggacataaagagggacccaaagcatgaaattcggaaggtgatgcagttcatgggaaagaaggtggatgaaacagtgctagataaaattgtccaggagacgtcatttgagaaaatgaaagaaaatcccatgacaaatcgttctacagtttccaaatctatcttggaccagtcaatttcctccttcatgagaaaaggaactgtgggggattggaaaaaccacttcactgttgcccagaatgagaggtttgatgaaatctatagaagaaagatggaaggaacctccataaacttctgcatggaactctgagcaagatgtaaataaaattaaaaggtggatggcaagagtgcaaatactatcttcaatccttcagtcccagccagaagaatctctgaaagcatattgtgaatgtatacaatgtagtacaaacaatctctgtgatgattaacagtatgtcaccacttcattttttaaaaaggatcacgtctaatgcccattttcccaactattctttccaaagtaagatataaggtagcttaataaactaagtaaaacgtatgacttgagtacaaaaggattgttttaatccccattattctggaaagtgcatcctagtctcccagtctataacatcataataccttgagtataagtccaaatattaggttatatctatattaaaaacaaaatttctgtcatctgtcctggccattcaggcaactccagcctgggctcaatcctggagttctgtctggtcactatcagaaggaacactttgagggaaaccctggtgcagccagccctgaggaaacatggcctgagtgccctcactggtgggtgggaataaaatggaagtgcacagaggagatgtcagaagaccaaaacttggtgaatagtcccagtgctaggtcatataggaaacagaaagcatgacagtggccttttgggaacccaagttacgtcctggtgaaagcagaaaggaggagacaggatggctgtcaacaacgtcagcatgggcatggctcccaggcatggaggtaattgggtcttggcttcaatgccacccttttgggaagccctaaaccaagtgaggtgttcttttcccttgcttcccatatttgtcccagttgcagccctgttgttatgtatttactcttcaatttcttatttatacctctcactcaattgttaattctttgggttcagtctcatgccatatttactcctagtacctaatgcagtgcctggcacacagcaagtgcccttgagaacttgtagagggagtaaaaaagtgcatggataaatgactgcagcaaatcacaaattttgaactttgacccttttcttttagtcccaaatagtggcattccatagctgagggtagtaggagcagttcaccctgggagcagacaataagaggaagaatgaagccaactaaaattctgaatgctttttgttggatttcgtagggtattttttttaaaatagggtcttgctatgttgcccaggctggtcttaactgactgctttttattattaccatgcactggcaattccaaacaatgtcagtgttaaaatgcttctccctgaaaaagagaaaaaaaaaaggaaaaaaagaaaagaaaagtgaaaagaaaaactcttattggcctaagttctaaataatagctaggttaccactgagttttaactatatgtatatgagcttcaaataagcacctttttattatgtaaataaataaaagttatctgtatcccca

SEQ ID NO: 187343 - DNA, 2828 bp, Homo sapiens
  Payload ID: 16885
  Gene Symbol: SULT1C2
  Gene Name: sulfotransferase family, cytosolic, 1C, member 2
  Uniprot ID: O00338
  ENST ID: ENST00000326853
  CDS Start-End: 454-1377
agcttcgaggccagtgggaggagggaggggccaggcagctgagggccaggaaagatgtgaaaaactctagctggtgaccgagaggaggagtagagtgtgcccttagttcatatgaactagagggagttggtatttgcacagcagtcagggtcacatgagtgatcatggtacagtgagaagttctccctcccagggccaggtcacagggtttgtttctgttcaatccggattcttccagtaaaagcttcaacttcccacactgaagctgagagcctcccaaagtgctggctacctgctgagcgcccccgtaactctgacacagtagtaatttgagcctctgcaattgccgtctgcttcctgtgaaagtcctttccgtgcccactgacccttgagtgggcctttgagctgctgactttcagctggaacttgaagggaccccaaccctgagacactatggccctgacctcagacctggggaaacagataaaactgaaagaggtggaggggaccctcctgcagcctgcaactgtggacaactggagccagatccagagcttcgaggccaaaccagatgatctcctcatctgcacctaccctaaagcagggacaacgtggattcaggaaattgtggatatgattgaacagaatggggacgtggagaagtgccagcgagccatcatccaacaccgccatcctttcattgagtgggctcggccaccccaaccttctgagacaggatttcaccatgttgcccaggctggtctcaaactcctgagctcaagcaatccacctgcctcaacctcccaaagtgccaagattacagacctgctgccaccgtctttctgggaaaacaactgcaagttcctttatgtagctcgaaatgccaaagactgtatggtttcctactaccatttccaaaggatgaaccacatgcttcctgaccctggtacctgggaagagtattttgaaaccttcatcaatggaaaagtggtttggggttcctggtttgaccacgtgaaaggatggtgggagatgaaagacagacaccagattctcttcctcttctatgaggacataaagagggacccaaagcatgaaattcggaaggtgatgcagttcatgggaaagaaggtggatgaaacagtgctagataaaattgtccaggagacgtcatttgagaaaatgaaagaaaatcccatgacaaatcgttctacagtttccaaatctatcttggaccagtcaatttcctccttcatgagaaaaggaactgtgggggattggaaaaaccacttcactgttgcccagaatgagaggtttgatgaaatctatagaagaaagatggaaggaacctccataaacttctgcatggaactctgagcaagatgtaaataaaattaaaaggtggatggcaagagtgcaaatactatcttcaatccttcagtcccagccagaagaatctctgaaagcatattgtgaatgtatacaatgtagtacaaacaatctctgtgatgattaacagtatgtcaccacttcattttttaaaaaggatcacgtctaatgcccattttcccaactattctttccaaagtaagatataaggtagcttaataaactaagtaaaacgtatgacttgagtacaaaaggattgttttaatccccattattctggaaagtgcatcctagtctcccagtctataacatcataataccttgagtataagtccaaatattaggttatatctatattaaaaacaaaatttctgtcatctgtcctggccattcaggcaactccagcctgggctcaatcctggagttctgtctggtcactatcagaaggaacactttgagggaaaccctggtgcagccagccctgaggaaacatggcctgagtgccctcactggtgggtgggaataaaatggaagtgcacagaggagatgtcagaagaccaaaacttggtgaatagtcccagtgctaggtcatataggaaacagaaagcatgacagtggccttttgggaacccaagttacgtcctggtgaaagcagaaaggaggagacaggatggctgtcaacaacgtcagcatgggcatggctcccaggcatggaggtaattgggtcttggcttcaatgccacccttttgggaagccctaaaccaagtgaggtgttcttttcccttgcttcccatatttgtcccagttgcagccctgttgttatgtatttactcttcaatttcttatttatacctctcactcaattgttaattctttgggttcagtctcatgccatatttactcctagtacctaatgcagtgcctggcacacagcaagtgcccttgagaacttgtagagggagtaaaaaagtgcatggataaatgactgcagcaaatcacaaattttgaactttgacccttttcttttagtcccaaatagtggcattccatagctgagggtagtaggagcagttcaccctgggagcagacaataagaggaagaatgaagccaactaaaattctgaatgctttttgttggatttcgtagggtattttttttaaaatagggtcttgctatgttgcccaggctggtcttaactgactgctttttattattaccatgcactggcaattccaaacaatgtcagtgttaaaatgcttctccctgaaaaagagaaaaaaaaaaggaaaaaaagaaaagaaaagtgaaaagaaaaactcttattggcctaagttctaaataatagctaggttaccactgagttttaactatatgtatatgagcttcaaataagcacctttttattatgtaaataaataaaagttatctgtatcccca

SEQ ID NO: 187344 - DNA, 1206 bp, Homo sapiens
  Payload ID: 16885
  Gene Symbol: SULT1C2
  Gene Name: sulfotransferase family, cytosolic, 1C, member 2
  ENST ID: ENST00000409880
  CDS Start-End: 178-957
ccaaagtgctggctacctgctgagcgcccccgtaactctgacacagtagtaatttgagcctctgcaattgccgtctgcttcctgtgaaagtcctttccgtgcccactgacccttgagtgggcctttgagctgctgactttcagctggaacttgaagggaccccaaccctgagacactatggccctgacctcagacctggggaaacagataaaactgaaagaggtggaggggaccctcctgcagcctgcaactgtggacaactggagccagatccagagcttcgaggccaaaccagatgatctcctcatctgcacctaccctaaagcagggacaacgtggattcaggaaattgtggatatgattgaacagaatggggacgtggagaagtgccagcgagccatcatccaacaccgccatcctttcattgagtgggctcggccaccccaaccttctgctcgaaatgccaaagactgtatggtttcctactaccatttccaaaggatgaaccacatgcttcctgaccctggtacctgggaagagtattttgaaaccttcatcaatggaaaagtggtttggggttcctggtttgaccacgtgaaaggatggtgggagatgaaagacagacaccagattctcttcctcttctatgaggacataaagagggacccaaagcatgaaattcggaaggtgatgcagttcatgggaaagaaggtggatgaaacagtgctagataaaattgtccaggagacgtcatttgagaaaatgaaagaaaatcccatgacaaatcgttctacagtttccaaatctatcttggaccagtcaatttcctccttcatgagaaaaggaactgtgggggattggaaaaaccacttcactgttgcccagaatgagaggtttgatgaaatctatagaagaaagatggaaggaacctccataaacttctgcatggaactctgagcaagatgtaaataaaattaaaaggtggatggcaagagtgcaaatactatcttcaatccttcagtcccagccagaagaatctctgaaagcatattgtgaatgtatacaatgtagtacaaacaatctctgtgatgattaacagtatgtcaccacttcattttttaaaaaggatcacgtctaatgcccattttcccaactattctttccaaagtaagatataaggtagcttaataaactaagtaaaacgta

SEQ ID NO: 187345 - DNA, 928 bp, Homo sapiens
  Payload ID: 16885
  Gene Symbol: SULT1C2
  Gene Name: sulfotransferase family, cytosolic, 1C, member 2
  ENST ID: ENST00000409067
  CDS Start-End: 1-679
ctcagacctggggaaacagataaaactgaaagaggtggaggggaccctcctgcagcctgcaactgtggacaactggagccagatccagagcttcgaggccaaaccagatgatctcctcatctgcacctaccctaaagcagggacaacgtggattcaggaaattgtggatatgattgaacagaatggggacgtggagaagtgccagcgagccatcatccaacaccgccatcctttcattgagtgggctcggccaccccaaccttctggtgtggaaaaagccaaagcaatgccctctccacggatactaaagactcacctttccactcagctgctgccaccgtctttctgggaaaacaactgcaagttcctttatgtagctcgaaatgccaaagactgtatggtttcctactaccatttccaaaggatgaaccacatgcttcctgaccctggtacctgggaagagtattttgaaaccttcatcaatggaaaagtggtttggggttcctggtttgaccacgtgaaaggatggtgggagatgaaagacagacaccagattctcttcctcttctatgaggacataaagagggaactgtgggggattggaaaaaccacttcactgttgcccagaatgagaggtttgatgaaatctatagaagaaagatggaaggaacctccataaacttctgcatggaactctgagcaagatgtaaataaaattaaaaggtggatggcaagagtgcaaatactatcttcaatccttcagtcccagccagaagaatctctgaaagcatattgtgaatgtatacaatgtagtacaaacaatctctgtgatgattaacagtatgtcaccacttcattttttaaaaaggatcacgtctaatgcccattttcccaactattctttccaaagtaagatataaggtagctt

SEQ ID NO: 187346 - DNA, 1359 bp, Homo sapiens
  Payload ID: 16885
  Gene Symbol: SULT1C2
  Gene Name: sulfotransferase family, cytosolic, 1C, member 2
  ENST ID: ENST00000437390
  CDS Start-End: 178-1110
ccaaagtgctggctacctgctgagcgcccccgtaactctgacacagtagtaatttgagcctctgcaattgccgtctgcttcctgtgaaagtcctttccgtgcccactgacccttgagtgggcctttgagctgctgactttcagctggaacttgaagggaccccaaccctgagacactatggccctgacctcagacctggggaaacagataaaactgaaagaggtggaggggaccctcctgcagcctgcaactgtggacaactggagccagatccagagcttcgaggccaaaccagatgatctcctcatctgcacctaccctaaagcagggacaacgtggattcaggaaattgtggatatgattgaacagaatggggacgtggagaagtgccagcgagccatcatccaacaccgccatcctttcattgagtgggctcggccaccccaaccttctgtgcttgtactacgcagatgtttcctcttgagctattttaaaggtgtggaaaaagccaaagcaatgccctctccacggatactaaagactcacctttccactcagctgctgccaccgtctttctgggaaaacaactgcaagttcctttatgtagctcgaaatgccaaagactgtatggtttcctactaccatttccaaaggatgaaccacatgcttcctgaccctggtacctgggaagagtattttgaaaccttcatcaatggaaaagtggtttggggttcctggtttgaccacgtgaaaggatggtgggagatgaaagacagacaccagattctcttcctcttctatgaggacataaagagggacccaaagcatgaaattcggaaggtgatgcagttcatgggaaagaaggtggatgaaacagtgctagataaaattgtccaggagacgtcatttgagaaaatgaaagaaaatcccatgacaaatcgttctacagtttccaaatctatcttggaccagtcaatttcctccttcatgagaaaaggaactgtgggggattggaaaaaccacttcactgttgcccagaatgagaggtttgatgaaatctatagaagaaagatggaaggaacctccataaacttctgcatggaactctgagcaagatgtaaataaaattaaaaggtggatggcaagagtgcaaatactatcttcaatccttcagtcccagccagaagaatctctgaaagcatattgtgaatgtatacaatgtagtacaaacaatctctgtgatgattaacagtatgtcaccacttcattttttaaaaaggatcacgtctaatgcccattttcccaactattctttccaaagtaagatataaggtagcttaataaactaagtaaaacgta

SEQ ID NO: 187347 - DNA, 576 bp, Homo sapiens
  Payload ID: 16885
  Gene Symbol: SULT1C2
  Gene Name: sulfotransferase family, cytosolic, 1C, member 2
  ENST ID: ENST00000438339
  CDS Start-End: 187-576
gagagcctcccaaagtgctggctacctgctgagcgcccccgtaactctgacacagtagtaatttgagcctctgcaattgccgtctgcttcctgtgaaagtcctttccgtgcccactgacccttgagtgggcctttgagctgctgactttcagctggaacttgaagggaccccaaccctgagacactatggccctgacctcagacctggggaaacagataaaactgaaagaggtggaggggaccctcctgcagcctgcaactgtggacaactggagccagatccagagcttcgaggccaaaccagatgatctcctcatctgcacctaccctaaagcagggacaacgtggattcaggaaattgtggatatgattgaacagaatggggacgtggagaagtgccagcgagccatcatccaacaccgccatcctttcattgagtgggctcggccaccccaaccttctgctgctgccaccgtctttctgggaaaacaactgcaagttcctttatgtagctcgaaatgccaaagactgtatggtttcctactaccatttccaaaggatgaaccacatgcttcc

SEQ ID NO: 187348 - DNA, 872 bp, Homo sapiens
  Payload ID: 16885
  Gene Symbol: SULT1C2
  Gene Name: sulfotransferase family, cytosolic, 1C, member 2
  ENST ID: ENST00000442801
  CDS Start-End: 1-349
gacctcagacctggggaaacagataaaactgaaagaggtggaggggaccctcctgcagcctgcaactgtggacaactggagccagatccagagcttcgaggccaaaccagatgatctcctcatctgcacctaccctaaagcagggacaacgtggattcaggaaattgtggatatgattgaacagaatggggacgtggagaagtgccagcgagccatcatccaacaccgccatcctttcattgagtgggctcggccaccccaaccttctgttcctttatgtagctcgaaatgccaaagactgtatggtttcctactaccatttccaaaggatgaaccacatgcttcctgaccctggtacctgggaagagtattttgaaaccttcatcaatggaaaagtggtttggggttcctggtttgaccacgtgaaaggatggtgggagatgaaagacagacaccagattctcttcctcttctatgaggacataaagagggacccaaagcatgaaattcggaaggtgatgcagttcatgggaaagaaggtggatgaaacagtgctagataaaattgtccaggagacgtcatttgagaaaatgaaagaaaatcccatgacaaatcgttctacagtttccaaatctatcttggaccagtcaatttcctccttcatgagaaaaggaactgtgggggattggaaaaaccacttcactgttgcccagaatgagaggtttgatgaaatctatagaagaaagatggaaggaacctccataaacttctgcatggaactctgagcaagatgtaaataaaattaaaaggtggatggcaagagtgcaaatactatcttcaatccttcagtcccagccagaagaatctctgaa

SEQ ID NO: 187349 - DNA, 915 bp, Homo sapiens
  Payload ID: 16886
  Gene Symbol: SULT1C3
  Gene Name: sulfotransferase family, cytosolic, 1C, member 3
  Uniprot ID: Q6IMI6
  ENST ID: ENST00000329106
  CDS Start-End: 1-915
atggcgaagattgagaaaaacgctcccacgatggaaaaaaagccagaactgtttaacatcatggaagtagatggagtccctacgttgatattatcaaaagaatggtgggaaaaagtatgtaatttccaagccaagcctgatgatcttattctggcaacttacccaaagtcaggtacaacatggatgcatgaaattttagacatgattctaaatgatggtgatgtggagaaatgcaaaagagcccagactctagatagacacgctttccttgaactgaaatttccccataaagaaaaaccagatttggagttcgttcttgaaatgtcctcaccacaactgataaaaacacatctcccttcacatctgattccaccatctatctggaaagaaaactgcaagattgtctatgtggccagaaatcccaaggattgcctggtgtcctactaccactttcacaggatggcttcctttatgcctgatcctcagaacttagaggaattttatgagaaattcatgtccggaaaagttgttggcgggtcctggtttgaccatgtgaaaggatggtgggctgcaaaagacatgcaccggatcctctacctcttctacgaggatattaaaaaagacccaaagcgggaaattgagaagatactgaagttcctggaaaaagacatatcagaggaaattctgaataaaatcatctatcacacctcctttgatgtaatgaagcaaaacccaatgaccaactataccactttgcccaccagcattatggaccactccatctccccttttatgaggaaagggatgcctggagactggaagaactattttactgtggcccaaaatgaagaatttgacaaggactaccagaagaagatggcaggaagcaccctaaccttccgcacagagatctga

SEQ ID NO: 187350 - DNA, 1860 bp, Homo sapiens
  Payload ID: 16887
  Gene Symbol: SULT1C4
  Gene Name: sulfotransferase family, cytosolic, 1C, member 4
  Uniprot ID: O75897
  ENST ID: ENST00000272452
  CDS Start-End: 327-1235
ctgcagctcactttctccctgtttgctggccagcagggtttgtggccgcctctgctgtgacgccacagcctggtgaggagggggctgcagttcctcaggaaactgccagtggacaaagtcataaacaagagttccagttccctggaacctgagtcgggaggcctgcaactcactttctccctgtttgctggcccagacaggcctgtgctagagggctggatagtgtggtagtgtggtggatagagtgctgcctctatccacaacgcagccatatgctgactgaagataactttgtgtctggaagagccctctgatttcttacactaatggccttacacgacatggaggattttacatttgatggaacaaagcgcttaagtgtcaactacgtgaagggaattcttcaaccgacagacacctgtgacatctgggataagatctggaacttccaagccaagcctgatgacctgcttatttctacctatcctaaagcaggaacaacatggactcaggagatagtggaattaatacaaaatgaaggtgatgtggagaaaagtaaacgggcaccgactcatcaacgatttcctttcctcgaaatgaaaatcccatccttaggatctggtttggaacaagctcatgcaatgccctcaccacggatcctgaaaacacatcttccctttcacttgctgccaccatccttgctagagaaaaactgtaagataatctatgtagcaagaaatcccaaggacaacatggtgtcctattaccatttccaaagaatgaataaagctcttcctgctccaggaacatgggaagagtattttgagacttttctggctgggaaagtgtgctggggctcctggcatgaacatgtgaaaggatggtgggaagccaaagacaaacaccgtattctctatctcttctatgaggacatgaagaagaacccaaagcatgaaattcagaagctggcagaatttattgggaagaaattagatgacaaagttctagataaaattgtccattacacttcgtttgatgtcatgaaacagaatccaatggcaaactattcatcgattcctgctgaaatcatggaccactccatttctccattcatgagaaaaggggcagtgggagactggaagaaacacttcaccgtggctcagaatgagagatttgatgaagattacaagaagaaaatgactgataccagactaactttccacttccagttctagtaaggaagaaaaactgaaaatgttttagtttattacccagtatatttgggtaataatgaaagtttaattctcataacaaatgatatcagattccagttatcagaatagtttactgtgtttgctcttattcactctactaaaaaattattttaaaaggctggaggcaaggtggtgacaggcagcagggtggcgacatggagagagggaagctcaataaatcactaggtacaatcctggtatcattgccaattatcatcatatttacattttctacaatcatgtgcttattaacatattggaaatgcttcagtcctcacatgataatacactaacattttcagattaagttttggttcaagttaatttttttttttttttttttgagacggagtctcgctctgtcgcccaggctggagtgcagtggcacgatctcggctcactgcaagctctgcttcctgggttcacgctattcccctgcctcagcctcccgagtagctgggactatgggcgcccaccaccactcccggctaatttttttttttgtattcttagtagagacgaggtttcaccgtgttagccaggatgttctcgatctcctgaccccatgatccacccgcttcggcct

SEQ ID NO: 187351 - DNA, 1045 bp, Homo sapiens
  Payload ID: 16887
  Gene Symbol: SULT1C4
  Gene Name: sulfotransferase family, cytosolic, 1C, member 4
  Uniprot ID: O75897
  ENST ID: ENST00000409309
  CDS Start-End: 154-837
tttctccctgtttgctggcccagacaggcctgtgctagagggctggatagtgtggtagtgtggtggatagagtgctgcctctatccacaacgcagccatatgctgactgaagataactttgtgtctggaagagccctctgatttcttacactaatggccttacacgacatggaggattttacatttgatggaacaaagcgcttaagtgtcaactacgtgaagggaattcttcaaccgacagacacctgtgacatctgggataagatctggaacttccaagccaagcctgatgacctgcttatttctacctatcctaaagcaggaacaacatggactcaggagatagtggaattaatacaaaatgaaggtgatgtggagaaaagtaaacgggcaccgactcatcaacgatttcctttcctcgaaatgaaaatcccatccttaggatctgtgtgctggggctcctggcatgaacatgtgaaaggatggtgggaagccaaagacaaacaccgtattctctatctcttctatgaggacatgaagaagaacccaaagcatgaaattcagaagctggcagaatttattgggaagaaattagatgacaaagttctagataaaattgtccattacacttcgtttgatgtcatgaaacagaatccaatggcaaactattcatcgattcctgctgaaatcatggaccactccatttctccattcatgagaaaaggggcagtgggagactggaagaaacacttcaccgtggctcagaatgagagatttgatgaagattacaagaagaaaatgactgataccagactaactttccacttccagttctagtaaggaagaaaaactgaaaatgttttagtttattacccagtatatttgggtaataatgaaagtttaattctcataacaaatgatatcagattccagttatcagaatagtttactgtgtttgctcttattcactctactaaaaaattattttaaaaggctggaggcaaggtggtgacaggcagcagggtggcgacatggagagagggaa

SEQ ID NO: 187352 - DNA, 1987 bp, Homo sapiens
  Payload ID: 16888
  Gene Symbol: SULT2A1
  Gene Name: sulfotransferase family, cytosolic, 2A, dehydroepiandrosterone (DHEA)-preferring, member 1
  Uniprot ID: Q06520
  ENST ID: ENST00000222002
  CDS Start-End: 141-998
acaacaaacatgtgacatgctgggacaaggttaaagatcgttttatccttgctgtaaaagctgatctgcctgtagctgccacagcctccagcggtggctacagttgaaaccctcacaccacgcaggaagaggtcatcatcatgtcggacgatttcttatggtttgaaggcatagctttccctactatgggtttcagatccgaaaccttaagaaaagtacgtgatgagttcgtgataagggatgaagatgtaataatattgacttaccccaaatcaggaacaaactggttggctgagattctctgcctgatgcactccaagggggatgccaagtggatccaatctgtgcccatctgggagcgatcaccctgggtagagagtgagattgggtatacagcactcagtgaaacggagagtccacgtttattctcctcccacctccccatccagttattccccaagtctttcttcagttccaaggccaaggtgatttatctcatgagaaatcccagagatgttttggtgtctggttattttttctggaaaaacatgaagtttattaagaaaccaaagtcatgggaagaatattttgaatggttttgtcaaggaactgtgctatatgggtcatggtttgaccacattcatggctggatgcccatgagagaggagaaaaacttcctgttactgagttatgaggagctgaaacaggacacaggaagaaccatagagaagatctgtcaattcctgggaaagacgttagaacccgaagaactgaacttaattctcaagaacagctcctttcagagcatgaaagaaaacaagatgtccaattattccctcctgagtgttgattatgtagtggacaaagcacaacttctgagaaaaggtgtatctggggactggaaaaatcacttcacagtggcccaagctgaagactttgataaattgttccaagagaagatggcagatcttcctcgagagctgttcccatgggaataacgtccaaaacactctggatcttatatggagaatgacattgattctcctgtccttgtacatgtacctgactggggtcattgtgtaagacttattattttatcctgaaaccttaaatatcaaacctctgcatctctgatcccttccttgttaaaagttaccagggttggccaggcacggtggttcatgcctgtaatcccagcactatgggaggccgagacgggcggatcacgaggtcaggagactgagaccatcctggctaacacggtgaaaccccatctctactaaaaatacaaaaaccaaaaaaaattagccaggcgcattggctcatgtctgtaatcccagcactttgggaggtcgggggggtgggggaggatcacggggtcaggagatcgagaccatcctggccaacatgatgaaaccctatctctactaaaaatacaaaaattagccgggcatggtggtgcacgcctatagtcccagctactcgggaggctgaggtaggagaatcgtttgaactcaggaggcagaggttgcaatgagccaagatcgcgccactgcactccagcctgggtgacagagcgagaccgtctcaaaaagaaagaagtgactagggttcagagaaccagggttcaaagcccagggatgcaaaggttgcagtgagttgagtcatgggatcccagacttttttaaatgtttgcaatgtttcccgtttacagaatgctacaagaataatgtacgtactacctaaaaggatgtctaaatgtttgttaataaaaataagaaatagctacagtgacagattttagagcaaaaattagtaataaaaataagaaataaaattacaggagcaattaaggttccatttcttttcatcacatgtatctccacaatttattattgctctgatcttaaggagtgtaatttgcaatctaattttatcctcttactctgtgttgttaaaccatatacaataaacggtgtttatggag

SEQ ID NO: 187353 - DNA, 1295 bp, Homo sapiens
  Payload ID: 16889
  Gene Symbol: SULT2B1
  Gene Name: sulfotransferase family, cytosolic, 2B, member 1
  Uniprot ID: O00204
  ENST ID: ENST00000201586
  CDS Start-End: 179-1276
gttggaggcgtgggtagcagctgggagaaccggctgggtgctgcccctccccttgggccgggcacggagtaggcacctggcgggctccccaggtggcagacgctgtcgctgcgcacacctggcctctgtgccgcctgctccctgctcgtcctcccctccccaccctcacccacctgccatggacgggcccgccgagccccagatcccgggcttgtgggacacctatgaagatgacatctcggaaatcagccagaagttgccaggtgaatacttccggtacaagggcgtccccttccccgtcggcctgtactcgctcgagagcatcagcttggcggagaacacccaagatgtgcgggacgacgacatctttatcatcacctaccccaagtcaggcacgacctggatgatcgagatcatctgcttaatcctgaaggaaggggatccatcctggatccgctccgtgcccatctgggagcgggcaccctggtgtgagaccattgtgggtgccttcagcctcccggaccagtacagcccccgcctcatgagctcccatcttcccatccagatcttcaccaaggccttcttcagctccaaggccaaggtgatctacatgggccgcaacccccgggacgttgtggtctccctctatcattactccaagatcgccgggcagttaaaggacccgggcacacccgaccagttcctgagggacttcctcaaaggcgaagtgcagtttggctcctggttcgaccacattaagggctggcttcggatgaagggcaaagacaacttcctatttatcacctacgaggagctgcagcaggacttacagggctccgtggagcgcatctgtgggttcctgggccgtccgctgggcaaggaggcactgggctccgtcgtggcacactcaaccttcagcgccatgaaggccaacaccatgtccaactacacgctgctgcctcccagcctgctggaccaccgtcgcggggccttcctccggaaaggggtctgcggcgactggaagaaccacttcacggtggcccagagcgaagccttcgatcgtgcctaccgcaagcagatgcgggggatgccgaccttcccctgggatgaagacccggaggaggacggcagcccagatcctgagcccagccctgagcctgagcccaagcccagccttgagcccaacaccagcctggagcgtgagcccagacccaactccagccccagccccagccccggccaggcctctgagaccccgcacccacgaccctcataataaacacgtcgattctgtc

SEQ ID NO: 187354 - DNA, 1447 bp, Homo sapiens
  Payload ID: 16889
  Gene Symbol: SULT2B1
  Gene Name: sulfotransferase family, cytosolic, 2B, member 1
  Uniprot ID: O00204
  ENST ID: ENST00000323090
  CDS Start-End: 376-1428
ccgtgatctcggctcactgcaacctccgcctcctgggttcaaacgattctcctgcctcagcctccggagtaactgggagtacaggcatgcgccaccacgcctggctgatttttgtctttttagtaggggcggggtttcaccatgttggccaggctggtctcaaactcctgacctcaggtgatccacccacctctgtctcccaaagtgctgggattacaggagtgtgccactgcgcctgaccagctttataaagtttatagggacagtgtcaccactttacagaagagggactgaggctctgaggaggaagttccttgccagggtccgagtgtcgccaccctgagaactccagcacccacctccctactctccctcatggcgtctcccccacctttccacagccagaagttgccaggtgaatacttccggtacaagggcgtccccttccccgtcggcctgtactcgctcgagagcatcagcttggcggagaacacccaagatgtgcgggacgacgacatctttatcatcacctaccccaagtcaggcacgacctggatgatcgagatcatctgcttaatcctgaaggaaggggatccatcctggatccgctccgtgcccatctgggagcgggcaccctggtgtgagaccattgtgggtgccttcagcctcccggaccagtacagcccccgcctcatgagctcccatcttcccatccagatcttcaccaaggccttcttcagctccaaggccaaggtgatctacatgggccgcaacccccgggacgttgtggtctccctctatcattactccaagatcgccgggcagttaaaggacccgggcacacccgaccagttcctgagggacttcctcaaaggcgaagtgcagtttggctcctggttcgaccacattaagggctggcttcggatgaagggcaaagacaacttcctatttatcacctacgaggagctgcagcaggacttacagggctccgtggagcgcatctgtgggttcctgggccgtccgctgggcaaggaggcactgggctccgtcgtggcacactcaaccttcagcgccatgaaggccaacaccatgtccaactacacgctgctgcctcccagcctgctggaccaccgtcgcggggccttcctccggaaaggggtctgcggcgactggaagaaccacttcacggtggcccagagcgaagccttcgatcgtgcctaccgcaagcagatgcgggggatgccgaccttcccctgggatgaagacccggaggaggacggcagcccagatcctgagcccagccctgagcctgagcccaagcccagccttgagcccaacaccagcctggagcgtgagcccagacccaactccagccccagccccagccccggccaggcctctgagaccccgcacccacgaccctcataataaacacgtcgattctgtc

SEQ ID NO: 187355 - DNA, 902 bp, Homo sapiens
  Payload ID: 16890
  Gene Symbol: SULT6B1
  Gene Name: sulfotransferase family, cytosolic, 6B, member 1
  ENST ID: ENST00000407963
  CDS Start-End: 105-902
agaagaccgccccactctcgtcgcactagggaccccgaaatccgaccgcccatgggaagccactcgccagagtcttacctgaggggattccttaccccatcaccatgtgcacctcagaaactttccaagcgctggacaccttcgaagccagacatgatgacatcgtgctagcatcttatccaaagtgcggttcaaactggattctccacattgtcagtgaattaatatatgctgtttctaaaaaaaagtataaatatccagaattcccagttcttgaatgtggggattcagaaaaatatcagagaatgaaaggctttccatcaccaaggattttggcaactcacctccactatgacaaattacctgggtctatcttcgagaataaagccaagatattggtgatatttcgaaaccctaaagatacagcagtatcttttttgcatttccacaacgatgtccccgatattccaagctatggctcttgggatgaattcttcagacagttcatgaaaggacaagtttcttggggaaggtattttgattttgcaatcaattggaacaaacatcttgatggcgacaatgttaagttcatattatatgaagacctgaaagagaatctggctgctggaataaaacagattgctgagttcttgggattctttctaactggggagcaaattcaaactatctcagtccagagcaccttccaagccatgcgtgcgaagtctcaggacacacacggtgctgtcggcccattccttttccgcaaaggtgaagttggtgattggaaaaatttgttcagtgaaattcagaaccaggaaatggatgaaaaattcaaagagtgcttagcaggcacctccctcggagcaaagttgaagtatgaatcatattgccagggttga

SEQ ID NO: 187356 - DNA, 162 bp, Homo sapiens
  Payload ID: 16890
  Gene Symbol: SULT6B1
  Gene Name: sulfotransferase family, cytosolic, 6B, member 1
  ENST ID: ENST00000433192
  CDS Start-End: 113-162
ctagggaccccgaaatccgaccgcccatgggaagccactcgccagagtcttacctgagtgaaaaatgccatggccttgtttctcatagcaggggattccttaccccatcaccatgtgcacctcagaaactttccaagcgctggacaccttcgaagccagaca

SEQ ID NO: 187357 - DNA, 134 bp, Homo sapiens
  Payload ID: 16890
  Gene Symbol: SULT6B1
  Gene Name: sulfotransferase family, cytosolic, 6B, member 1
  ENST ID: ENST00000420611
  CDS Start-End: 85-134
ctggagtgctgctttcctccgaattagcaaatctggtttgccaacacagtatctgccttccaggggattccttaccccatcaccatgtgcacctcagaaactttccaagcgctggacaccttcgaagccagaca

SEQ ID NO: 187358 - DNA, 223 bp, Homo sapiens
  Payload ID: 16890
  Gene Symbol: SULT6B1
  Gene Name: sulfotransferase family, cytosolic, 6B, member 1
  ENST ID: ENST00000416345
  CDS Start-End: 174-223
ggcctagatgggaggatcacgacatcaggagaccgagaccatcctggctaacacgtgaaaaatgccatggccttgtttctcatagcaggtaaagaagaaccaaagaattcactggtactaacaattaaacctatgccctctgagatctcattgggattccttaccccatcaccatgtgcacctcagaaactttccaagcgctggacaccttcgaagccagaca

SEQ ID NO: 187359 - DNA, 1027 bp, Homo sapiens
  Payload ID: 16890
  Gene Symbol: SULT6B1
  Gene Name: sulfotransferase family, cytosolic, 6B, member 1
  Uniprot ID: Q6IMI4
  ENST ID: ENST00000535679
  CDS Start-End: 1-912
atggctgataaatccaaatttattgaatacattgacgaagctttagaaaaatcaaaagaaactgcactctctcatttatttttcacctatcaggggattccttaccccatcaccatgtgcacctcagaaactttccaagcgctggacaccttcgaagccagacatgatgacatcgtgctagcatcttatccaaagtgcggttcaaactggattctccacattgtcagtgaattaatatatgctgtttctaaaaaaaagtataaatatccagaattcccagttcttgaatgtggggattcagaaaaatatcagagaatgaaaggctttccatcaccaaggattttggcaactcacctccactatgacaaattacctgggtctatcttcgagaataaagccaagatattggtgatatttcgaaaccctaaagatacagcagtatcttttttgcatttccacaacgatgtccccgatattccaagctatggctcttgggatgaattcttcagacagttcatgaaaggacaagtttcttggggaaggtattttgattttgcaatcaattggaacaaacatcttgatggcgacaatgttaagttcatattatatgaagacctgaaagagaatctggctgctggaataaaacagattgctgagttcttgggattctttctaactggggagcaaattcaaactatctcagtccagagcaccttccaagccatgcgtgcgaagtctcaggacacacacggtgctgtcggcccattccttttccgcaaaggtgaagttggtgattggaaaaatttgttcagtgaaattcagaaccaggaaatggatgaaaaattcaaagagtgcttagcaggcacctccctcggagcaaagttgaagtatgaatcatattgccagggttgattccagtcaattcagcaggcctagatttattttccttaataataattaagtgtaaataattaaatgataattcaatcaaataatcaaataataattaaacaatattgaaatctaa

SEQ ID NO: 187360 - DNA, 4281 bp, Homo sapiens
  Payload ID: 16891
  Gene Symbol: SENP8
  Gene Name: SUMO/sentrin peptidase family member, NEDD8 specific
  Uniprot ID: Q96LD8
  ENST ID: ENST00000340912
  CDS Start-End: 217-855
cttcttcaccttacggcagagcagggaactcagctttagattctccctgtactggaaagggatgtcgcaaggttggggacgaaacctctgagtttgcgaccgtagctgtcgctttccggccaacacagaggtgcctgaaggctggttggggtggtgaggcccgaggcagctcttgttcagcttctggaatttctgagcagccctcgtcagtacaagatggaccccgtagtcttgagttacatggacagtctactgcggcaatcagatgtctcactattggatccgccaagctggctcaatgaccatattattgggtttgcgtttgagtactttgccaacagtcagtttcatgactgctctgatcacgtcagtttcatcagccctgaagtcacccagttcatcaagtgcactagcaacccagcagagattgccatgttccttgaaccactggacctccccaacaagagagttgtatttttagccatcaatgataactccaaccaggcagctggaggaacccactggagtttattggtctacctccaagataaaaatagcttttttcattatgattcccatagcaggagcaactcagttcacgcaaagcaggtagcagagaaactggaggctttcttaggcagaaaaggagacaaactggcctttgtggaagagaaagcccctgcccaacaaaacagctatgactgtgggatgtacgtgatatgtaacactgaggccttgtgtcagaacttctttaggcaacagacagaatcactgctgcagctactcacccctgcatacatcacaaagaagaggggagaatggaaagatctcattaccacacttgctaaaaagtagctattgaagtatatttgcgacttttgaaggctcctctttctgcccttccccatttgttggatggctgcaatctcagtgcctgagggaagatgcctagtagaggaaagcttaatactctttttcctgaaagaatatcatcctctgcattatccccatggaacgtttcactttaaccctgactggggagcaatatgttctgtgaaaatatcttgaaattgtacaccaaaaccttacaaccaacttatttgaacatttattacacacagggtttacgtaagacttttcttattggtatataattaatttcctttggtctcccttatccacattggcttattctggaggaaaagcagtgatctgtaaaacaaatcaagaatatattaaatctagaggaatgcagagaagaaaactataaaacagaaccaaaaacttgttgcacagcctacataattaagagatcaactggctggaagcagatcaaggcctaacttcattcaagacctaaatattatgagactcagttattcggttttatgtgacatctcttccattcaccatgcacaggcttttccagctatctatataatgtttgcaaatatttgataaagatgatgttaccctatcttcctccatctgattcctggaatgcttgaagaaaggggaaatcttgagtaacctcattaaaattaatgtctggtggacctctcagtttgctcactgattgggtagacttgctactctggattaataactgcttttctctgccttgtctattagccatgcacacacttcctccttatatccaaagttctttggttctaaaattcatagttgataccttcccaaggttacctgttgtttcagataaacatttgttcttcctgatagttataggttttcctctctgtccttaattctggcagaattgtttttagttatgtcatggtaatttcaggatgatttttgtatctgaaacttaacagacttagagttggtttgttttttaaatataaaggaagaaaagtgacctttctcagcccttttacttaattaaaaatgcagggaatgtaatttgtaaaatgtggaaccaagagtagaacgaaatactatccctccagaagcactgatgtgtttcagttgtttcaaatagtaaacaaccagatgacatgttaggtacacaaattaattctattcctaatgagaattagattgcaaggcctatgagacttgaaaaccaaagatgagcttcagccatgaaacttatttcagctacctccccagcctaaccctgcccccagccctcatggcccaaaataacctcaccactcagtgaccacagagaaagtaacttggttccttttagccgagaagggaaaacacagtaagggtaaataagtacaggttacatagcaggcctgagtgagcaggagctgaaactaaaagtcaaagagaaagctatcaaaaaaagtttccatttcaagtcggtacattttggataaaaaccagtcctaatggaagatggggctaggaaaaagattaggaactggcagtcatccatagaggtgaaatacagagggagggacagcaagagaagtgacaaaggtcactgatgataggccacaagtgtagataaagataagaaaacaatgttatttcagtgactgttgacttaggcagctaatctagactattaaagtcaaatcctctctgggaaaagttatctttctgacaatgcaaagtatgtttatttaaatatcagagtatcttcaatctgagaattaaagcatatgaaagcaatctttcctaactccctacgattcatcttataagtaaatttataagtaaatttttaaactacactagtcttttaaatatatatagaaaaatatatatacacacgtatagacatgtatatgtaatctatctacatatatataaaaaatgcattttccaaatgcattagcctgattggactgtgccacagattagtgtcctcctatgaaattttgagtatgtcatttgtaaatgttagcattataaattgcaggagaatttaagaattgacttgtatttcactggatactatagtacccggtaagttacacacctgcttgaccacataccattcatgttacatgacacaaaataggaaaaaatcttttgctggtattgcgttcccttctctcttagagtcaaaaggatctattctgcaaaattaatcaaaatattcaaaaggaaggcaggtttttcaaaactgggctaagcaattatcaaactgaactaacctgctttcagatatcctgttgtattgcccggtaagtatagtcacacttgtccaacccgtgtctcaatatggaattcagaaaagttaccatatataaacccagctataaatggttgtagaaaatataagtatcagtgggtttcctatgtaatagtgtttaaaacacaaatatttcaaccatttggcaaggtatatgttgaagttcacaagcgctggtcctaaccagatcagataaagtggattatgtttctgatatgtacctaattattttgactatactataattttacaatatgcatattgaccgtatgttttaataacacattccattgaaatgaccaagtagaatttctcagttacatggggcaggccgggcgcaatggctcatgcctgtaatcccaggactttgggaggccaaggcaggcagatcacctgaggtcaggagttcaagaccagcctggccaacatggcgaaaccccgtctctactaaaaatacaaaaattagccgggcatggtaggtgggcgcctgtaatcccagctactcagcaggctgaggcaggagaatcacttgaacctgggaggcggaggttgcagtgagctgagattgtgccactgcactccagcctaggcaacagagcgagactcttatctcaaaaaaaaaaaaaaaagtatttacagaaatgtacatgctatggtgttagagcatgaatgtcaaatccagggtctgtcagattcagtagtctcatctacaaaataaaccttgttttccttctgtcctactcagttccattttaagactaacaacaagtttgaaaacttagttttatattgctatgcagctaaacagctgtgtaaaaaatggctgataattactgttatgtacaaaagagaaacttattcaaggatggtgaatagcaacaactaacctttttatcactctgtaatgtgcagggtactttatgcacacatattacacaagtaccttgcatattatatatgcatcattatatatattaccatatatataaagtaacttgtacatttttgaggttctatagaaatatataatctcattaattcttatgttctcatgtttcaacaggtactgttattctcattttataaataaactcagaagctca

SEQ ID NO: 187361 - DNA, 1672 bp, Homo sapiens
  Payload ID: 16891
  Gene Symbol: SENP8
  Gene Name: SUMO/sentrin peptidase family member, NEDD8 specific
  Uniprot ID: Q96LD8
  ENST ID: ENST00000542035
  CDS Start-End: 334-972
acttactccaacagcagtcaagagaatgaacaggagggcatgacaagaggcagaagacagaaggcaagaagaccactcagcattacagaagcccaacaaacagatattttcagttaaaataagatagaggcaacaaaaagtaataaggaatgacctgaaatatcatgagggaaaatgtacaaggcagtgacagactggatgttggcagtgaagtacagagtgaagcggagggcaattcccaggttcctgaaggtttcatgaggaaagagtggtgccattaatcaagctcttgttcagcttctggaatttctgagcagccctcgtcagtacaagatggaccccgtagtcttgagttacatggacagtctactgcggcaatcagatgtctcactattggatccgccaagctggctcaatgaccatattattgggtttgcgtttgagtactttgccaacagtcagtttcatgactgctctgatcacgtcagtttcatcagccctgaagtcacccagttcatcaagtgcactagcaacccagcagagattgccatgttccttgaaccactggacctccccaacaagagagttgtatttttagccatcaatgataactccaaccaggcagctggaggaacccactggagtttattggtctacctccaagataaaaatagcttttttcattatgattcccatagcaggagcaactcagttcacgcaaagcaggtagcagagaaactggaggctttcttaggcagaaaaggagacaaactggcctttgtggaagagaaagcccctgcccaacaaaacagctatgactgtgggatgtacgtgatatgtaacactgaggccttgtgtcagaacttctttaggcaacagacagaatcactgctgcagctactcacccctgcatacatcacaaagaagaggggagaatggaaagatctcattaccacacttgctaaaaagtagctattgaagtatatttgcgacttttgaaggctcctctttctgcccttccccatttgttggatggctgcaatctcagtgcctgagggaagatgcctagtagaggaaagcttaatactctttttcctgaaagaatatcatcctctgcattatccccatggaacgtttcactttaaccctgactggggagcaatatgttctgtgaaaatatcttgaaattgtacaccaaaaccttacaaccaacttatttgaacatttattacacacagggtttacgtaagacttttcttattggtatataattaatttcctttggtctcccttatccacattggcttattctggaggaaaagcagtgatctgtaaaacaaatcaagaatatattaaatctagaggaatgcagagaagaaaactataaaacagaaccaaaaacttgttgcacagcctacataattaagagatcaactggctggaagcagatcaaggcctaacttcattcaagacctaaatattatgagactcagttattcggttttatgtgacatctcttccattcaccatgcacaggcttttccagctatctatataatgtttgcaaatatttgataaagatgatgttaccctatcttcctccatctgattcctggaatgcttgaagaaaggggaaatcttgagtaacctcattaaaattaatgtctggtgg

SEQ ID NO: 187362 - DNA, 550 bp, Homo sapiens
  Payload ID: 16891
  Gene Symbol: SENP8
  Gene Name: SUMO/sentrin peptidase family member, NEDD8 specific
  ENST ID: ENST00000564863
  CDS Start-End: 330-550
acttttttcagcccaacccctccaaacatgggtctcggtcggtccccttaagccacaatggagggaatacattaggctaagcaaatattccctcaggatttcatggcaaagccctttcaaccaaagaaaggatcgcgactaaggagaaagataacaagtggaaatggatcgtcataaaggtcttcatcctcatcatcatgttgagtaggctgaagaggaggaggaaaaggagcaattggtcttgctgtctcaggggtggcagaggcaaaagaaaatccatgtctcttgttcagcttctggaatttctgagcagccctcgtcagtacaagatggaccccgtagtcttgagttacatggacagtctactgcggcaatcagatgtctcactattggatccgccaagctggctcaatgaccatattattgggtttgcgtttgagtactttgccaacagtcagtttcatgactgctctgatcacgtcagtttcatcagccctgaagtcacccagttcatcaagtgcactagcaacccagcagagattgccatgtt

SEQ ID NO: 187363 - DNA, 599 bp, Homo sapiens
  Payload ID: 16891
  Gene Symbol: SENP8
  Gene Name: SUMO/sentrin peptidase family member, NEDD8 specific
  ENST ID: ENST00000567794
  CDS Start-End: 488-599
ataatggcacacacacaactggcctcatgcttccataacttcactctgcctcccacttttttcagcccaacccctccaaacatgggtctcggtcggtccccttaagccacaatggagggaatacattaggctaagcaaatattccctcaggatttcatggcaaagccctttcaaccaaagaaaggatcgcgactaaggagaaagataacaaggtttgcttgaggagaggtctgttgagagaggctacagtcggtggtgggagagaagccaaagtctgtgacggtgtctagagggactgacaccacatctaccgggatggaaatggatcgtcataaaggtcttcatcctcatcatcatgttgagtaggctgaagaggaggaggaaaaggagcaattggtcttgctgtctcaggggtggcagaggcaaaagaaaatccatgtctcttgttcagcttctggaatttctgagcagccctcgtcagtacaagatggaccccgtagtcttgagttacatggacagtctactgcggcaatcagatgtctcactattggatccgccaagctggctcaatgaccatattattgggtttgcgtttgagt

SEQ ID NO: 187364 - DNA, 703 bp, Homo sapiens
  Payload ID: 16891
  Gene Symbol: SENP8
  Gene Name: SUMO/sentrin peptidase family member, NEDD8 specific
  ENST ID: ENST00000564082
  CDS Start-End: 312-703
tcagctttagattctccctgtactggaaagggatgtcgcaaggttggggacgaaacctctgagtttgcgaccgtagctgtcgctttccggccaacacagaggtgcctgaaggctggttggggtggtgaggcccgaggcagtggaaatggatcgtcataaaggtcttcatcctcatcatcatgttgagtaggctgaagaggaggaggaaaaggagcaattggtcttgctgtctcaggggtggcagaggcaaaagaaaatccatgtctcttgttcagcttctggaatttctgagcagccctcgtcagtacaagatggaccccgtagtcttgagttacatggacagtctactgcggcaatcagatgtctcactattggatccgccaagctggctcaatgaccatattattgggtttgcgtttgagtactttgccaacagtcagtttcatgactgctctgatcacgtcagtttcatcagccctgaagtcacccagttcatcaagtgcactagcaacccagcagagattgccatgttccttgaaccactggacctccccaacaagagagttgtatttttagccatcaatgataactccaaccaggcagctggaggaacccactggagtttattggtctacctccaagataaaaatagcttttttcattatgattcccatagcaggagcaactcagttcacgcaaagca

SEQ ID NO: 187365 - DNA, 2049 bp, Homo sapiens
  Payload ID: 16892
  Gene Symbol: SAE1
  Gene Name: SUMO1 activating enzyme subunit 1
  Uniprot ID: Q9UBE0
  ENST ID: ENST00000270225
  CDS Start-End: 69-1109
gtggcgcgcgggtccggcgggcggttggcttgagcgggaccggagctgaggcaggaagagccggcgccatggtggagaaggaggaggctggcggcggcattagcgaggaggaggcggcacagtatgaccggcagatccgcctgtggggactggaggcccagaaacggctgcgggcctctcgggtgcttcttgtcggcttgaaaggacttggggctgaaattgccaagaatctcatcttggcaggagtgaaaggactgaccatgctggatcacgaacaggtaactccagaagatcccggagctcagttcttgattcgtactgggtctgttggccgaaatagggctgaagcctctttggagcgagctcagaatctcaaccccatggtggatgtgaaggtggacactgaggatatagagaagaaaccagagtcatttttcactcaattcgatgctgtgtgtctgacttgctgctccagggatgtcatagttaaagttgaccagatctgtcacaaaaatagcatcaagttctttacaggagatgtttttggctaccatggatacacatttgccaatctaggagagcatgagtttgtagaggagaaaactaaagttgccaaagttagccaaggagtagaagatgggcccgacaccaagagagcaaaacttgattcttctgagacaacgatggtcaaaaagaaggtggtcttctgccctgttaaagaagccctggaggtggactggagcagtgagaaagcaaaggctgctctgaagcgcacgacctccgactactttctccttcaagtgctcttaaagttccgtacagataaaggaagagatcccagttctgatacatatgaggaagattctgagttgttgctccagatacgaaatgatgtgcttgactcactgggtattagtcctgacctgcttcctgaggactttgtcaggtactgcttctccgagatggccccagtgtgtgcggtggttggagggattttggcacaggaaattgtgaaggccctgtctcagcgggaccctcctcacaacaacttcttcttcttcgatggcatgaaggggaatgggattgtggagtgccttggccccaagtgaactcaagatttggcagccccagagatgccaactgcagcatgcccacctgtattccctgtccccttccttcatgaaggcatctccaggcaaggaaaactgaagtcattggcccgatacaaaacatttcctgcaacgaaggaggtggtgccgacgtgctgcttcccatcaccagcagctgctcgacaaggggcgcagggtggctgtctttgttccagcactgttcaggctgcctgtcatcccgggcctgccagctcccctgagtgatgagcacttccaagcacccctctgccctttctctgtccttatgctgtcccggcctcgccagccctctggggcattgtgggagatgcctgccaggaatgagcaagctctgttgctcgggagcctcttgtcaccttcttggacttattccccacctgataccttatagagaaaagtgtgaattcaggtggagagtaggcccaggccccatgaggcaccagtggaagcacagctccaagttcagacaggtgcccttagagaggaaaaccatgacaggcaaatgcatttcctctggagtttgagaccctgacaaacaacaggtggcatctggtgtgctgttcttgagttttcgtttaggattagttgagttccagctgggttttgggagaaaggagatgctaccaagtcttggatgttagggcgagaccctgcaagttgagtattagagagcttgtctttcaaggcaggttcctggggcttcagggctaggagggaggagcctgcccttttaacagaaccccagtcacatgcggctcaagtcactcagaggctgttgcatttcagggctatgttggtcctttgtttacctcctaaaccacagctgtttgtgtttcacatatgttgtgaattttccttggttctttttaaaggaatgataataaagttacttgctttagga

SEQ ID NO: 187366 - DNA, 2211 bp, Homo sapiens
  Payload ID: 16892
  Gene Symbol: SAE1
  Gene Name: SUMO1 activating enzyme subunit 1
  ENST ID: ENST00000414294
  CDS Start-End: 73-972
gtaggtggcgcgcgggtccggcgggcggttggcttgagcgggaccggagctgaggcaggaagagccggcgccatggtggagaaggaggaggctggcggcggcattagcgaggaggaggcggcacagtatgaccggcagatccgcctgtggggactggaggcccagaaacggctgcgggcctctcgggtgcttcttgtcggcttgaaaggacttggggctgaaattgccaagaatctcatcttggcaggagtgaaaggactgaccatgctggatcacgaacaggtaactccagaagatcccggagctcagttcttgattcgtactgggtctgttggccgaaatagggctgaagcctctttggagcgagctcagaatctcaaccccatggtggatgtgaaggtggacactgaggatatagagaagaaaccagagtcatttttcactcaattcgatgctgtgtgtctgacttgctgctccagggatgtcatagttaaagttgaccagatctgtcacaaaaatagcatcaagttctttacaggagatgtttttggctaccatggatacacatttgccaatctaggagagcatgagtttgtagaggagaaaactaaagttgccaaagttagccaaggagtagaagatgggcccgacaccaagagagcaaaacttgattcttctgagacaacgatggtcaaaaagaaggtggtcttctgccctgttaaagaagccctggaggtggactggagcagtgagaaagcaaaggctgctctgaagcgcacgacctccgactactttctccttcaagaattgtttcctagaattgttgagagggtttatgcccagagacatcccagaagcactgaacgcactcatgccaagatgttaatacctttcctcactaaagagaaaccagggttccttggagaaatggctgtttccagatctggggtaggaaaattacagtgctcttaaagttccgtacagataaaggaagagatcccagttctgatacatatgaggaagattctgagttgttgctccagatacgaaatgatgtgcttgactcactgggtattagtcctgacctgcttcctgaggactttgtcaggtactgcttctccgagatggccccagtgtgtgcggtggttggagggattttggcacaggaaattgtgaaggccctgtctcagcgggaccctcctcacaacaacttcttcttcttcgatggcatgaaggggaatgggattgtggagtgccttggccccaagtgaactcaagatttggcagccccagagatgccaactgcagcatgcccacctgtattccctgtccccttccttcatgaaggcatctccaggcaaggaaaactgaagtcattggcccgatacaaaacatttcctgcaacgaaggaggtggtgccgacgtgctgcttcccatcaccagcagctgctcgacaaggggcgcagggtggctgtctttgttccagcactgttcaggctgcctgtcatcccgggcctgccagctcccctgagtgatgagcacttccaagcacccctctgccctttctctgtccttatgctgtcccggcctcgccagccctctggggcattgtgggagatgcctgccaggaatgagcaagctctgttgctcgggagcctcttgtcaccttcttggacttattccccacctgataccttatagagaaaagtgtgaattcaggtggagagtaggcccaggccccatgaggcaccagtggaagcacagctccaagttcagacaggtgcccttagagaggaaaaccatgacaggcaaatgcatttcctctggagtttgagaccctgacaaacaacaggtggcatctggtgtgctgttcttgagttttcgtttaggattagttgagttccagctgggttttgggagaaaggagatgctaccaagtcttggatgttagggcgagaccctgcaagttgagtattagagagcttgtctttcaaggcaggttcctggggcttcagggctaggagggaggagcctgcccttttaacagaaccccagtcacatgcggctcaagtcactcagaggctgttgcatttcagggctatgttggtcctttgtttacctcctaaaccacagctgtttgtgtttcacatatgttgtgaattttccttggttctttttaaaggaatgataataaagttacttgctttagga

SEQ ID NO: 187367 - DNA, 2313 bp, Homo sapiens
  Payload ID: 16892
  Gene Symbol: SAE1
  Gene Name: SUMO1 activating enzyme subunit 1
  Uniprot ID: Q9UBE0
  ENST ID: ENST00000413379
  CDS Start-End: 103-1002
agaagcactccgggcgtgctgccggcggcggtaggtggcgcgcgggtccggcgggcggttggcttgagcgggaccggagctgaggcaggaagagccggcgccatggtggagaaggaggaggctggcggcggcattagcgaggaggaggcggcacagtatgaccggcagatccgcctgtggggactggaggcccagaaacggctgcgggcctctcgggtgcttcttgtcggcttgaaaggacttggggctgaaattgccaagaatctcatcttggcaggagtgaaaggactgaccatgctggatcacgaacaggtaactccagaagatcccggagctcagttcttgattcgtactgggtctgttggccgaaatagggctgaagcctctttggagcgagctcagaatctcaaccccatggtggatgtgaaggtggacactgaggatatagagaagaaaccagagtcatttttcactcaattcgatgctgtgtgtctgacttgctgctccagggatgtcatagttaaagttgaccagatctgtcacaaaaatagcatcaagttctttacaggagatgtttttggctaccatggatacacatttgccaatctaggagagcatgagtttgtagaggagaaaactaaagttgccaaagttagccaaggagtagaagatgggcccgacaccaagagagcaaaacttgattcttctgagacaacgatggtcaaaaagaaggtggtcttctgccctgttaaagaagccctggaggtggactggagcagtgagaaagcaaaggctgctctgaagcgcacgacctccgactactttctccttcaaggccctgtctcagcgggaccctcctcacaacaacttcttcttcttcgatggcatgaaggggaatgggattgtggagtgccttggccccaagtgaactcaagatttggcagccccagagatgccaactgcagcatgcccacctgtattccctgtccccttccttcatgaaggcatctccaggcaaggaaaactgaagtcattggcccgatacaaaacatttcctgcaacgaaggaggtggtgccgacgtgctgcttcccatcaccagcagctgctcgacaaggggcgcagggtggctgtctttgttccagcactgttcaggctgcctgtcatcccgggcctgccagctcccctgagtgatgagcacttccaagcacccctctgccctttctctgtccttatgctgtcccggcctcgccagccctctggggcattgtgggagatgcctgccaggaatgagcaagctctgttgctcgggagcctcttgtcaccttcttggacttattccccacctgataccttatagagaaaagtgtgaattcaggtggagagtaggcccaggccccatgaggcaccagtggaagcacagctccaagttcagacaggtgcccttagagaggaaaaccatgacaggcaaatgcatttcctctggagtttgagaccctgacaaacaacaggtggcatctggtgtgctgttcttgagttttcgtttaggattagttgagttccagctgggttttgggagaaaggagatgctaccaagtcttggatgttagggcgagaccctgcaagttgagtattagagagcttgtctttcaaggcaggttcctggggcttcagggctaggagggaggagcctgcccttttaacagaaccccagtcacatgcggctcaagtcactcagaggctgttgcatttcagggctatgttggtcctttgtttacctcctaaaccacagctgtttgtgtttcacatatgttgtgaattttccttggttctttttaaaggaatgataataaagttacttgctttaggatttgcttgtttttcttccacttcagaagcttctgagagggaatgggatgatcctaccagttgccttttcagacctgaggctctaactcaagagattcctcctctccctcaccattcctgccaccattttttctgggtgatgcagcaagagttaaattgttcacattctagaatgtgtagaagcttctggctccagttgtctaatggataattcagctaaatagtggctattttcagtggcaagaattataataataaagggaagtcaaaagtgatgcttcatatgccccaagtgccacagccgctacgggtcagagcttttattggaagaccaggtttgccttgatgcagccaaagtgcgttccagttcaccccactcttgcttgtgtttcttctttatgtaaattgtgtgatgtttcaataaatcagtctctttcctattctga

SEQ ID NO: 187368 - DNA, 1851 bp, Homo sapiens
  Payload ID: 16892
  Gene Symbol: SAE1
  Gene Name: SUMO1 activating enzyme subunit 1
  Uniprot ID: Q9UBE0
  ENST ID: ENST00000392776
  CDS Start-End: 37-837
agcgggaccggagctgaggcaggaagagccggcgccatggtggagaaggaggaggctggcggcggcattagcgaggaggaggcggcacagtatgaccggcagatccgcctgtggggactggaggcccagaaacggctgcgggcctctcgggtgcttcttgtcggcttgaaaggacttggggctgaaattgccaagaatctcatcttggcaggagtgaaaggactgaccatgctggatcacgaacaggtaactccagaagatcccggagctcagttcttgattcgtactgggtctgttggccgaaatagggctgaagcctctttggagcgagctcagaatctcaaccccatggtggatgtgaaggtggacactgaggatatagagaagaaaccagagtcatttttcactcaattcgatgctgtgtgtctgacttgctgctccagggatgtcatagttaaagttgaccagatctgtcacaaaaatagcatcaagttctttacaggagatgtttttggctaccatggatacacatttgccaatctaggagagcatgagtttgtagaggagaaaactaaagttgccaaagttagccaaggagtagaagatgggcccgacaccaagagagcaaaacttgattcttctgagacaacgatggtcaaaaagaaggtggtcttctgccctgttaaagaagccctggaggtggactggagcagtgagaaagcaaaggctgctctgaagcgcacgacctccgactactttctccttcaaggtactgcttctccgagatggccccagtgtgtgcggtggttggagggattttggcacaggaaattgtgaaggccctgtctcagcgggaccctcctcacaacaacttcttcttcttcgatggcatgaaggggaatgggattgtggagtgccttggccccaagtgaactcaagatttggcagccccagagatgccaactgcagcatgcccacctgtattccctgtccccttccttcatgaaggcatctccaggcaaggaaaactgaagtcattggcccgatacaaaacatttcctgcaacgaaggaggtggtgccgacgtgctgcttcccatcaccagcagctgctcgacaaggggcgcagggtggctgtctttgttccagcactgttcaggctgcctgtcatcccgggcctgccagctcccctgagtgatgagcacttccaagcacccctctgccctttctctgtccttatgctgtcccggcctcgccagccctctggggcattgtgggagatgcctgccaggaatgagcaagctctgttgctcgggagcctcttgtcaccttcttggacttattccccacctgataccttatagagaaaagtgtgaattcaggtggagagtaggcccaggccccatgaggcaccagtggaagcacagctccaagttcagacaggtgcccttagagaggaaaaccatgacaggcaaatgcatttcctctggagtttgagaccctgacaaacaacaggtggcatctggtgtgctgttcttgagttttcgtttaggattagttgagttccagctgggttttgggagaaaggagatgctaccaagtcttggatgttagggcgagaccctgcaagttgagtattagagagcttgtctttcaaggcaggttcctggggcttcagggctaggagggaggagcctgcccttttaacagaaccccagtcacatgcggctcaagtcactcagaggctgttgcatttcagggctatgttggtcctttgtttacctcctaaaccacagctgtttgtgtttcacatatgttgtgaattttccttggttctttttaaaggaatgata

SEQ ID NO: 187369 - DNA, 744 bp, Homo sapiens
  Payload ID: 16892
  Gene Symbol: SAE1
  Gene Name: SUMO1 activating enzyme subunit 1
  ENST ID: ENST00000600706
  CDS Start-End: 129-744
gaagcactccgggcgtgctgccggcggcgtttgagccaccatcatcctccctcaccttaactgtgacatcttcctacccccatggctttccatcatgcctcgaagaaaatccagaatccttccattgcatgctgcgggcctctcgggtgcttcttgtcggcttgaaaggacttggggctgaaattgccaagaatctcatcttggcaggagtgaaaggactgaccatgctggatcacgaacaggtaactccagaagatcccggagctcagttcttgattcgtactgggtctgttggccgaaatagggctgaagcctctttggagcgagctcagaatctcaaccccatggtggatgtgaaggtggacactgaggatatagagaagaaaccagagtcatttttcactcaattcgatgctgtgtgtctgacttgctgctccagggatgtcatagttaaagttgaccagatctgtcacaaaaatagcatcaagttctttacaggagatgtttttggctaccatggatacacatttgccaatctaggagagcatgagtttgtagaggagaaaactaaagttgccaaagttagccaaggagtagaagatgggcccgacaccaagagagcaaaacttgattcttctgagacaacgatggtcaaaaagaaggtggtcttctgccctgttaaagaagccctggaggtggactggagcagtgagaaagcaaaggctgctctgaagcgcacgacct

SEQ ID NO: 187370 - DNA, 570 bp, Homo sapiens
  Payload ID: 16892
  Gene Symbol: SAE1
  Gene Name: SUMO1 activating enzyme subunit 1
  ENST ID: ENST00000597808
  CDS Start-End: 172-570
tccgcggacgaggtactgcgcaggcgtgggagggtctgcgcatgcgcagaagcactccgggcgtgctgccggcggcggctgcgggcctctcgggtgcttcttgtcggcttgaaaggacttggggctgaaattgccaagaatctcatcttggcaggagtgaaaggactgaccatgctggatcacgaacaggtaactccagaagatcccggagctcagttcttgattcgtactgggtctgttggccgaaatagggctgaagcctctttggagcgagctcagaatctcaaccccatggtggatgtgaaggtggacactgaggatatagagaagaaaccagagtcatttttcactcaattcgatgctgtgtgtctgacttgctgctccagggatgtcatagttaaagttgaccagatctgtcacaaaaatagcatcaagttctttacaggagatgtttttggctaccatggatacacatttgccaatctaggagagcatgagtttgtagaggagaaaactaaagttgccaaagttagccaaggagtagaagatgggcccgacaccaagagagca

SEQ ID NO: 187371 - DNA, 483 bp, Homo sapiens
  Payload ID: 16892
  Gene Symbol: SAE1
  Gene Name: SUMO1 activating enzyme subunit 1
  ENST ID: ENST00000600753
  CDS Start-End: 271-483
aggtggcgcgcgggtccggcgggcggttggcttgagcgggaccggagctgaggcaggaagagccggcgccatggtggagaaggaggaggctggcggcggcattagcgaggaggaggcggcacagtatgaccggcagatccgcctgtggggactggaggcccagaaacggtaactccagaagatcccggagctcagttcttgattcgtactgggtctgttggccgaaatagggctgaagcctctttggagcgagctcagaatctcaaccccatggtggatgtgaaggtggacactgaggatatagagaagaaaccagagtcatttttcactcaattcgatgctgtgtgtctgacttgctgctccagggatgtcatagttaaagttgaccagatctgtcacaaaaatagcatcaagttctttacaggagatgtttttggctaccatggatacacatttgccaatctaggagagcatgagtttgta

SEQ ID NO: 187372 - DNA, 1831 bp, Homo sapiens
  Payload ID: 16892
  Gene Symbol: SAE1
  Gene Name: SUMO1 activating enzyme subunit 1
  ENST ID: ENST00000598840
  CDS Start-End: 94-891
ccgggcgtgctgccggcggcggtaggtggcgcgcgggtccggcgggcggttggcttgagcgggaccggagctgaggcaggaagagccggcgccatggtggagaaggaggaggctggcggcggcattagcgaggaggaggcggcacagtatgaccggcagatccgcctgtggggactggaggcccagaaacggctgcgggcctctcgggtgcttcttgtcggcttgaaaggacttggggctgaaattgccaagaatctcatcttggcaggagtgaaaggactgaccatgctggatcacgaacaggtaactccagaagatcccggagctcagttcttgattcgtactgggtctgttggccgaaatagggctgaagcctctttggagcgagctcagaatctcaaccccatggtggatgtgaaggtggacactgaggatatagagaagaaaccagagtcatttttcactcaattcgatgctaaggtggtcttctgccctgttaaagaagccctggaggtggactggagcagtgagaaagcaaaggctgctctgaagcgcacgacctccgactactttctccttcaagtgctcttaaagttccgtacagataaaggaagagatcccagttctgatacatatgaggaagattctgagttgttgctccagatacgaaatgatgtgcttgactcactgggtattagtcctgacctgcttcctgaggactttgtcaggtactgcttctccgagatggccccagtgtgtgcggtggttggagggattttggcacaggaaattgtgaaggccctgtctcagcgggaccctcctcacaacaacttcttcttcttcgatggcatgaaggggaatgggattgtggagtgccttggccccaagtgaactcaagatttggcagccccagagatgccaactgcagcatgcccacctgtattccctgtccccttccttcatgaaggcatctccaggcaaggaaaactgaagtcattggcccgatacaaaacatttcctgcaacgaaggaggtggtgccgacgtgctgcttcccatcaccagcagctgctcgacaaggggcgcagggtggctgtctttgttccagcactgttcaggctgcctgtcatcccgggcctgccagctcccctgagtgatgagcacttccaagcacccctctgccctttctctgtccttatgctgtcccggcctcgccagccctctggggcattgtgggagatgcctgccaggaatgagcaagctctgttgctcgggagcctcttgtcaccttcttggacttattccccacctgataccttatagagaaaagtgtgaattcaggtggagagtaggcccaggccccatgaggcaccagtggaagcacagctccaagttcagacaggtgcccttagagaggaaaaccatgacaggcaaatgcatttcctctggagtttgagaccctgacaaacaacaggtggcatctggtgtgctgttcttgagttttcgtttaggattagttgagttccagctgggttttgggagaaaggagatgctaccaagtcttggatgttagggcgagaccctgcaagttgagtattagagagcttgtctttcaaggcaggttcctggggcttcagggctaggagggaggagcctgcccttttaacagaaccccagtcacatgcggctcaagtcactcagaggctgttgcatttcagggctatgttggtcctttgtttacctcctaaaccacagctgtttgtgtttcacatatgttgtgaattttccttggttctttttaaaggaatgataataaagttacttgctttagga

SEQ ID NO: 187373 - DNA, 723 bp, Homo sapiens
  Payload ID: 16892
  Gene Symbol: SAE1
  Gene Name: SUMO1 activating enzyme subunit 1
  ENST ID: ENST00000594144
  CDS Start-End: 253-723
ggccgaggggaggcggaaatagccgaaaggagctgagcaggagcgaggaggcgacgggggagagccagaaagagctgaagacagggtctctctgtcgcgcagactagagtgcagtggtgtgatcacaactcacttcagccttgacttcttgggctcaggctgcgggcctctcgggtgcttcttgtcggcttgaaaggacttggggctgaaattgccaagaatctcatcttggcaggagtgaaaggactgaccatgctggatcacgaacaggtaactccagaagatcccggagctcagttcttgattcgtactgggtctgttggccgaaatagggctgaagcctctttggagcgagctcagaatctcaaccccatggtggatgtgaaggtggacactgaggatatagagaagaaaccagagtcatttttcactcaattcgatgctgtgtgtctgacttgctgctccagggatgtcatagttaaagttgaccagatctgtcacaaaaatagcatcaagttctttacaggagatgtttttggctaccatggatacacatttgccaatctaggagagcatgagtttgtagaggagaaaactaaagttgccaaagttagccaaggagtagaagatgggcccgacaccaagagagcaaaacttgattcttctgagacaacgatggtcaaaaagaaggtggtcttctgccctgttaaagaagccctggag

SEQ ID NO: 187374 - DNA, 709 bp, Homo sapiens
  Payload ID: 16892
  Gene Symbol: SAE1
  Gene Name: SUMO1 activating enzyme subunit 1
  ENST ID: ENST00000594526
  CDS Start-End: 415-709
gaaactgagacggtccggaaagagccgaaagcggtgtccgggtgggtggcaggaggtggaaacagccgaaagaaaagcagccaggttcctgggatggctctagggagggttatttacactgtgagtgaggaggcattcacagagaagttcctccagagtgtggaagaagcactaccatttggcaccaacgcctggagaacaaaggaggagaccattggccaaagagaggcatttccattttgttggaacctgctgaccaccaacccatagcattttttccctttcttccttgctaatccaatcgcagattcattgaggaggctgcgggcctctcgggtgcttcttgtcggcttgaaaggacttggggctgaaattgccaagaatctcatcttggcaggagtgaaaggactgaccatgctggatcacgaacaggtaactccagaagatcccggagctcagttcttgattcgtactgggtctgttggccgaaatagggctgaagcctctttggagcgagctcagaatctcaaccccatggtggatgtgaaggtggacactgaggatatagagaagaaaccagagtcatttttcactcaattcgatgctgtgtgtctgacttgctgctccagggatgtcatagttaaagttgaccagatctgtcacaaaaatagcatcaagttctttacaggagatgtttttggctaccatg

SEQ ID NO: 187375 - DNA, 2106 bp, Homo sapiens
  Payload ID: 16892
  Gene Symbol: SAE1
  Gene Name: SUMO1 activating enzyme subunit 1
  ENST ID: ENST00000596995
  CDS Start-End: 43-195
ggcttgagcgggaccggagctgaggcaggaagagccggcgccatggtggagaaggaggaggctggcggcggcattagcgaggaggaggcggcacagtatgaccggcagatccgcctgtggggactggaggcccagaaacggtcagggccggcgcggcttgaggccgctagggtctggagggggcgtctattctgaggcgtttgcggcccggaaggagcgggaaggctgcgggcctctcgggtgcttcttgtcggcttgaaaggacttggggctgaaattgccaagaatctcatcttggcaggagtgaaaggactgaccatgctggatcacgaacaggtaactccagaagatcccggagctcagttcttgattcgtactgggtctgttggccgaaatagggctgaagcctctttggagcgagctcagaatctcaaccccatggtggatgtgaaggtggacactgaggatatagagaagaaaccagagtcatttttcactcaattcgatgctgtgtgtctgacttgctgctccagggatgtcatagttaaagttgaccagatctgtcacaaaaatagcatcaagttctttacaggagatgtttttggctaccatggatacacatttgccaatctaggagagcatgagtttgtagaggagaaaactaaagttgccaaagttagccaaggagtagaagatgggcccgacaccaagagagcaaaacttgattcttctgagacaacgatggtcaaaaagaaggtggtcttctgccctgttaaagaagccctggaggtggactggagcagtgagaaagcaaaggctgctctgaagcgcacgacctccgactactttctccttcaagtgctcttaaagttccgtacagataaaggaagagatcccagttctgatacatatgaggaagattctgagttgttgctccagatacgaaatgatgtgcttgactcactgggtattagtcctgacctgcttcctgaggactttgtcaggtactgcttctccgagatggccccagtgtgtgcggtggttggagggattttggcacaggaaattgtgaaggccctgtctcagcgggaccctcctcacaacaacttcttcttcttcgatggcatgaaggggaatgggattgtggagtgccttggccccaagtgaactcaagatttggcagccccagagatgccaactgcagcatgcccacctgtattccctgtccccttccttcatgaaggcatctccaggcaaggaaaactgaagtcattggcccgatacaaaacatttcctgcaacgaaggaggtggtgccgacgtgctgcttcccatcaccagcagctgctcgacaaggggcgcagggtggctgtctttgttccagcactgttcaggctgcctgtcatcccgggcctgccagctcccctgagtgatgagcacttccaagcacccctctgccctttctctgtccttatgctgtcccggcctcgccagccctctggggcattgtgggagatgcctgccaggaatgagcaagctctgttgctcgggagcctcttgtcaccttcttggacttattccccacctgataccttatagagaaaagtgtgaattcaggtggagagtaggcccaggccccatgaggcaccagtggaagcacagctccaagttcagacaggtgcccttagagaggaaaaccatgacaggcaaatgcatttcctctggagtttgagaccctgacaaacaacaggtggcatctggtgtgctgttcttgagttttcgtttaggattagttgagttccagctgggttttgggagaaaggagatgctaccaagtcttggatgttagggcgagaccctgcaagttgagtattagagagcttgtctttcaaggcaggttcctggggcttcagggctaggagggaggagcctgcccttttaacagaaccccagtcacatgcggctcaagtcactcagaggctgttgcatttcagggctatgttggtcctttgtttacctcctaaaccacagctgtttgtgtttcacatatgttgtgaattttccttggttctttttaaaggaatgataataaagttacttgctttagg

SEQ ID NO: 187376 - DNA, 4679 bp, Homo sapiens
  Payload ID: 16893
  Gene Symbol: SENP1
  Gene Name: SUMO1/sentrin specific peptidase 1
  Uniprot ID: Q9P0U3
  ENST ID: ENST00000448372
  CDS Start-End: 397-2331
gaggccgttccttctggtctctctctcctgggccgcggagagaccgtctccctgccgttacagcaggccccatcccagcgcccagccgtacttggggaaaggccggttgcgattccggggctttcccgccagagctgggtcttctctggggagagctgttttcaccgggaagctcggctttctgtggtaccggcttcatctcccgccttccttgagacccgagtgatatttcttgactacttctgcgtctcacgtaaacatttctccaactctcctactctgtggtatctccctgagatgtgatatcgctagtgccaccatcagaaagaaacgtctggaccctcctgctcaggactttgtatctttgctaaagtcagtgatgtgaaaagacttgaaatggatgatattgctgataggatgaggatggatgctggagaagtgactttagtgaaccacaactccgtattcaaaacccacctcctgccacaaacaggttttccagaggaccagctttcgctttctgaccagcagattttatcttccaggcaaggacatttggaccgatcttttacatgttccacaagaagtgcagcttataatccaagctattactcagataatccttcctcagacagttttcttggctcaggcgatttaagaacctttggccagagtgcaaatggccaatggagaaattctaccccatcgtcaagctcatctttacaaaaatcaagaaacagccgaagtctttacctcgaaacccgaaagacctcaagtggattatcaaacagttttgcgggaaagtcaaaccatcactgccatgtatctgcatatgaaaaatcttttcctattaaacctgttccaagtccatcttggagtggttcatgtcgtcgaagtcttttgagccccaagaaaactcagaggcgacatgttagtacagcagaagagacagttcaagaagaagaaagagagatttacagacagctgctacagatggtcacagggaaacagtttactatagccaaacccaccacacattttcctttacacctgtctcgatgtcttagttccagtaaaaatactttgaaagactcactgtttaaaaatggaaactcttgtgcatctcagatcattggctctgatacttcatcatctggatctgccagcattttaactaaccaggaacagctgtcccacagtgtatattccctatcttcttataccccagatgttgcatttggatccaaagattctggtactcttcatcatccccatcatcaccactctgttccacatcagccagataacttagcagcttcaaatacacaatctgaaggatcagactctgtgattttactgaaagtgaaagattcccagactccaactcccagttctactttcttccaggcagagctgtggatcaaagaattaactagtgtttatgattctcgagcacgagaaagattgcgccagattgaagaacagaaggcattggccttacagcttcaaaaccagagattgcaggagcgggaacattcagtacatgattcagtagaactacatcttcgtgtacctcttgaaaaggagattcctgttactgttgtccaagaaacacaaaaaaaaggtcataaattaactgatagtgaagatgaatttcctgaaattacagaggaaatggagaaagaaataaagaatgtatttcgtaatgggaatcaggatgaagttctcagtgaagcatttcgcctgaccattacacgcaaagatattcaaactctaaaccatctgaattggctcaatgatgagatcatcaatttctacatgaatatgctgatggagcgaagtaaagagaagggcttgccaagtgtgcatgcatttaatacctttttcttcactaaattaaaaacggctggttatcaggcagtgaaacgttggacaaagaaagtagatgtattttctgttgacattcttttggtgcccattcacctgggagtacactggtgtctagctgttgtggactttagaaagaagaatattacctattacgactccatgggtgggataaacaatgaagcctgcagaatactcttgcaatacctaaagcaagaaagcattgacaagaaaaggaaagagtttgacaccaatggctggcagcttttcagcaagaaaagccaggagattcctcagcagatgaatggaagtgactgtgggatgtttgcctgcaaatatgctgactgtattaccaaagacagaccaatcaacttcacacagcaacacatgccatacttccggaagcggatggtctgggagatcctccaccgaaaactcttgtgaagactgtctcacttagcagaccttgaccatgtgggggaccagctctttgttgtctacagccagagaccttggaaacagctgctcccagccctctgctgttgtaacacccttgatcctggaccaggccctggcgagatgcattcacaagcacatctgcctttccttttgtatctcagatactatttttgcaaagaaactttggtgctgtgaaaggggtgagggacatccctaagctgaagagagagactgcttttcacttcttcagttctgccatcttgttttcaaagggctccagcctcactcagtccctaattatgggactgagaaaagcttggaaagaatcttggtttcatataaattcttgttgttaggccttactaagaagtaggaaagggcatgggcaaaaggtagggataaaaaccaccagcatatacatggacatacacacacacccacacacacaaacacacacacacacacaattttcacgatgtatggtcaggaatgtgactgtaaactggactttggggcccaggcataagtcccttcctccaggacctttcctatttatatgtccctatacaaaatccatctgcttttatacgtagctgttttatcatctgtagcttcatcctatccggaggcacagcacatgagccctggacaggtcccaaagttccaagcagtcctttccgtgaaagcaggggtttgcatgtgctaccaacacatgatacggggaagacccacccagggagcggtttcagtggcgcaacaaagcaccacttttactgttgcctacttctgaccaagaagaaaaaggaccttagtatttagcataaaattccagcgctggatgaatgcagatctagtttggtctgtggctagtttaaatatgtttctaaccacagagaatttcatatatatatacatatatatatacacatacatatatatatatatatatgtatgtataaaatttcacagggatatgcttttttttttaaagactgaatgtgttcaccatttagcctgtagatttatttccattttccaaattccagcacacagagatcccagcccctatgagtagggtgtttgtggactacctaatggaatatttttgaggcctggatgaactttgccatatgggtagaggttacagagggaggtgatattttcagctaaaaaaaaaaacgggtggagtttggactgatcaacttgagatttaaaaactgctattccttttgttctttctagcatctctccccaccctctgagagctcctcaggcttagatagtgaagtgatcaaatgccagtgtcattttgtacttaagttccaaagtaggaacattttatacttttttctgtattgtaataggtagttttgtatgaaatcttttctcctctcccgttgtaccgcattctttccagcattgtgctttttccctgggcttatttgaaaattttactgttttatacaagctcgtttagtacatttttctatgttttaccacaagttacaatttgaaaagaaaactattttttttaaatattccattgttaactgaatgttactgtttccactccagcaactacatgtcctcccttcaactgcctgccttttggggaaagaccaccttttgtgtgtttgttttttctctctctttctttccctttctctttctatctctctttatttttctttctttttctttgtttttgagttttctataggaaataaatagctttctatatatgagttgctggggaccttcacattctcttttagaaagctgtggcatgcagtctcattgcaggactcctggaatattgtctggttcttggtatttactgtatgtaagcaacaacttgaaaggtggcaatatggtgtcgatttggactatgaatcaaaagacctttttcaggttctttcactattgtctgggggactcagaacaagattgttctctgtatttattgtttgtccatttaggtaacatctgtcttaccttcctcacagactttgtacagaccaaagcaacaaatatttattgccatgtatagcagaaaatgaaacatgcaacaaaagcactttgaaaaatatataaggaattgttgagcctgtctgaatttgggccccctttctgactaatgcagttttgcacaaggtagaagttagtgaccctgagaccatcttaccaccctggacctggtccaaatacagacttacacagtggaccattctttcctgagctagccaacaagagcaggagtagtatctggaaactttcccctttgtttaggggtaggctttgatgaccaggaaaaaaaaaaaggtatttctgca

SEQ ID NO: 187377 - DNA, 2260 bp, Homo sapiens
  Payload ID: 16893
  Gene Symbol: SENP1
  Gene Name: SUMO1/sentrin specific peptidase 1
  Uniprot ID: Q9P0U3
  ENST ID: ENST00000549518
  CDS Start-End: 326-2260
attccgagtacgagaaagcgaaaaagcccagactgaaaagggtactgagaaattacgactagtcttaaatgctcccttcgcttctcgggcctcgccacaccgcgcaggcgccccactggtccttaactctgttctttgacctcctgccccagccccctcctcttcagccacctagcgactcttccggtgctgtgaaggcggttccggttcgcggcggttcccgggttttgcgttccgcgcccggccggaaaccccttcgcatggcagccggttccggttcggactttgtatctttgctaaagtcagtgatgtgaaaagacttgaaatggatgatattgctgataggatgaggatggatgctggagaagtgactttagtgaaccacaactccgtattcaaaacccacctcctgccacaaacaggttttccagaggaccagctttcgctttctgaccagcagattttatcttccaggcaaggacatttggaccgatcttttacatgttccacaagaagtgcagcttataatccaagctattactcagataatccttcctcagacagttttcttggctcaggcgatttaagaacctttggccagagtgcaaatggccaatggagaaattctaccccatcgtcaagctcatctttacaaaaatcaagaaacagccgaagtctttacctcgaaacccgaaagacctcaagtggattatcaaacagttttgcgggaaagtcaaaccatcactgccatgtatctgcatatgaaaaatcttttcctattaaacctgttccaagtccatcttggagtggttcatgtcgtcgaagtcttttgagccccaagaaaactcagaggcgacatgttagtacagcagaagagacagttcaagaagaagaaagagagatttacagacagctgctacagatggtcacagggaaacagtttactatagccaaacccaccacacattttcctttacacctgtctcgatgtcttagttccagtaaaaatactttgaaagactcactgtttaaaaatggaaactcttgtgcatctcagatcattggctctgatacttcatcatctggatctgccagcattttaactaaccaggaacagctgtcccacagtgtatattccctatcttcttataccccagatgttgcatttggatccaaagattctggtactcttcatcatccccatcatcaccactctgttccacatcagccagataacttagcagcttcaaatacacaatctgaaggatcagactctgtgattttactgaaagtgaaagattcccagactccaactcccagttctactttcttccaggcagagctgtggatcaaagaattaactagtgtttatgattctcgagcacgagaaagattgcgccagattgaagaacagaaggcattggccttacagcttcaaaaccagagattgcaggagcgggaacattcagtacatgattcagtagaactacatcttcgtgtacctcttgaaaaggagattcctgttactgttgtccaagaaacacaaaaaaaaggtcataaattaactgatagtgaagatgaatttcctgaaattacagaggaaatggagaaagaaataaagaatgtatttcgtaatgggaatcaggatgaagttctcagtgaagcatttcgcctgaccattacacgcaaagatattcaaactctaaaccatctgaattggctcaatgatgagatcatcaatttctacatgaatatgctgatggagcgaagtaaagagaagggcttgccaagtgtgcatgcatttaatacctttttcttcactaaattaaaaacggctggttatcaggcagtgaaacgttggacaaagaaagtagatgtattttctgttgacattcttttggtgcccattcacctgggagtacactggtgtctagctgttgtggactttagaaagaagaatattacctattacgactccatgggtgggataaacaatgaagcctgcagaatactcttgcaatacctaaagcaagaaagcattgacaagaaaaggaaagagtttgacaccaatggctggcagcttttcagcaagaaaagccaggagattcctcagcagatgaatggaagtgactgtgggatgtttgcctgcaaatatgctgactgtattaccaaagacagaccaatcaacttcacacagcaacacatgccatacttccggaagcggatggtctgggagatcctccaccgaaaactcttgtga

SEQ ID NO: 187378 - DNA, 4967 bp, Homo sapiens
  Payload ID: 16893
  Gene Symbol: SENP1
  Gene Name: SUMO1/sentrin specific peptidase 1
  ENST ID: ENST00000552189
  CDS Start-End: 478-870
ggccgccggtggccgttaggctacctgaggccgttccttctggtctctctctcctgggccgcggagagaccgtctccctgccgttacagcaggccccatcccagcgcccagccgtacttggggaaaggccggttgcgattccggggctttcccgccagagctgggtcttctctggggagagctgttttcaccgggaagctcggctttctgtggtaccggcttcatctcccgccttccttgagacccgagtgatatttcttgactacttctgcgtctcacgtaaacatttctccaactctcctactctgtggtatctccctgagatgtgatatcgctagtgccaccatcagaaagaaacgtctggaccctcctgctcaggttatgaaaatccccttaactgccacaatttgcttacctggctcatcgcctcctggactttgtatctttgctaaagtcagtgatgtgaaaagacttgaaatggatgatattgctgataggatgaggatggatgctggagaagtgactttagtgaaccacaactccgtattcaaaacccacctcctgccacaaacaggttttccagaggaccagctttcgctttctgaccagcagattttatcttccaggcaaggacatttggaccgatcttttacatgttccacaagaagtgcagcttataatccaagctattactcaggcccaggcctgggagtgcttgcaagatatagttggggtaaaatgttgacttttggtggacaccacggagtcacattgatgcagataaggcacatggctgtggcaggattcagctccttcatcaattttcagataatccttcctcagacagttttcttggctcaggcgatttaagaacctttggccagagtgcaaatggccaatggagaaattctaccccatcgtcaagctcatctttacaaaaatcaagaaacagccgaagtctttacctcgaaacccgaaagacctcaagtggattatcaaacagttttgcgggaaagtcaaaccatcactgccatgtatctgcatatgaaaaatcttttcctattaaacctgttccaagtccatcttggagtggttcatgtcgtcgaagtcttttgagccccaagaaaactcagaggcgacatgttagtacagcagaagagacagttcaagaagaagaaagagagatttacagacagctgctacagatggtcacagggaaacagtttactatagccaaacccaccacacattttcctttacacctgtctcgatgtcttagttccagtaaaaatactttgaaagactcactgtttaaaaatggaaactcttgtgcatctcagatcattggctctgatacttcatcatctggatctgccagcattttaactaaccaggaacagctgtcccacagtgtatattccctatcttcttataccccagatgttgcatttggatccaaagattctggtactcttcatcatccccatcatcaccactctgttccacatcagccagataacttagcagcttcaaatacacaatctgaaggatcagactctgtgattttactgaaagtgaaagattcccagactccaactcccagttctactttcttccaggcagagctgtggatcaaagaattaactagtgtttatgattctcgagcacgagaaagattgcgccagattgaagaacagaaggcattggccttacagcttcaaaaccagagattgcaggagcgggaacattcagtacatgattcagtagaactacatcttcgtgtacctcttgaaaaggagattcctgttactgttgtccaagaaacacaaaaaaaaggtcataaattaactgatagtgaagatgaatttcctgaaattacagaggaaatggagaaagaaataaagaatgtatttcgtaatgggaatcaggatgaagttctcagtgaagcatttcgcctgaccattacacgcaaagatattcaaactctaaaccatctgaattggctcaatgatgagatcatcaatttctacatgaatatgctgatggagcgaagtaaagagaagggcttgccaagtgtgcatgcatttaatacctttttcttcactaaattaaaaacggctggttatcaggcagtgaaacgttggacaaagaaagtagatgtattttctgttgacattcttttggtgcccattcacctgggagtacactggtgtctagctgttgtggactttagaaagaagaatattacctattacgactccatgggtgggataaacaatgaagcctgcagaatactcttgcaatacctaaagcaagaaagcattgacaagaaaaggaaagagtttgacaccaatggctggcagcttttcagcaagaaaagccaggagattcctcagcagatgaatggaagtgactgtgggatgtttgcctgcaaatatgctgactgtattaccaaagacagaccaatcaacttcacacagcaacacatgccatacttccggaagcggatggtctgggagatcctccaccgaaaactcttgtgaagactgtctcacttagcagaccttgaccatgtgggggaccagctctttgttgtctacagccagagaccttggaaacagctgctcccagccctctgctgttgtaacacccttgatcctggaccaggccctggcgagatgcattcacaagcacatctgcctttccttttgtatctcagatactatttttgcaaagaaactttggtgctgtgaaaggggtgagggacatccctaagctgaagagagagactgcttttcacttcttcagttctgccatcttgttttcaaagggctccagcctcactcagtccctaattatgggactgagaaaagcttggaaagaatcttggtttcatataaattcttgttgttaggccttactaagaagtaggaaagggcatgggcaaaaggtagggataaaaaccaccagcatatacatggacatacacacacacccacacacacaaacacacacacacacacaattttcacgatgtatggtcaggaatgtgactgtaaactggactttggggcccaggcataagtcccttcctccaggacctttcctatttatatgtccctatacaaaatccatctgcttttatacgtagctgttttatcatctgtagcttcatcctatccggaggcacagcacatgagccctggacaggtcccaaagttccaagcagtcctttccgtgaaagcaggggtttgcatgtgctaccaacacatgatacggggaagacccacccagggagcggtttcagtggcgcaacaaagcaccacttttactgttgcctacttctgaccaagaagaaaaaggaccttagtatttagcataaaattccagcgctggatgaatgcagatctagtttggtctgtggctagtttaaatatgtttctaaccacagagaatttcatatatatatacatatatatatacacatacatatatatatatatatatgtatgtataaaatttcacagggatatgcttttttttttaaagactgaatgtgttcaccatttagcctgtagatttatttccattttccaaattccagcacacagagatcccagcccctatgagtagggtgtttgtggactacctaatggaatatttttgaggcctggatgaactttgccatatgggtagaggttacagagggaggtgatattttcagctaaaaaaaaaaacgggtggagtttggactgatcaacttgagatttaaaaactgctattccttttgttctttctagcatctctccccaccctctgagagctcctcaggcttagatagtgaagtgatcaaatgccagtgtcattttgtacttaagttccaaagtaggaacattttatacttttttctgtattgtaataggtagttttgtatgaaatcttttctcctctcccgttgtaccgcattctttccagcattgtgctttttccctgggcttatttgaaaattttactgttttatacaagctcgtttagtacatttttctatgttttaccacaagttacaatttgaaaagaaaactattttttttaaatattccattgttaactgaatgttactgtttccactccagcaactacatgtcctcccttcaactgcctgccttttggggaaagaccaccttttgtgtgtttgttttttctctctctttctttccctttctctttctatctctctttatttttctttctttttctttgtttttgagttttctataggaaataaatagctttctatatatgagttgctggggaccttcacattctcttttagaaagctgtggcatgcagtctcattgcaggactcctggaatattgtctggttcttggtatttactgtatgtaagcaacaacttgaaaggtggcaatatggtgtcgatttggactatgaatcaaaagacctttttcaggttctttcactattgtctgggggactcagaacaagattgttctctgtatttattgtttgtccatttaggtaacatctgtcttaccttcctcacagactttgtacagaccaaagcaacaaatatttattgccatgtatagcagaaaatgaaacatgcaacaaaagcactttgaaaaatatataaggaattgttgagcctgtctgaatttgggccccctttctgactaatgcagttttgcacaaggtagaagttagtgaccctgagaccatcttaccaccctggacctggtccaaatacagacttacacagtggaccattctttcctgagctagccaacaagagcaggagtagtatctggaaactttcccctttgtttaggggtaggctttgatgaccaggaaaaaaaaaaaggtatttctgcattttatggcccaaaggcatgttattaatatcttatgtaatttactttaaactaaataagacttttttctcctgtgt

SEQ ID NO: 187379 - DNA, 562 bp, Homo sapiens
  Payload ID: 16893
  Gene Symbol: SENP1
  Gene Name: SUMO1/sentrin specific peptidase 1
  ENST ID: ENST00000551798
  CDS Start-End: 136-562
tcgcatggcagccggttccggttcgagacaagattttgccttatttcccaggctggtctcgaactcctgggctcaagccattcgtctgcctcagcctcccaaagtgctagtattacagatgatattgctgataggatgaggatggatgctggagaagtgactttagtgaaccacaactccgtattcaaaacccacctcctgccacaaacaggttttccagaggaccagctttcgctttctgaccagcagattttatcttccaggcaaggacatttggaccgatcttttacatgttccacaagaagtgcagcttataatccaagctattactcagataatccttcctcagacagttttcttggctcaggcgatttaagaacctttggccagagtgcaaatggccaatggagaaattctaccccatcgtcaagctcatctttacaaaaatcaagaaacagccgaagtctttacctcgaaacccgaaagacctcaagtggattatcaaacagttttgcgggaaagtcaaaccatcactgccatgtatctgcatatgaaaaatctt

SEQ ID NO: 187380 - DNA, 1932 bp, Homo sapiens
  Payload ID: 16893
  Gene Symbol: SENP1
  Gene Name: SUMO1/sentrin specific peptidase 1
  Uniprot ID: Q9P0U3
  ENST ID: ENST00000549595
  CDS Start-End: 1-1932
atggatgatattgctgataggatgaggatggatgctggagaagtgactttagtgaaccacaactccgtattcaaaacccacctcctgccacaaacaggttttccagaggaccagctttcgctttctgaccagcagattttatcttccaggcaaggacatttggaccgatcttttacatgttccacaagaagtgcagcttataatccaagctattactcagataatccttcctcagacagttttcttggctcaggcgatttaagaacctttggccagagtgcaaatggccaatggagaaattctaccccatcgtcaagctcatctttacaaaaatcaagaaacagccgaagtctttacctcgaaacccgaaagacctcaagtggattatcaaacagttttgcgggaaagtcaaaccatcactgccatgtatctgcatatgaaaaatcttttcctattaaacctgttccaagtccatcttggagtggttcatgtcgtcgaagtcttttgagccccaagaaaactcagaggcgacatgttagtacagcagaagagacagttcaagaagaagaaagagagatttacagacagctgctacagatggtcacagggaaacagtttactatagccaaacccaccacacattttcctttacacctgtctcgatgtcttagttccagtaaaaatactttgaaagactcactgtttaaaaatggaaactcttgtgcatctcagatcattggctctgatacttcatcatctggatctgccagcattttaactaaccaggaacagctgtcccacagtgtatattccctatcttcttataccccagatgttgcatttggatccaaagattctggtactcttcatcatccccatcatcaccactctgttccacatcagccagataacttagcagcttcaaatacacaatctgaaggatcagactctgtgattttactgaaagtgaaagattcccagactccaactcccagttctactttcttccaggcagagctgtggatcaaagaattaactagtgtttatgattctcgagcacgagaaagattgcgccagattgaagaacagaaggcattggccttacagcttcaaaaccagagattgcaggagcgggaacattcagtacatgattcagtagaactacatcttcgtgtacctcttgaaaaggagattcctgttactgttgtccaagaaacacaaaaaaaaggtcataaattaactgatagtgaagatgaatttcctgaaattacagaggaaatggagaaagaaataaagaatgtatttcgtaatgggaatcaggatgaagttctcagtgaagcatttcgcctgaccattacacgcaaagatattcaaactctaaaccatctgaattggctcaatgatgagatcatcaatttctacatgaatatgctgatggagcgaagtaaagagaagggcttgccaagtgtgcatgcatttaatacctttttcttcactaaattaaaaacggctggttatcaggcagtgaaacgttggacaaagaaagtagatgtattttctgttgacattcttttggtgcccattcacctgggagtacactggtgtctagctgttgtggactttagaaagaagaatattacctattacgactccatgggtgggataaacaatgaagcctgcagaatactcttgcaatacctaaagcaagaaagcattgacaagaaaaggaaagagtttgacaccaatggctggcagcttttcagcaagaaaagccagattcctcagcagatgaatggaagtgactgtgggatgtttgcctgcaaatatgctgactgtattaccaaagacagaccaatcaacttcacacagcaacacatgccatacttccggaagcggatggtctgggagatcctccaccgaaaactcttgtga

SEQ ID NO: 187381 - DNA, 6308 bp, Homo sapiens
  Payload ID: 16894
  Gene Symbol: SENP5
  Gene Name: SUMO1/sentrin specific peptidase 5
  Uniprot ID: Q96HI0
  ENST ID: ENST00000323460
  CDS Start-End: 250-2517
gcaggcggaagggcgcggaggaggtgacgcgataggccagcgccggcgtcgcggcagccgcttcagaggaagctcggcggctgtggccgcggcgaacaggccggacgcctcgtcgctggcggggcttcccttggagctgacgaaggcggggtccgcggtccaggctgctgccgcgacggggccggcggcggggcagctgccaggaacgagggtagcagctgcatccagatctcattatgcatcagaaaaatgaaaaaacagaggaaaattctatggaggaaaggaatccacttagccttttctgagaaatggaatactgggtttggaggctttaagaagttttattttcaccaacacttgtgcattctgaaagctaagctgggaaggccagttacttggaatagacagttgagacatttccagggtagaaagaaagctcttcaaatccagaaaacgtggatcaaggatgaacccctttgtgctaagaccaagttcaatgtggctactcaaaatgttagtactttgtcctctaaagtgaaaagaaaggacgctaaacacttcatttcctcctcaaagactctcctgagactccaagcagagaagctgttgtcatcagcaaagaattctgaccatgaatactgcagagagaaaaatctcttgaaggcagttactgactttccatcaaatagtgctttaggtcaggccaatggtcacagacctaggacagacccacaaccttctgactttcccatgaagttcaatggggagagccaaagtccaggtgagagtggcacgattgtggtcaccttgaacaaccataagagaaagggcttttgttacggctgctgccaagggccggagcaccacaggaatgggggacccttgattccaaaaaagttccaacttaaccaacatagaaggataaaattatctcctcttatgatgtatgagaaattatccatgattagatttcggtacaggattctcagatcccagcacttcagaaccaaaagcaaggtttgcaagctaagaaaagcccagcgaagctgggtacagaaagtcactggggaccatcaagagacccgtagggagaacggtgagggtggcagttgcagcccatttccttccccagaacctaaagacccttcttgtcggcatcagccgtactttccagatatggacagcagtgctgtggtgaaggggacgaactctcatgtgcctgattgccacactaaaggaagctctttcttgggcaaggagcttagtttagacgaagcattccctgaccaacagaatggcagtgccacaaacgcctgggaccagtcatcctgttcttctcctaagtgggagtgtacagagctgattcatgacatccccttaccagaacatcgttctaataccatgttcatttcagaaactgaaagagaaattatgactctgggtcaggaaaatcagacaagttctgtcagtgatgacagagtaaaactgtcagtgtctggagcagatacatctgtgagtagcgtagatgggcctgtgtcccaaaaggctgttcaaaatgagaactcataccagatggaggaggatggatctctcaagcagagcattcttagttctgagttgctggaccacccttactgtaaaagtccactggaggctcccttggtgtgcagtggactcaaactagaaaatcaagtaggaggtggaaagaacagtcagaaagcctctccagtggatgatgaacagctgtcagtctgtctttctggattcctagatgaggttatgaagaagtatggcagtttggttccactcagtgaaaaagaagtccttggaagattaaaagatgtctttaatgaagacttttctaatagaaaaccatttatcaatagggaaataacaaactatcgggccagacatcaaaaatgtaacttccgtatcttctataataaacacatgctggatatggacgacctggcgactctggatggtcagaactggctgaatgaccaggtcattaatatgtatggtgagctgataatggatgcagtcccagacaaagttcacttcttcaacagcttttttcatagacagctggtaaccaaaggatataatggagtaaaaagatggactaaaaaggtggatttgtttaaaaagagtcttctgttgattcctattcacctggaagtccactggtctctcattactgtgacactctctaatcgaattatttcattttatgattcccaaggcattcattttaagttttgtgtagagaatataagaaagtatttgctgactgaagccagagaaaaaaatagacctgaatttcttcagggttggcagactgctgttacgaagtgtattccacaacagaaaaacgacagtgactgtggagtctttgtgctccagtactgcaagtgcctcgccttagagcagcctttccagttttcacaagaagacatgccccgagtgcggaagaggatttacaaggagctatgtgagtgccggctcatggactgaaactcagcagggactctgggaagtctgaccaagttggagcagatggtttgttacttgaatctccaaacacttagttgaatttttacagatatttcagatcagtggtgttgggccactattgttacctcaaatttattttttgcccttattcatttctccagctaccatgtactattgtttaatgttcagtttggtttcatttttaattttatggttctgtgcgtcccccatatttaatatttattattcaaacgcatgcatatagacagagcatgcagtgaagagtattaaaaaaaaaagcttagtagatttggtgcagcttttgaaacttagttagacgtgaactgaatacaggtttcaaatttactcccagaacctaaaaatgcaagatgtttttgatacaacataactctgagaatagtaagtgttccctggggcattaagggtagctgggggtggttttgacaaatccagtcctgttttactttaccagcggcaactttcaccaacttccctctccaagtgagtcttagagagtgcagtccattccttttgaagggtgagatggaagtggtcgtaaactgactggtgtcttctgtttctggaggcacacttgtaagcacagtggctgctttgggaggagtaaggtgtgagaaaaagcaaccttggaggccagtaacaatgacagatttcaatcgtggttttaggaattataatacgtggcatacatctcataaaggcttttgctgggatattgaattccctgaatttttctgttttcgacctgttaaaaaaatcttaacatccatcaaactagtggtcaaacaaatgagaatgcagctgttctcagagtaatttttaagttgtcatttccctgtgttgcctcccaattggaagaagttaaggtttaccaaatgcatttctatttcaagggtatctgaaacgtaaacattcaaaactgaaggctgactgacttgagatgttttgcaggtggctggagagaagagggaaggtaatagagacaacttagtcccatgggagcgcagcaaccgtgtcaggttctttctcctgtcccattagtgacctcagtaacatgcagggtacgtctggcttctgcatggccagtgctgacactagcacagctgttcttctccttctgttgaacctcatcttctgaagaaaggccaagtggcccttgtccatacacttagctgcattaggatgaatatcacgcgtctcacatctttaatccagcctttcgtgacatgttggaaagatacatgtgaaacctacccagttaccctttctgaattgggaggaaaaccaaccaatgtatgtatgagaaactcagaagtctgaatagaaaaacaaagtaaatggcagaagattctcgagtttatgcccgcgtaggtttggagtgttgaaaaagctaaaatgtttagtttcacttggccctgaggtatggttgagaaggctgactgccagcagttgaggattgagtccgaccatgtttacatgcagggttcccaacaccagtggtgacactgggaagcagccccagcactttcctctcctgagtcctccagacccaaaatccttaatgtcaaaccaggtcagtgtttcttactgtgtttcaagtcgttaaaaagactgagagtagaggcactttatgctgctataggtggggttctgtcagcgttaggaaaaaatgacagtttagggtaaggaagatctcataatgagtttttcaaacataattatgcaaacatgagatttttcaaaacatgccagaaatttgcctctgattttttttttttttttttttttttttttgtgggggtgtggtataccaaagtagccagtcactgggctgtcagttcaaaatgtcttgtacttcagagtgaggaagtgtttcagttcctcagtgacagaacctggcatgcagaagagacagaattgttcctgtaagaaaatcaacgccgagagagagctgcccaaatccagtgactcttccacttccagtctcatgcttcatagggcaccttgaggtgtgctgcccagtgtggcttagactaaatgttgagtttgggttttttgtttttttttttttttgagtcagagtctcactgtccctcaggctggagtgcaatggcgcaatcttgcctcactgcaacctccacctcccaggttcaagcgattctcctgcctcagcctcccaagtagctgggattacaggtgtgtgccaccacgccccaccgatttttgtacttttagtagagacaggatttcaccatgttggccaggctggtcttgaactcctgacctcaagtgatctgcccgcctgggcctcccaaagtgctgggattacaggcgggagccaccgtgcctggccaatgttaagtattttaaaagtcattttaaaatatttgtcattgatgaaacttggtttcagcacacgtaattgctttccctctcttcttgtgattaggtgtaaacctctatttaactcaagtcctagattagaatgtcctttgtcctgatgtttgcagtaattgcttccttggttaataaagatatttttgaaatatactctggactgttggtgaaagaggcaggcatggctttactggtactagtttggcactgaactgtttgggtgcccatgaggtaggcagaccttatgctttttttttttgagacggagtcttgctctgttgcccaggctggagtgcagtgatgtgatctcggctcactgcaacccctgcctcccaggttcaagtgattctcctgcctcagcttccccaatagctgggactacaggtgtgcgccaccactcccagctaatttttgtatttttagtagagacagggttttgccatgttggtcaggctggtctcggaactcctgacctcaggtgatccacccgcctctgcctcacaaagtgctgggattacaggcatgagctaccgtgcctggcctaaaccttacgcttttgaggttgagtgcaggccttgtgataactaagcgctacttttgacgagccttcaacaagctgcccagtcctctcctcagcagacgcatcaggttgtagttgcatctttacagtggtctttccttttattaaatctatagcagtgaatatagatttgattcaacttttagttacgttctctcaagaatcctaatcaactttcagttagcctcttaagaaagggaaaaaaaggtgctgccagtcatccccaaattatgtttttggctgtgcattctattttctacatagcactgaatctgagtaacagtcatcctggatttatagttggaacagaacagtaacagacctaactgggactcagccagcactagcctcatcttagctgccccttttctctgctttgcagtttactgcttccctgggctagccataacggggttctgggcaggtcagactcttcagcaagacagtgtattaatagtgtgaattagatacactgatgacctgctctgcctagttaagaaactgaattaatcagcagttacaaagcacatactttgttacgtgctaggctttgcctcctggcctctagataattaagacggcccagggaataccagcagagaagtgctaattgtatttgggtgttacaaaagcagacctagacgagctgttcacttaactggtacctgttggtcagaaaaagaatttatttagagattatgatcatgtaaaattacagtactcaacccttctagcaaagtatttttttgaaaaataaactaaatgcctttataaa

SEQ ID NO: 187382 - DNA, 2491 bp, Homo sapiens
  Payload ID: 16894
  Gene Symbol: SENP5
  Gene Name: SUMO1/sentrin specific peptidase 5
  Uniprot ID: Q96HI0
  ENST ID: ENST00000445299
  CDS Start-End: 250-2379
gcaggcggaagggcgcggaggaggtgacgcgataggccagcgccggcgtcgcggcagccgcttcagaggaagctcggcggctgtggccgcggcgaacaggccggacgcctcgtcgctggcggggcttcccttggagctgacgaaggcggggtccgcggtccaggctgctgccgcgacggggccggcggcggggcagctgccaggaacgagggtagcagctgcatccagatctcattatgcatcagaaaaatgaaaaaacagaggaaaattctatggaggaaaggaatccacttagccttttctgagaaatggaatactgggtttggaggctttaagaagttttattttcaccaacacttgtgcattctgaaagctaagctgggaaggccagttacttggaatagacagttgagacatttccagggtagaaagaaagctcttcaaatccagaaaacgtggatcaaggatgaacccctttgtgctaagaccaagttcaatgtggctactcaaaatgttagtactttgtcctctaaagtgaaaagaaaggacgctaaacacttcatttcctcctcaaagactctcctgagactccaagcagagaagctgttgtcatcagcaaagaattctgaccatgaatactgcagagagaaaaatctcttgaaggcagttactgactttccatcaaatagtgctttaggtcaggccaatggtcacagacctaggacagacccacaaccttctgactttcccatgaagttcaatggggagagccaaagtccaggtgagagtggcacgattgtggtcaccttgaacaaccataagagaaagggcttttgttacggctgctgccaagggccggagcaccacaggaatgggggacccttgattccaaaaaagttccaacttaaccaacatagaaggataaaattatctcctcttatgatgtatgagaaattatccatgattagatttcggtacaggattctcagatcccagcacttcagaaccaaaagcaaggtttgcaagctaagaaaagcccagcgaagctgggtacagaaagtcactggggaccatcaagagacccgtagggagaacggtgagggtggcagttgcagcccatttccttccccagaacctaaagacccttcttgtcggcatcagccgtactttccagatatggacagcagtgctgtggtgaaggggacgaactctcatgtgcctgattgccacactaaaggaagctctttcttgggcaaggagcttagtttagacgaagcattccctgaccaacagaatggcagtgccacaaacgcctgggaccagtcatcctgttcttctcctaagtgggagtgtacagagctgattcatgacatccccttaccagaacatcgttctaataccatgttcatttcagaaactgaaagagaaattatgactctgggtcaggaaaatcagacaagttctgtcagtgatgacagagtaaaactgtcagtgtctggagcagatacatctgtgagtagcgtagatgggcctgtgtcccaaaaggctgttcaaaatgagaactcataccagatggaggaggatggatctctcaagcagagcattcttagttctgagttgctggaccacccttactgtaaaagtccactggaggctcccttggtgtgcagtggactcaaactagaaaatcaagtaggaggtggaaagaacagtcagaaagcctctccagtggatgatgaacagctgtcagtctgtctttctggattcctagatgaggttatgaagaagtatggcagtttggttccactcagtgaaaaagaagtccttggaagattaaaagatgtctttaatgaagacttttctaatagaaaaccatttatcaatagggaaataacaaactatcgggccagacatcaaaaatgtaacttccgtatcttctataataaacacatgctggatatggacgacctggcgactctggatggtcagaactggctgaatgaccaggtcattaatatgtatggtgagctgataatggatgcagtcccagacaaagttcacttcttcaacagcttttttcatagacagctggtaaccaaaggatataatggagtaaaaagatggactaaaaagaatataagaaagtatttgctgactgaagccagagaaaaaaatagacctgaatttcttcagggttggcagactgctgttacgaagtgtattccacaacagaaaaacgacagtgactgtggagtctttgtgctccagtactgcaagtgcctcgccttagagcagcctttccagttttcacaagaagacatgccccgagtgcggaagaggatttacaaggagctatgtgagtgccggctcatggactgaaactcagcagggactctgggaagtctgaccaagttggagcagatggtttgttacttgaatctccaaacacttagttgaatttttacagatatttcagatcagtggtgttggg

SEQ ID NO: 187383 - DNA, 973 bp, Homo sapiens
  Payload ID: 16894
  Gene Symbol: SENP5
  Gene Name: SUMO1/sentrin specific peptidase 5
  ENST ID: ENST00000419026
  CDS Start-End: 147-884
cggcgaacaggccggacgcctcgtcgctggcggggcttcccttggagctgacgaaggcggggtccgcggtccaggctgctgccgcgacggggccggcggcggggcagctgccaggaacgagggtagcaggattcctagatgaggttatgaagaagtatggcagtttggttccactcagtgaaaaagaagtccttggaagattaaaagatgtctttaatgaagacttttctaatagaaaaccatttatcaatagggaaataacaaactatcgggccagacatcaaaaatgtaacttccgtatcttctataataaacacatgctggatatggacgacctggcgactctggatggtcagaactggctgaatgaccaggtcattaatatgtatggtgagctgataatggatgcagtcccagacaaagttcacttcttcaacagcttttttcatagacagctggtaaccaaaggatataatggagtaaaaagatggactaaaaaggtggatttgtttaaaaagagtcttctgttgattcctattcacctggaagtccactggtctctcattactgtgacactctctaatcgaattatttcattttatgattcccaaggcattcattttaagttttgtgtagagaatataagaaagtatttgctgactgaagccagagaaaaaaatagacctgaatttcttcagggttggcagactgctgttacgaagtgtattccacaacagaaaaacgacagtgactgtggagtctttgtgctccagtactgcaagtgcctcgccttagagcagcctttccagttttcacaagaagacatgccccgagtgcggaagaggatttacaaggagctatgtgagtgccggctcatggactgaaactcagcagggactctgggaagtctgaccaagttggagcagatggtttgttacttgaatctccaaacacttagttgaatttttacaga

SEQ ID NO: 187384 - DNA, 484 bp, Homo sapiens
  Payload ID: 16894
  Gene Symbol: SENP5
  Gene Name: SUMO1/sentrin specific peptidase 5
  ENST ID: ENST00000448068
  CDS Start-End: 1-296
atttgtttaaaaagagtcttctgttgattcctattcacctggaagtccactggtctctcattactgtgacactctctaatcgaattatttcattttatgattcccaaggcattcattttaagttttgtgtagagtgtattccacaacagaaaaacgacagtgactgtggagtctttgtgctccagtactgcaagtgcctcgccttagagcagcctttccagttttcacaagaagacatgccccgagtgcggaagaggatttacaaggagctatgtgagtgccggctcatggactgaaactcagcagggactctgggaagtctgaccaagttggagcagatggtttgttacttgaatctccaaacacttagttgaatttttacagatatttcagatcagtggtgttgggccactattgttacctcaaatttattttttgcccttattcatttctccagctaccatgtactattgtttaatgttca

SEQ ID NO: 187385 - DNA, 622 bp, Homo sapiens
  Payload ID: 16894
  Gene Symbol: SENP5
  Gene Name: SUMO1/sentrin specific peptidase 5
  ENST ID: ENST00000434433
  CDS Start-End: 1-233
tgctgactgaagccagagaaaaaaatagacctgaatttcttcagggttggcagactgctgttacgaagtgtattccacaacagaaaaacgacagtgactgtggagtctttgtgctccagtactgcaagtgcctcgccttagagcagcctttccagttttcacaagaagacatgccccgagtgcggaagaggatttacaaggagctatgtggctggagagaagagggaaggtaatagagacaacttagtcccatgggagcgcagcaaccgtgtcaggttctttctcctgtcccattagtgacctcagtaacatgcagggtacgtctggcttctgcatggccagtgctgacactagcacagctgttcttctccttctgttgaacctcatcttctgaagaaaggccaagtggcccttgtccatacacttagctgcattaggatgaatatcacgcgtctcacatctttaatccagcctttcgtgacatgttggaaagatacatgtgaaacctacccagttaccctttctgaattgggaggaaaaccaaccaatgtatgtatgagaaactcagaagtctgaatagaaaaacaaagtaaatggcagaagattctcgagtttatgcccg

SEQ ID NO: 187386 - DNA, 2700 bp, Homo sapiens
  Payload ID: 16895
  Gene Symbol: SENP6
  Gene Name: SUMO1/sentrin specific peptidase 6
  ENST ID: ENST00000327284
  CDS Start-End: 599-2656
agaggagacccacccctgtccacatggacagtcgcaaaggcctccgctgatgcattcacgcctgggcggggtgggcggacggccgtagcggcggcggctgcagaacgagctaggggcctgggggcgcctgacggtcgcagagacctcgccgctccggcgcggcgggtgcggccattttacggcctgggacgaagggaggcgtgtttgtgtgctcgctttcattctcctttcttgggaacccacggctgggggaagtttctcaggcagcctgggtgggcggtggatggggagtcgtgggccgagaggaaccgggcccgggaagcgccgtcgtcgtcgtcgccggtcgcgttcccccggagaggcctgagaagctcgggccgcgggcctcgctgcccgccagcccgcggacaggcccgggcgcgcctggcctgcctttgtataggcccgtctgaacgtgggagcgcagcccgcctgacggctgagcccgaggcccgcaaccctgcggcgtctaccctcctccggcgcggcccctcatcccggcgagcacggcggcggtgtgggccatggattaagaaggaggcggcgtgggaggaggaagatggcggccggcaagagcggcggtagcgcaggggagattacttttctggaagctttggctagatcagagtctaagagagatggaggttttaaaaataattggagctttgatcatgaagaagaaagtgaaggagatacagataaagatgggacaaatctgctcagtgtggatgaagatgaggattctgaaacctcaaaaggaaaaaagttaaatcgtcgatctgaaattgttgctaatagctctggtgaattcatcttgaagacatatgtaagacgaaacaagtctgaaagttttaaaactttgaaaggcaacccaattggacttaacatgttgagcaacaataagaaattgagtgaaaatacgcaaaatacgtcattatgttctggaactgtagttcatggtagacgttttcatcatgctcatgcacagataccagtagtaaaaacagcagcccaaaggaaagaatacccacctcatgtccaaaaagttgaaattaatcctgtaaggttaagtcggctccaaggtgttgaacgtataatgaagaaaacagaagagtccgaatcacaagtggagcctgaaattaagaggaaagtacaacagaaacgacactgtagtacctatcagcctactcctcctctatctcctgcttcaaaaaaatgtttaacccatttagaggatttgcaaagaaattgcagacaagctattactttgaatgagtctactggaccattattaagaacgtcaattcatcagaattctggaggacagaagtcacaaaacacaggattaacaaccaagaagttttatggcaacaatgtggaaaaggttccaattgatattattgtgaattgtgatgacagtaaacacacttatttacagactaatggaaaagtcattttacctggggcaaaaatacccaaaatcacaaacttgaaagaaaggaaaacaagtttgtcagacctaaatgatccaatcattttgtccagtgatgatgatgatgacaacgacagaactaacagaagagaaagcatatctcctcagcctgctgattcagcatgttcttcccctgcaccatccactggaaaagtagaagcagcgctaaatgaaaatacttgcagagcagagcgtgaactacgaagcattccagaagactcagagttaaatacagttacattgccaagaaaagcaagaatgaaagaccagtttggcaattctattatcaacacacctctgaaacgtcgtaaagtgttttctcaagaacctccagatgctttagctttaagctgccaaagttcctttgacagtgtcattttaaactgtcgaagtatacgagtaggaacactcttccggctgttaatagagcctgtaattttttgtttagattttatcaagatacagctagacgaaccagaccatgatcctgtagagattatattaaatacctctgatctaactaaatgtgaatggtgtaatgtccgaaaattacctgtagtgtttcttcaagcaattccagcagtttatcaaaagctgagcatccaactgcaaatgaataaggaggataaagtttggaatgattgtaaaggagtaaataaattaacaaatttagaagaacaatatataattttaatttttcaaaatggccttgatcctccggcaaatatggtatttgaaagtatcattaatgaaattggtataaagaataacatctccaatttttttgcgaaaattccctttgaagaagctaatggcagacttgttgcctgtacaagaacctatgaagagagcatcaaaggaagttgtgggcaaaaggaaaacaaaattaaaactgtatcatttgaatctaaaatacaacttagaagcaaacaagaatttcagttttttgatgaagaagaagaaactggagaaaaccacaccatcttcattggcccagtagaaaagttgatagtatatccaccacctccagctaagggaggcatctctgttaccaatgaggacctgcactgtctaaatgaaggagaatttttaaatgatgttattatagacttttatttgaagtaagttaattttccactgatcttttattaaatctttaacattccgtc

SEQ ID NO: 187387 - DNA, 4644 bp, Homo sapiens
  Payload ID: 16895
  Gene Symbol: SENP6
  Gene Name: SUMO1/sentrin specific peptidase 6
  Uniprot ID: Q9GZR1
  ENST ID: ENST00000370010
  CDS Start-End: 1017-4334
actaccttttctcttcggttggctgtagtttaaattctaaggtctcctcaagaaatgacattttcacatttcttaggcatctgtggtgccagaggagcaaacccatcgcacacgccaggtctgccatggggccctgggcggtggggattttggatgtaacgtgtctaggccgagcccgcgccgtgaaaggcctaccctgccgaaagcccgggcggcgggcgcccacaagtcagggctcggtgcggcgccgcagccagctctgcccgcgagccgagtccgggctgctgagggggagccgcgctgggggcggcggcgtcggggcgggggcgggagccgggcggcagctccagcgcccgtgggggaggagcggcagcggcggcggctggagctgctgtggcgaccgacgcgaggcggtggcagaggagacccacccctgtccacatggacagtcgcaaaggcctccgctgatgcattcacgcctgggcggggtgggcggacggccgtagcggcggcggctgcagaacgagctaggggcctgggggcgcctgacggtcgcagagacctcgccgctccggcgcggcgggtgcggccattttacggcctgggacgaagggaggcgtgtttgtgtgctcgctttcattctcctttcttgggaacccacggctgggggaagtttctcaggcagcctgggtgggcggtggatggggagtcgtgggccgagaggaaccgggcccgggaagcgccgtcgtcgtcgtcgccggtcgcgttcccccggagaggcctgagaagctcgggccgcgggcctcgctgcccgccagcccgcggacaggcccgggcgcgcctggcctgcctttgtataggcccgtctgaacgtgggagcgcagcccgcctgacggctgagcccgaggcccgcaaccctgcggcgtctaccctcctccggcgcggcccctcatcccggcgagcacggcggcggtgtgggccatggattaagaaggaggcggcgtgggaggaggaagatggcggccggcaagagcggcggtagcgcaggggagattacttttctggaagctttggctagatcagagtctaagagagatggaggttttaaaaataattggagctttgatcatgaagaagaaagtgaaggagatacagataaagatgggacaaatctgctcagtgtggatgaagatgaggattctgaaacctcaaaaggaaaaaagttaaatcgtcgatctgaaattgttgctaatagctctggtgaattcatcttgaagacatatgtaagacgaaacaagtctgaaagttttaaaactttgaaaggcaacccaattggacttaacatgttgagcaacaataagaaattgagtgaaaatacgcaaaatacgtcattatgttctggaactgtagttcatggtagacgttttcatcatgctcatgcacagataccagtagtaaaaacagcagcccaaaggaaagaatacccacctcatgtccaaaaagttgaaattaatcctgtaaggttaagtcggctccaaggtgttgaacgtataatgaagaaaacagaagagtccgaatcacaagtggagcctgaaattaagaggaaagtacaacagaaacgacactgtagtacctatcagcctactcctcctctatctcctgcttcaaaaaaatgtttaacccatttagaggatttgcaaagaaattgcagacaagctattactttgaatgagtctactggaccattattaagaacgtcaattcatcagaattctggaggacagaagtcacaaaacacaggattaacaaccaagaagttttatggcaacaatgtggaaaaggttccaattgatattattgtgaattgtgatgacagtaaacacacttatttacagactaatggaaaagtcattttacctggggcaaaaatacccaaaatcacaaacttgaaagaaaggaaaacaagtttgtcagacctaaatgatccaatcattttgtccagtgatgatgatgatgacaacgacagaactaacagaagagaaagcatatctcctcagcctgctgattcagcatgttcttcccctgcaccatccactggaaaagtagaagcagcgctaaatgaaaatacttgcagagcagagcgtgaactacgaagcattccagaagactcagagttaaatacagttacattgccaagaaaagcaagaatgaaagaccagtttggcaattctattatcaacacacctctgaaacgtcgtaaagtgttttctcaagaacctccagatgctttagctttaagctgccaaagttcctttgacagtgtcattttaaactgtcgaagtatacgagtaggaacactcttccggctgttaatagagcctgtaattttttgtttagattttatcaagatacagctagacgaaccagaccatgatcctgtagagattatattaaatacctctgatctaactaaatgtgaatggtgtaatgtccgaaaattacctgtagtgtttcttcaagcaattccagcagtttatcaaaagctgagcatccaactgcaaatgaataaggaggataaagtttggaatgattgtaaaggagtaaataaattaacaaatttagaagaacaatatataattttaatttttcaaaatggccttgatcctccggcaaatatggtatttgaaagtatcattaatgaaattggtataaagaataacatctccaatttttttgcgaaaattccctttgaagaagctaatggcagacttgttgcctgtacaagaacctatgaagagagcatcaaaggaagttgtgggcaaaaggaaaacaaaattaaaactgtatcatttgaatctaaaatacaacttagaagcaaacaagaatttcagttttttgatgaagaagaagaaactggagaaaaccacaccatcttcattggcccagtagaaaagttgatagtatatccaccacctccagctaagggaggcatctctgttaccaatgaggacctgcactgtctaaatgaaggagaatttttaaatgatgttattatagacttttatttgaaatacttggtgcttgaaaaactgaagaaggaagacgctgaccgaattcatatattcagttcttttttctataaacgccttaatcagagagagaggagaaatcatgaaacaactaatctgtcaatacagcaaaaacggcatgggagagtaaaaacatggacccggcacgtagatatttttgagaaggattttatttttgtaccccttaatgaagctgcacactggtttttggctgttgtttgtttccccggtttggaaaaaccaaagtatgaacctaatcctcattaccatgaaaatgctgtcatacagaaatgttcaactgtagaggacagttgtatttcttcttcagccagtgaaatggagagttgttcacaaaactcttctgccaagcctgtaattaagaagatgctaaacaaaaaacattgcatagctgtaattgattccaatcctgggcaggaagaaagtgaccctcgttataagagaaacatatgcagtgtaaaatacagtgtgaaaaaaataaatcatactgcgagtgaaaatgaagaattcaataaaggagaatctacatcccagaaagttgctgataggactaaaagtgagaatggcctacagaatgaaagtttaagttccacacatcatacagatggcttaagcaaaatcagactaaactatagcgatgaatcacctgaagctggtaaaatgcttgaagatgaactcgtcgacttctcagaagatcaggataaccaggatgatagcagtgacgatggattcctcgctgatgacaactgcagttcagaaataggacagtggcatttaaagcctactatctgtaaacaaccttgtatcctacttatggactcactccgaggcccttctcggtcaaatgttgtcaaaattttaagagagtatttagaagtggaatgggaagttaaaaaaggaagcaaaagaagtttttccaaagatgttatgaagggctctaatccaaaagtaccacagcaaaacaacttcagtgactgtggtgtatatgtattgcagtatgtagagagcttttttgagaatccaattctcagttttgaactacctatgaatttggcaaactggtttcctccaccaagaatgagaacaaaaagagaagaaatccgaaacataattctgaagctacaggaagatcagagcaaagagaaaagaaagcataaggacacttactcaacagaagcacctttaggcgaaggaacagaacaatatgtcaatagtatctcagattgaccatttctgttacttgtcatttctactttcagaaactaaatgactttcaaatttgggtatagacaataaagaactgaagtgctcactactcagtgatttggaaattttgatgcttgtataaatgtcagataattaatttccaaaggcgtatgtattaagtaaaagtctgtaaatatgttaatgaggccaatttttccagcatttataattatttttttcacttgttaggaagcttttgttatgtattttctgttaatagtacctaaaattgcaacttctaaacacaaataaaaagaaaatatttatagga

SEQ ID NO: 187388 - DNA, 2685 bp, Homo sapiens
  Payload ID: 16895
  Gene Symbol: SENP6
  Gene Name: SUMO1/sentrin specific peptidase 6
  ENST ID: ENST00000424947
  CDS Start-End: 1-1749
ttgagcaacaataagaaattgagtgaaaatacgcaaaatacgtcattatgttctggaactgtagttcatggtagacgttttcatcatgctcatgcacagataccagtagtaaaaacagcagcccaaagcagtctggaccgaaaagaaaggaaagaatacccacctcatgtccaaaaagttgaaattaatcctgtaaggttaagtcggctccaaggtgttgaacgtataatgaagaaaacagaagagtccgaatcacaagtggagcctgaaattaagaggaaagtacaacagaaacgacactgtagtacctatcagcctactcctcctctatctcctgcttcaaaaaaatgtttaacccatttagaggatttgcaaagaaattgcagacaagctattactttgaatgagtctactggaccattattaagaacgtcaattcatcagaattctggaggacagaagtcacaaaacacaggattaacaaccaagaagttttatggcaacaatgtggaaaaggttccaattgatattattgtgaattgtgatgacagtaaacacacttatttacagactaatggaaaagtcattttacctggggcaaaaatacccaaaatcacaaacttgaaagaaaggaaaacaagtttgtcagacctaaatgatccaatcattttgtccagtgatgatgatgatgacaacgacagaactaacagaagagaaagcatatctcctcagcctgctgattcagcatgttcttcccctgcaccatccactggaaaagtagaagcagcgctaaatgaaaatacttgcagagcagagcgtgaactacgaagcattccagaagactcagagttaaatacagttacattgccaagaaaagcaagaatgaaagaccagtttggcaattctattatcaacacacctctgaaacgtcgtaaagtgttttctcaagaacctccagatgctttagctttaagctgccaaagttcctttgacagtgtcattttaaactgtcgaagtatacgagtaggaacactcttccggctgttaatagagcctgtaattttttgtttagattttatcaagatacagctagacgaaccagaccatgatcctgtagagattatattaaatacctctgatctaactaaatgtgaatggtgtaatgtccgaaaattacctgtagtgtttcttcaagcaattccagcagtttatcaaaagctgagcatccaactgcaaatgaataaggaggataaagtttggaatgattgtaaaggagtaaataaattaacaaatttagaagaacaatatataattttaatttttcaaaatggccttgatcctccggcaaatatggtatttgaaagtatcattaatgaaattggtataaagaataacatctccaatttttttgcgaaaattccctttgaagaagctaatggcagacttgttgcctgtacaagaacctatgaagagagcatcaaaggaagttgtgggcaaaaggaaaacaaaattaaaactgtatcatttgaatctaaaatacaacttagaagcaaacaagaatttcagttttttgatgaagaagaagaaactggagaaaaccacaccatcttcattggcccagtagaaaagttgatagtatatccaccacctccagctaagggaggcatctctgttaccaatgaggacctgcactgtctaaatgaaggagaatttttaaatgatgttattatagacttttatttgaagtaagttaattttccactgatcttttattaaatctttaacattccgtcatatcttatgtctttgttttccagagtcaggctttttgagttttaaattccatctctgccacttactgtgtgacatttggggagttattttttctgtttctgtctttgcacattttaaaaatgagaattctatctaaaaagttgtgaaaattgggccagggagatatctggcttatgtctataatcctgacactttgggaggtcaaggtgggaggatcgcttgagcccaagagttcacgaccagcctgggaaacaaagtgagaccttgtctccacaaaaaatttaaaaattagccagtcatatacctatagtcccagccacttgggaggctcagacaggaagattacctgagcccatgagttcgaagttgcactgagccatgatggcgccactgcactccagcctggtcaacaaagcaaaactctacccccacacccacccccgaaaacaggagttgtgagaattaaatgagatcgtacatatcaagtagtaggaaaaatgcctagtacagtgttagaagtttatggtcttgtaggaagcacaaatacagaattaaagcaatgatagaagcattaacatggtacagtcctagcagatgagagaatgcttcattatctttggaggttgggagatatgagggaccaggaagctttcctggaagagcttacattatgacccaatatacattatgacccaacataacacatgtatacacctatgtgcaatgtgtttatacatttatcaatttgtatgtttttactggtttgtgatataaaatggacatgtatatgaaataaaacagaacttagcatcagtatgcatagttctctgtaatattttctagtttcttatactgtgtttcattaaacaaaacaaaacttttaaaaattga

SEQ ID NO: 187389 - DNA, 6501 bp, Homo sapiens
  Payload ID: 16895
  Gene Symbol: SENP6
  Gene Name: SUMO1/sentrin specific peptidase 6
  Uniprot ID: Q9GZR1
  ENST ID: ENST00000447266
  CDS Start-End: 479-3817
ggggcgcctgacggtcgcagagacctcgccgctccggcgcggcgggtgcggccattttacggcctgggacgaagggaggcgtgtttgtgtgctcgctttcattctcctttcttgggaacccacggctgggggaagtttctcaggcagcctgggtgggcggtggatggggagtcgtgggccgagaggaaccgggcccgggaagcgccgtcgtcgtcgtcgccggtcgcgttcccccggagaggcctgagaagctcgggccgcgggcctcgctgcccgccagcccgcggacaggcccgggcgcgcctggcctgcctttgtataggcccgtctgaacgtgggagcgcagcccgcctgacggctgagcccgaggcccgcaaccctgcggcgtctaccctcctccggcgcggcccctcatcccggcgagcacggcggcggtgtgggccatggattaagaaggaggcggcgtgggaggaggaagatggcggccggcaagagcggcggtagcgcaggggagattacttttctggaagctttggctagatcagagtctaagagagatggaggttttaaaaataattggagctttgatcatgaagaagaaagtgaaggagatacagataaagatgggacaaatctgctcagtgtggatgaagatgaggattctgaaacctcaaaaggaaaaaagttaaatcgtcgatctgaaattgttgctaatagctctggtgaattcatcttgaagacatatgtaagacgaaacaagtctgaaagttttaaaactttgaaaggcaacccaattggacttaacatgttgagcaacaataagaaattgagtgaaaatacgcaaaatacgtcattatgttctggaactgtagttcatggtagacgttttcatcatgctcatgcacagataccagtagtaaaaacagcagcccaaagcagtctggaccgaaaagaaaggaaagaatacccacctcatgtccaaaaagttgaaattaatcctgtaaggttaagtcggctccaaggtgttgaacgtataatgaagaaaacagaagagtccgaatcacaagtggagcctgaaattaagaggaaagtacaacagaaacgacactgtagtacctatcagcctactcctcctctatctcctgcttcaaaaaaatgtttaacccatttagaggatttgcaaagaaattgcagacaagctattactttgaatgagtctactggaccattattaagaacgtcaattcatcagaattctggaggacagaagtcacaaaacacaggattaacaaccaagaagttttatggcaacaatgtggaaaaggttccaattgatattattgtgaattgtgatgacagtaaacacacttatttacagactaatggaaaagtcattttacctggggcaaaaatacccaaaatcacaaacttgaaagaaaggaaaacaagtttgtcagacctaaatgatccaatcattttgtccagtgatgatgatgatgacaacgacagaactaacagaagagaaagcatatctcctcagcctgctgattcagcatgttcttcccctgcaccatccactggaaaagtagaagcagcgctaaatgaaaatacttgcagagcagagcgtgaactacgaagcattccagaagactcagagttaaatacagttacattgccaagaaaagcaagaatgaaagaccagtttggcaattctattatcaacacacctctgaaacgtcgtaaagtgttttctcaagaacctccagatgctttagctttaagctgccaaagttcctttgacagtgtcattttaaactgtcgaagtatacgagtaggaacactcttccggctgttaatagagcctgtaattttttgtttagattttatcaagatacagctagacgaaccagaccatgatcctgtagagattatattaaatacctctgatctaactaaatgtgaatggtgtaatgtccgaaaattacctgtagtgtttcttcaagcaattccagcagtttatcaaaagctgagcatccaactgcaaatgaataaggaggataaagtttggaatgattgtaaaggagtaaataaattaacaaatttagaagaacaatatataattttaatttttcaaaatggccttgatcctccggcaaatatggtatttgaaagtatcattaatgaaattggtataaagaataacatctccaatttttttgcgaaaattccctttgaagaagctaatggcagacttgttgcctgtacaagaacctatgaagagagcatcaaaggaagttgtgggcaaaaggaaaacaaaattaaaactgtatcatttgaatctaaaatacaacttagaagcaaacaagaatttcagttttttgatgaagaagaagaaactggagaaaaccacaccatcttcattggcccagtagaaaagttgatagtatatccaccacctccagctaagggaggcatctctgttaccaatgaggacctgcactgtctaaatgaaggagaatttttaaatgatgttattatagacttttatttgaaatacttggtgcttgaaaaactgaagaaggaagacgctgaccgaattcatatattcagttcttttttctataaacgccttaatcagagagagaggagaaatcatgaaacaactaatctgtcaatacagcaaaaacggcatgggagagtaaaaacatggacccggcacgtagatatttttgagaaggattttatttttgtaccccttaatgaagctgcacactggtttttggctgttgtttgtttccccggtttggaaaaaccaaagtatgaacctaatcctcattaccatgaaaatgctgtcatacagaaatgttcaactgtagaggacagttgtatttcttcttcagccagtgaaatggagagttgttcacaaaactcttctgccaagcctgtaattaagaagatgctaaacaaaaaacattgcatagctgtaattgattccaatcctgggcaggaagaaagtgaccctcgttataagagaaacatatgcagtgtaaaatacagtgtgaaaaaaataaatcatactgcgagtgaaaatgaagaattcaataaaggagaatctacatcccagaaagttgctgataggactaaaagtgagaatggcctacagaatgaaagtttaagttccacacatcatacagatggcttaagcaaaatcagactaaactatagcgatgaatcacctgaagctggtaaaatgcttgaagatgaactcgtcgacttctcagaagatcaggataaccaggatgatagcagtgacgatggattcctcgctgatgacaactgcagttcagaaataggacagtggcatttaaagcctactatctgtaaacaaccttgtatcctacttatggactcactccgaggcccttctcggtcaaatgttgtcaaaattttaagagagtatttagaagtggaatgggaagttaaaaaaggaagcaaaagaagtttttccaaagatgttatgaagggctctaatccaaaagtaccacagcaaaacaacttcagtgactgtggtgtatatgtattgcagtatgtagagagcttttttgagaatccaattctcagttttgaactacctatgaatttggcaaactggtttcctccaccaagaatgagaacaaaaagagaagaaatccgaaacataattctgaagctacaggaagatcagagcaaagagaaaagaaagcataaggacacttactcaacagaagcacctttaggcgaaggaacagaacaatatgtcaatagtatctcagattgaccatttctgttacttgtcatttctactttcagaaactaaatgactttcaaatttgggtatagacaataaagaactgaagtgctcactactcagtgatttggaaattttgatgcttgtataaatgtcagataattaatttccaaaggcgtatgtattaagtaaaagtctgtaaatatgttaatgaggccaatttttccagcatttataattatttttttcacttgttaggaagcttttgttatgtattttctgttaatagtacctaaaattgcaacttctaaacacaaataaaaagaaaatatttataggaggaaatgattaatttgatattctttagtgaacttgtttaattcctcagtgggtgtgacatatttcatgggaatattcaaatatctatggtaatattttgaccctttatatttgttctaaaataagtcaaaatgtgaaaataatattaaatctaagatattttgaactaagcatctttatatgcttgtgtaacaggaacaaagtaacagcctttcaattcatatactgccttgtgttcagtgaacccaagaaatgtaataaatatttgtaattttacacaaatatttaagaggaaagagtattaagagcaattcaaaaaaagtaaccttatactactaaaaaaaaaattcttgcatatattatcatcaaatgcatttttgaagacatcaaagactcaggttaaaactattttggtaagtgcagcttgaatttcaaatatcccgtgttacctttctctattacagcttaaagtatgctacaatctgtgtcatatagttaattgataagcatttttaatctgtgtaaacacaggaatttaaataggaatttactatttttttataaagcttttgctattttttcattgctcattttgttcttattattttgataaagtatcagactttttgcttgagttcttcagtgtaaattattttttacatgtaaaagtactgtattcaaccagttgcataatacagcaaaaatctttgaattcccctttaaaataactaaaatttgatggtttccatgacagatttatagcacatatagggatcttgcatgtatctgcagaaacttcattatttttcaaatgaaatggtgtatacttctttcaaatgaactttgagacttgaaacatattttagtcattttttgttaaatattgaatttttaaatacacatatatcaaaaatagttgagaataaaaagaaagcctaatcatcagcaattattttatttttaatttggccatctctgacattgcagtcaatatcttagggtattttcttgaatttaataaagtcccatgggtgggttcagggtgaatgggagtattaacaacaaccaaaaaatatctattgagacacagtagagtctcagtaagagaaatattaaaatgtaagaaaggtcaccattagtgatatcaactgtagtttgttactttgaactatatttctgattaactctttatagtaataacttagagctgttagctcagatatcttaattagctcatatgaaaaacaagtttaattttattatttactgaacatggcaaaatgcttttcaatctataataaaactgggataaaaaattgaagttgttttttttaaaacctaatagcaataagcaaaattggcatacataatttttttaatgaactatattttgtcagaatctgaaggtactgaaaaactattctaaaatgcctacttgtttttgcattaatttgtaatgcttacattttgcacccttagataatgtttgataagataaaaatataatttatcccttgtaccaactcaagtcaatcagattttaacatgaaaaatatagattaatgtatgtcagctttctagaggtagaatactcagctatttgatggcatttttcccaccccatgtgaaattttatttttggaagttatgctagtgacattgcaatatatattgaaatcttcggaggctgccaggttgagcttcaaaactagacttgagaatctttcgtgtatatgcacattcacttgataattgtgtattctatgtagtttaaagtgggatcaagccttttaaaatgtgttattagtacttagaagttgtaaaacagaacttatagaggtttgttactagacactgaaactgcatgacaagtatctggtgtcttaactaattagatagatctgttgtattggttttcttgttggatagaataacagttaatcatttttagaagagttttagattacttgccataaaatttgtatgtctcagctcttgttggtttaggagcagaagtggtgtttagtcccttcccgttaatgttgctgtgctacttcagacagctgaaaacttaatggtattatttcaagttcacataaccctaaaaaaggttttctttgtgtagtaacttgtgcttaaacttttagtcaattaaatgtaggaggttttatttgaaaacataaaatgattctctaaattacatcttgttttaagccaccaaaatgaatgcagtaatttttctttaaaaaaatgatctctgaaaactgtgagacaatgtaaaaagaataagttttaattcccccaaaatcaaaaattgtacttaaaatctcagacaattcactgaacaggaataataaagaacatattttaatata

SEQ ID NO: 187390 - DNA, 2041 bp, Homo sapiens
  Payload ID: 16895
  Gene Symbol: SENP6
  Gene Name: SUMO1/sentrin specific peptidase 6
  ENST ID: ENST00000503501
  CDS Start-End: 1-1166
tacgaagcattccagaagactcagagttaaatacagttacattgccaagaaaagcaagaatgaaagaccagtttggcaattctattatcaacacacctctgaaacgtcgtaaagtgttttctcaagaacctccagatgctttagctttaagctgccaaagttcctttgacagtgtcattttaaactgtcgaagtatacgagtaggaacactcttccggctgttaatagagcctgtaattttttgtttagattttatcaagatacagctagacgaaccagaccatgatcctgtagagattatattaaatacctctgatctaactaaatgtgaatggtgtaatgtccgaaaattacctgtagtgtttcttcaagcaattccagcagtttatcaaaagctgagcatccaactgcaaatgaataaggaggataaagtttggaatgattgtaaaggagtaaataaattaacaaatttagaagaacaatatataattttaatttttcaaaatggccttgatcctccggcaaatatggtatttgaaagtatcattaatgaaattggtataaagaataacatctccaatttttttgcgaaaattccctttgaagaagctaatggcagacttgttgcctgtacaagaacctatgaagagagcatcaaaggaagttgtgggcaaaaggaaaacaaaattaaaactgtatcatttgaatctaaaatacaacttagaagcaaacaagaatttcagttttttgatgaagaagaagaaactggagaaaaccacaccatcttcattggcccagtagaaaagttgatagtatatccaccacctccagctaagggaggcatctctgttaccaatgaggacctgcactgtctaaatgaaggagaatttttaaatgatgttattatagacttttatttgaaatacttggtgcttgaaaaactgaagaaggaagacgctgaccgaattcatatattcagttcttttttctataaacgccttaatcagagagagaggagaaatcatgaaacaactaatctgtcaatacagcaaaaacggcatgggagagtaaaaacatggacccggcacgtagatatttttgagaaggattttatttttgtaccccttaatgaagcatggcttaagcaaaatcagactaaactatagcgatgaatcacctgaagctggtaaaatgcttgaagatgaactcgtcgacttctcagaagatcaggataaccaggatgatagcagtgacgatggattcctcgctgatgacaactgcagttcagaaataggacagtggcatttaaagcctactatctgtaaacaaccttgtatcctacttatggactcactccgaggcccttctcggtcaaatgttgtcaaaattttaagagagtatttagaagtggaatgggaagttaaaaaaggaagcaaaagaagtttttccaaagatgttatgaagggctctaatccaaaagtaccacagcaaaacaacttcagtgactgtggtgtatatgtattgcagtatgtagagagcttttttgagaatccaattctcagttttgaactacctatgaatttggcaaactggtttcctccaccaagaatgagaacaaaaagagaagaaatccgaaacataattctgaagctacaggaagatcagagcaaagagaaaagaaagcataaggacacttactcaacagaagcacctttaggcgaaggaacagaacaatatgtcaatagtatctcagattgaccatttctgttacttgtcatttctactttcagaaactaaatgactttcaaatttgggtatagacaataaagaactgaagtgctcactactcagtgatttggaaattttgatgcttgtataaatgtcagataattaatttccaaaggcgtatgtattaagtaaaagtctgtaaatatgttaatgaggccaatttttccagcatttataattatttttttcacttgttaggaagcttttgttatgtattttctgttaatagtacctaaaattgcaacttctaaac

SEQ ID NO: 187391 - DNA, 867 bp, Homo sapiens
  Payload ID: 16895
  Gene Symbol: SENP6
  Gene Name: SUMO1/sentrin specific peptidase 6
  ENST ID: ENST00000493959
  CDS Start-End: 302-526
gccgagaggaaccgggcccgggaagcgccgtcgtcgtcgtcgccggtcgcgttcccccggagaggcctgagaagctcgggccgcgggcctcgctgcccgccagcccgcggacaggcccgggcgcgcctggcctgcctttgtataggcccgtctgaacgtgggagcgcagcccgcctgacggctgagcccgaggcccgcaaccctgcggcgtctaccctcctccggcgcggcccctcatcccggcgagcacggcggcggtgtgggccatggattaagaaggaggcggcgtgggaggaggaagatggcggccggcaagagcggcggtagcgcaggggagattacttttctggaagctttggctagatcagagtctaagagagatggaggttttaaaaataattggagctttgatcatgaagaagaaagtgaaggagatacagataaagagtgcttcacttctgtctgggcaacagctccgttcatcattaccactttatgtgccttcaccgatgagatgttgatttgaagttttatttgaaggagagctttgaactgtgggacaaatctgctcagtgtggatgaagatgaggattctgaaacctcaaaaggaaaaaagttaaatcgtcgatctgaaattgttgctaatagctctggtgaattcatcttgaagacatatgtaagacgaaacaagtctgaaagttttaaaactttgaaaggcaacccaattggacttaacatgttgagcaacaataagaaattgagtgaaaatacgcaaaatacgtcattatgttctggaactgtagttcatggtagacgttttcatcatgctcatgcacagataccagtagtaaaaacagcagcccaaag

SEQ ID NO: 187392 - DNA, 1013 bp, Homo sapiens
  Payload ID: 16895
  Gene Symbol: SENP6
  Gene Name: SUMO1/sentrin specific peptidase 6
  ENST ID: ENST00000483859
  CDS Start-End: 354-1013
tactttatttgtctttagttcaactcagaaagccagagccaagcttaagacatcagaattatccccactgcctcttcactttggctagatcagagtctaagagagatggaggttttaaaaataattggagctttgatcatgaagaagaaagtgaaggagatacagataaagatgggacaaatctgctcagtgtggatgaagatgaggattctgaaacctcaaaaggaaaaaagttaaatcgtcgatctgaaattgttgctaatagctctggtgaattcatcttgaagacatatgtaagacgaaacaagtctgaaagttttaaaactttgaaaggcaacccaattggacttaacatgttgagcaacaataagaaattgagtgaaaatacgcaaaatacgtcattatgttctggaactgtagttcatggtagacgttttcatcatgctcatgcacagataccagtagtaaaaacagcagcccaaagtctggaccgaaaagaaaggaaagaatacccacctcatgtccaaaaagttgaaattaatcctgtaaggttaagtcggctccaaggtgttgaacgtataatgaagaaaacagaagagtccgaatcacaagtggagcctgaaattaagaggaaagtacaacagaaacgacactgtagtacctatcagcctactcctcctctatctcctgcttcaaaaaaatgtttaacccatttagaggatttgcaaagaaattgcagacaagctattactttgaatgagtctactggaccattattaagaacgtcaattcatcagaattctggaggacagaagtcacaaaacacaggattaacaaccaagaagttttatggcaacaatgtggaaaaggttccaattgatattattgtgaattgtgatgacagtaaacacacttatttacagactaatggaaaagtcattttacctggggcaaaaatacccaaaatcacaaacttgaaagaaaggaaaacaagtttgtcagacctaaatgat

SEQ ID NO: 187393 - DNA, 4736 bp, Homo sapiens
  Payload ID: 16896
  Gene Symbol: SENP7
  Gene Name: SUMO1/sentrin specific peptidase 7
  Uniprot ID: Q9BQF6
  ENST ID: ENST00000314261
  CDS Start-End: 112-3066
ttttttttttttttttttttttttttttcctttcccctccccctccctctccaagccggaggggtcctgaggtgacagcgcctgcaactgaaatttcagcagcgggagaagatggacaagagaaagctcgggcgacggccatcttcatccgaaatcatcacagaaggaaaaaggaaaaagtcatcttctgatttatcggagataagaaagatgttaaatgcaaaaccagaggatgtccatgttcaatcaccactgtccaaattcagaagctcagaacgctggactctccctttgcagtgggaaagaagcctaaggaataaagtcatctctctagaccataaaaataaaaaacatatccgagggtgtcctgttacttccaagtcatcaccagaaaggatacccagagttatattgacgaatgtcctgggaacggagttaggaagaaaatacataaggaccccacctgtaactgagggaagtttgagtgatacagacaacttgcaatcagagcaactttcttcatcatctgatggcagcctagaatcttatcaaaatctaaaccctcacaagagctgttatttatctgaaaggggctcacaacgaagtaagacagtagatgacaattctgcaaagcagactgcgcacaataaagaaaaacgaagaaaggatgatggcatttctcttttaatatctgatactcagcctgaagaccttaacagtggaagtagaggttgtgatcatctcgaacaggaaagcagaaacaaggatgttaaatattctgattcaaaagtggaactcactctgatttccaggaagacaaagagaaggcttagaaataatttacctgattctcaatattgtacttctttggataagtcaacagaacagacaaaaaaacaagaagatgactcaacaatatccactgagtttgaaaagccaagtgaaaactatcatcaggatccaaaactgcctgaagaaattacaactaaacctacaaaaagtgattttactaaactatcctcacttaacagtcaggagttgactttgagtaatgccaccaaaagtgcctctgccggttcaaccactgaaaccgttgagaactctaattccattgatattgtggggatttcttccctggttgagaaggatgagaatgagttgaataccatagaaaagcctattctaagaggacataatgaagggaaccaatcactgatctcagctgaaccaattgttgtttccagtgatgaagaaggacctgttgaacataaaagttcagaaattcttaagttacaatctaagcaagaccgtgagacaactaatgaaaatgagagtacttctgaatcagcattgttagaactaccattgattacatgtgaatctgtacagatgtcatctgaattatgcccatataatcctgtcatggagaacatttccagtattatgcctagtaatgagatggatctacaactggattttatatttacttctgtttatattggtaaaataaaaggagcttctaaaggttgtgttacaatcacaaaaaaatatattaagatcccatttcaagtgtccctgaatgagatttcattgctagtggataccacacatttaaagcggtttgggttatggaaaagtaaggatgataatcacagtaaaaggagtcatgctattcttttcttctgggtctcttcagattatcttcaagagattcagacccaattagaacactctgtattaagccagcaatcaaaatctagtgaattcattttccttgaactacacaatcctgtttcacaaagagaagaattgaagctgaaagatattatgacggaaataagtataatcagtggagaattagagctttcttacccgttgtcttgggttcaggcatttcctttgtttcagaacctctcttcaaaagaaagttcttttattcattattactgtgtttcaacttgttctttccctgctggtgttgctgttgctgaagaaatgaagctgaaatcagtatctcagccctcaaacacagatgcggccaagcctacttacaccttcctgcagaagcaaagtagcggttgctactccctttctattacatctaatccagatgaagaatggcgagaagtcaggcacactggacttgttcagaagttgattgtatatcctccaccacctactaaggggggattaggagtaactaatgaagatctggagtgtttagaagaaggagagtttcttaatgatgtaatcattgatttttaccttaagtatcttatattggagaaggcatcagatgaacttgttgaacgaagtcacatttttagtagctttttctataaatgcttgacaagaaaggaaaataatttaacagaagataatccaaatctttcaatggcacagagaagacataaaagagtaagaacatggactcgtcacataaacatttttaataaagattacatctttgtacctgtaaatgagtcgtctcactggtatctcgcagtcatttgttttccatggttagaagaagctgtgtatgaagattttccacaaactgtatcccagcagtcccaggctcagcagtcccaaaatgacaacaaaacaatagataatgatctacgtactacttcgacactgtctttgagtgcagaggattcccaaagtaccgagtcgaatatgtcagtaccaaagaaaatgtgtaaaaggccatgtattcttatactagactccttgaaagctgcttctgtacaaaacacagttcagaatttacgagagtatttagaggtagagtgggaagttaaactaaaaactcatcgtcaattcagcaaaacaaacatggtggatctatgccctaaagttcctaaacaggacaatagcagtgattgtggagtatatttattgcagtatgtggaaagcttcttcaaggatcctattgttaactttgaacttccaattcatttggagaagtggtttcctcgtcatgtaataaagaccaaacgggaagatattcgagagctcatcttgaaacttcatttacagcaacagaagggcagcagtagctagttaatctgtacaaacatgacacagatgttctctaagattactggaaagcctcttaccagcatttgtgttagccagctcacagagaagaaaataacttgcagtagttttataataagtcattggaacattatttaaaatatgtaggacacattattagaattgttgggatctcatagatggaatgggaatgggggtgatatagataaacttactagatataaattaaaattttataaatatttcatatttttctgagtaaatatgattggattatgcaacagcatatgtaatatgggaatgttttgtagataataaaacttacatgatctgtacttccacgtgactgggtgctgaggggagttaaagcctccctggtgccagccccagtgcttgtcaaatttgctgacaggtcacatcatattgtaattctattctttgcagctcaagcatgcagtatgaatactgtgtattttttaaaaaaataatttagtatcaaggcttcagaaaatgccatttacggcatcccttctgtatgtaacaaaaagacattcataatgttaggaagatgataaaaattcgctcttttaaagtgcagcttattattctcaattgctaaatacgattactctgctttttttttttcatttcttttgatgtcatatgtgagtatcttataatttagttcatttgttcagggtaaaatttgaaacaaaaaattttacctgtgcaaaatagttttttaaaaattatacatgtagctcaacttgaggtactgctatataaatattcactcacattatcacggaatttatgtatagtttctctaatatagaagataaaattggtgtcctcataactttaacaaagaaaaccctcagtcctatttattaatgggtagaattaaatatataattttatagctcagtttacccagtattcatctgcaaagccagattgctctcattgcttttatatttttaaattgtagcttttagagacctatgatcctcatggaacttaattttttattaaatattcaggtaacagttctgaattcatgtgataatggtggcattatatatgattaaacacttcagaactttctaatgttatcaggagtattttgagggagatatgattatattgtattttctcagataagaaaaatgttttttaacaatattattttaatctgttttaagcatctcttagatttacattataactacataaagcagtgaagcaaaggcaaattaagataaagctagaaagtctgaacattttatttcaaaatcatacgaatcggggtcagttaagcctcagtattcttagcttttgttgattttggcactatctttatattattaaatatatttgttgtttggatatttcatataaagatggctataattacatatttcattcccaatttgtgtgtgttggggggtacttttaaaggtgactattgttttgtacatctaattttgggaaagcaagtctataagacatcttgtgatttcttaatgtttttgtttgtatgtttttcaaagatatcactgtcctttatcatgttttgaagattgtttaaaattcattttcctaaattaatgtgcaagtaatgttttgaggatatcagtgttttatattaaacatatttccaattcattaaa

SEQ ID NO: 187394 - DNA, 3272 bp, Homo sapiens
  Payload ID: 16896
  Gene Symbol: SENP7
  Gene Name: SUMO1/sentrin specific peptidase 7
  Uniprot ID: Q9BQF6
  ENST ID: ENST00000348610
  CDS Start-End: 143-3196
ttttttttttcctttcccctccccctccctctccaagccggaggggtcctgaggtgacagcgcctgcaactgaaatttcagcagcgggagaagatggacaagagaaagctcgggcgacggccatcttcatccgataagaaagatgttaaatgcaaaaccagaggatgtccatgttcaatcaccactgtccaaattcagaagctcagaacgctggactctccctttgcagtgggaaagaagcctaaggaataaagtcatctctctagaccataaaaataaaaaacatatccgagggtgtcctgttacttccaagtcatcaccagaaaggcaactcaaagttatgttgacgaatgtcctatggacggatttaggacgaaaattcagaaagaccctacctagaaacgatgctaatttatgtgatgccaacaaggtgcaatcagactcattgccttcgacatctgttgacagcctagagacatgtcaaaaattagaacctcttcgccaaagccttaatttatctgaaaggatacccagagttatattgacgaatgtcctgggaacggagttaggaagaaaatacataaggaccccacctgtaactgagggaagtttgagtgatacagacaacttgcaatcagagcaactttcttcatcatctgatggcagcctagaatcttatcaaaatctaaaccctcacaagagctgttatttatctgaaaggggctcacaacgaagtaagacagtagatgacaattctgcaaagcagactgcgcacaataaagaaaaacgaagaaaggatgatggcatttctcttttaatatctgatactcagcctgaagaccttaacagtggaagtagaggttgtgatcatctcgaacaggaaagcagaaacaaggatgttaaatattctgattcaaaagtggaactcactctgatttccaggaagacaaagagaaggcttagaaataatttacctgattctcaatattgtacttctttggataagtcaacagaacagacaaaaaaacaagaagatgactcaacaatatccactgagtttgaaaagccaagtgaaaactatcatcaggatccaaaactgcctgaagaaattacaactaaacctacaaaaagtgattttactaaactatcctcacttaacagtcaggagttgactttgagtaatgccaccaaaagtgcctctgccggttcaaccactgaaaccgttgagaactctaattccattgatattgtggggatttcttccctggttgagaaggatgagaatgagttgaataccatagaaaagcctattctaagaggacataatgaagggaaccaatcactgatctcagctgaaccaattgttgtttccagtgatgaagaaggacctgttgaacataaaagttcagaaattcttaagttacaatctaagcaagaccgtgagacaactaatgaaaatgagagtacttctgaatcagcattgttagaactaccattgattacatgtgaatctgtacagatgtcatctgaattatgcccatataatcctgtcatggagaacatttccagtattatgcctagtaatgagatggatctacaactggattttatatttacttctgtttatattggtaaaataaaaggagcttctaaaggttgtgttacaatcacaaaaaaatatattaagatcccatttcaagtgtccctgaatgagatttcattgctagtggataccacacatttaaagcggtttgggttatggaaaagtaaggatgataatcacagtaaaaggagtcatgctattcttttcttctgggtctcttcagattatcttcaagagattcagacccaattagaacactctgtattaagccagcaatcaaaatctagtgaattcattttccttgaactacacaatcctgtttcacaaagagaagaattgaagctgaaagatattatgacggaaataagtataatcagtggagaattagagctttcttacccgttgtcttgggttcaggcatttcctttgtttcagaacctctcttcaaaagaaagttcttttattcattattactgtgtttcaacttgttctttccctgctggtgttgctgttgctgaagaaatgaagctgaaatcagtatctcagccctcaaacacagatgcggccaagcctacttacaccttcctgcagaagcaaagtagcggttgctactccctttctattacatctaatccagatgaagaatggcgagaagtcaggcacactggacttgttcagaagttgattgtatatcctccaccacctactaaggggggattaggagtaactaatgaagatctggagtgtttagaagaaggagagtttcttaatgatgtaatcattgatttttaccttaagtatcttatattggagaaggcatcagatgaacttgttgaacgaagtcacatttttagtagctttttctataaatgcttgacaagaaaggaaaataatttaacagaagataatccaaatctttcaatggcacagagaagacataaaagagtaagaacatggactcgtcacataaacatttttaataaagattacatctttgtacctgtaaatgagtcgtctcactggtatctcgcagtcatttgttttccatggttagaagaagctgtgtatgaagattttccacaaactgtatcccagcagtcccaggctcagcagtcccaaaatgacaacaaaacaatagataatgatctacgtactacttcgacactgtctttgagtgcagaggattcccaaagtaccgagtcgaatatgtcagtaccaaagaaaatgtgtaaaaggccatgtattcttatactagactccttgaaagctgcttctgtacaaaacacagttcagaatttacgagagtatttagaggtagagtgggaagttaaactaaaaactcatcgtcaattcagcaaaacaaacatggtggatctatgccctaaagttcctaaacaggacaatagcagtgattgtggagtatatttattgcagtatgtggaaagcttcttcaaggatcctattgttaactttgaacttccaattcatttggagaagtggtttcctcgtcatgtaataaagaccaaacgggaagatattcgagagctcatcttgaaacttcatttacagcaacagaagggcagcagtagctagttaatctgtacaaacatgacacagatgttctctaagattactggaaagcctcttaccagcatttgtgttagccagc

SEQ ID NO: 187395 - DNA, 1483 bp, Homo sapiens
  Payload ID: 16896
  Gene Symbol: SENP7
  Gene Name: SUMO1/sentrin specific peptidase 7
  Uniprot ID: Q9BQF6
  ENST ID: ENST00000394085
  CDS Start-End: 364-1080
actcagcccattgagttttaaaacctccctaatgacagatataacagttggagaattctgttaaggtttaatgacagtattttatatcatgcccagatggagctaagcaaaataagtagatttaactgtgtttatactaagttgcacagccagttttggaatctgaaaagcatttaataaattgctgcctttattctgtccatttcattattgtttatagttattaaatttaagaataaccaggggttactataaggagatatatttataatgtgttaaatatgatatatcttaaagaagatggttaaactaaatttaagatatttcaatatataaaaatggctcttgaagtccctatcttaaatgaaaaaatttttatatatcaaatctgtctttcatactctcagaatggcacagagaagacataaaagagtaagaacatggactcgtcacataaacatttttaataaagattacatctttgtacctgtaaatgagtcgtctcactggtatctcgcagtcatttgttttccatggttagaagaagctgtgtatgaagattttccacaaactgtatcccagcagtcccaggctcagcagtcccaaaatgacaacaaaacaatagataatgatctacgtactacttcgacactgtctttgagtgcagaggattcccaaagtaccgagtcgaatatgtcagtaccaaagaaaatgtgtaaaaggccatgtattcttatactagactccttgaaagctgcttctgtacaaaacacagttcagaatttacgagagtatttagaggtagagtgggaagttaaactaaaaactcatcgtcaattcagcaaaacaaacatggtggatctatgccctaaagttcctaaacaggacaatagcagtgattgtggagtatatttattgcagtatgtggaaagcttcttcaaggatcctattgttaactttgaacttccaattcatttggagaagtggtttcctcgtcatgtaataaagaccaaacgggaagatattcgagagctcatcttgaaacttcatttacagcaacagaagggcagcagtagctagttaatctgtacaaacatgacacagatgttctctaagattactggaaagcctcttaccagcatttgtgttagccagctcacagagaagaaaataacttgcagtagttttataataagtcattggaacattatttaaaatatgtaggacacattattagaattgttgggatctcatagatggaatgggaatgggggtgatatagataaacttactagatataaattaaaattttataaatatttcatatttttctgagtaaatatgattggattatgcaacagcatatgtaatatgggaatgttttgtagataataaaacttacatgatctgtacttccacgtgactgggtgctgaggggagttaaagcctccctggtgccagccccagtgcttgtcaaatttgc

SEQ ID NO: 187396 - DNA, 4434 bp, Homo sapiens
  Payload ID: 16896
  Gene Symbol: SENP7
  Gene Name: SUMO1/sentrin specific peptidase 7
  Uniprot ID: Q9BQF6
  ENST ID: ENST00000394091
  CDS Start-End: 104-2764
ggaggggtcctgaggtgacagcgcctgcaactgaaatttcagcagcgggagaagatggacaagagaaagctcgggcgacggccatcttcatccgataagaaagatgttaaatgcaaaaccagaggatgtccatgttcaatcaccactgtccaaattcagaagctcagaacgctggactctccctttgcagtgggaaagaagcctaaggaataaagtcatctctctagaccataaaaataaaaaacatatccgagggtgtcctgttacttccaagtcatcaccagaaaggggctcacaacgaagtaagacagtagatgacaattctgcaaagcagactgcgcacaataaagaaaaacgaagaaaggatgatggcatttctcttttaatatctgatactcagcctgaagaccttaacagtggaagtagaggttgtgatcatctcgaacaggaaagcagaaacaaggatgttaaatattctgattcaaaagtggaactcactctgatttccaggaagacaaagagaaggcttagaaataatttacctgattctcaatattgtacttctttggataagtcaacagaacagacaaaaaaacaagaagatgactcaacaatatccactgagtttgaaaagccaagtgaaaactatcatcaggatccaaaactgcctgaagaaattacaactaaacctacaaaaagtgattttactaaactatcctcacttaacagtcaggagttgactttgagtaatgccaccaaaagtgcctctgccggttcaaccactgaaaccgttgagaactctaattccattgatattgtggggatttcttccctggttgagaaggatgagaatgagttgaataccatagaaaagcctattctaagaggacataatgaagggaaccaatcactgatctcagctgaaccaattgttgtttccagtgatgaagaaggacctgttgaacataaaagttcagaaattcttaagttacaatctaagcaagaccgtgagacaactaatgaaaatgagagtacttctgaatcagcattgttagaactaccattgattacatgtgaatctgtacagatgtcatctgaattatgcccatataatcctgtcatggagaacatttccagtattatgcctagtaatgagatggatctacaactggattttatatttacttctgtttatattggtaaaataaaaggagcttctaaaggttgtgttacaatcacaaaaaaatatattaagatcccatttcaagtgtccctgaatgagatttcattgctagtggataccacacatttaaagcggtttgggttatggaaaagtaaggatgataatcacagtaaaaggagtcatgctattcttttcttctgggtctcttcagattatcttcaagagattcagacccaattagaacactctgtattaagccagcaatcaaaatctagtgaattcattttccttgaactacacaatcctgtttcacaaagagaagaattgaagctgaaagatattatgacggaaataagtataatcagtggagaattagagctttcttacccgttgtcttgggttcaggcatttcctttgtttcagaacctctcttcaaaagaaagttcttttattcattattactgtgtttcaacttgttctttccctgctggtgttgctgttgctgaagaaatgaagctgaaatcagtatctcagccctcaaacacagatgcggccaagcctacttacaccttcctgcagaagcaaagtagcggttgctactccctttctattacatctaatccagatgaagaatggcgagaagtcaggcacactggacttgttcagaagttgattgtatatcctccaccacctactaaggggggattaggagtaactaatgaagatctggagtgtttagaagaaggagagtttcttaatgatgtaatcattgatttttaccttaagtatcttatattggagaaggcatcagatgaacttgttgaacgaagtcacatttttagtagctttttctataaatgcttgacaagaaaggaaaataatttaacagaagataatccaaatctttcaatggcacagagaagacataaaagagtaagaacatggactcgtcacataaacatttttaataaagattacatctttgtacctgtaaatgagtcgtctcactggtatctcgcagtcatttgttttccatggttagaagaagctgtgtatgaagattttccacaaactgtatcccagcagtcccaggctcagcagtcccaaaatgacaacaaaacaatagataatgatctacgtactacttcgacactgtctttgagtgcagaggattcccaaagtaccgagtcgaatatgtcagtaccaaagaaaatgtgtaaaaggccatgtattcttatactagactccttgaaagctgcttctgtacaaaacacagttcagaatttacgagagtatttagaggtagagtgggaagttaaactaaaaactcatcgtcaattcagcaaaacaaacatggtggatctatgccctaaagttcctaaacaggacaatagcagtgattgtggagtatatttattgcagtatgtggaaagcttcttcaaggatcctattgttaactttgaacttccaattcatttggagaagtggtttcctcgtcatgtaataaagaccaaacgggaagatattcgagagctcatcttgaaacttcatttacagcaacagaagggcagcagtagctagttaatctgtacaaacatgacacagatgttctctaagattactggaaagcctcttaccagcatttgtgttagccagctcacagagaagaaaataacttgcagtagttttataataagtcattggaacattatttaaaatatgtaggacacattattagaattgttgggatctcatagatggaatgggaatgggggtgatatagataaacttactagatataaattaaaattttataaatatttcatatttttctgagtaaatatgattggattatgcaacagcatatgtaatatgggaatgttttgtagataataaaacttacatgatctgtacttccacgtgactgggtgctgaggggagttaaagcctccctggtgccagccccagtgcttgtcaaatttgctgacaggtcacatcatattgtaattctattctttgcagctcaagcatgcagtatgaatactgtgtattttttaaaaaaataatttagtatcaaggcttcagaaaatgccatttacggcatcccttctgtatgtaacaaaaagacattcataatgttaggaagatgataaaaattcgctcttttaaagtgcagcttattattctcaattgctaaatacgattactctgctttttttttttcatttcttttgatgtcatatgtgagtatcttataatttagttcatttgttcagggtaaaatttgaaacaaaaaattttacctgtgcaaaatagttttttaaaaattatacatgtagctcaacttgaggtactgctatataaatattcactcacattatcacggaatttatgtatagtttctctaatatagaagataaaattggtgtcctcataactttaacaaagaaaaccctcagtcctatttattaatgggtagaattaaatatataattttatagctcagtttacccagtattcatctgcaaagccagattgctctcattgcttttatatttttaaattgtagcttttagagacctatgatcctcatggaacttaattttttattaaatattcaggtaacagttctgaattcatgtgataatggtggcattatatatgattaaacacttcagaactttctaatgttatcaggagtattttgagggagatatgattatattgtattttctcagataagaaaaatgttttttaacaatattattttaatctgttttaagcatctcttagatttacattataactacataaagcagtgaagcaaaggcaaattaagataaagctagaaagtctgaacattttatttcaaaatcatacgaatcggggtcagttaagcctcagtattcttagcttttgttgattttggcactatctttatattattaaatatatttgttgtttggatatttcatataaagatggctataattacatatttcattcccaatttgtgtgtgttggggggtacttttaaaggtgactattgttttgtacatctaattttgggaaagcaagtctataagacatcttgtgatttcttaatgtttttgtttgtatgtttttcaaagatatcactgtcctttatcatgttttgaagattgtttaaaattcattttcctaaattaatgtgcaagtaatgttttgaggatatcagtgttttatattaaacatatttccaattcattaaa

SEQ ID NO: 187397 - DNA, 4703 bp, Homo sapiens
  Payload ID: 16896
  Gene Symbol: SENP7
  Gene Name: SUMO1/sentrin specific peptidase 7
  ENST ID: ENST00000394094
  CDS Start-End: 76-3033
ctccccctccctctccaagccggaggggtcctgaggtgacagcgcctgcaactgaaatttcagcagcgggagaagatggacaagagaaagctcgggcgacggccatcttcatccgaaatcatcacagaaggaaaaaggaaaaagtcatcttctgatttatcggagataagaaagatgttaaatgcaaaaccagaggatgtccatgttcaatcaccactgtccaaattcagaagctcagaacgctggactctccctttgcagtgggaaagaagcctaaggaataaagtcatctctctagaccataaaaataaaaaacatatccgagggtgtcctgttacttccaagtcatcaccagaaaggcaactcaaagttatgttgacgaatgtcctatggacggatttaggacgaaaattcagaaagaccctacctagaaacgatgctaatttatgtgatgccaacaaggtgcaatcagactcattgccttcgacatctgttgacagcctagagacatgtcaaaaattagaacctcttcgccaaagccttaatttatctgaaaggggctcacaacgaagtaagacagtagatgacaattctgcaaagcagactgcgcacaataaagaaaaacgaagaaaggatgatggcatttctcttttaatatctgatactcagcctgaagaccttaacagtggaagtagaggttgtgatcatctcgaacaggaaagcagaaacaaggatgttaaatattctgattcaaaagtggaactcactctgatttccaggaagacaaagagaaggcttagaaataatttacctgattctcaatattgtacttctttggataagtcaacagaacagacaaaaaaacaagaagatgactcaacaatatccactgagtttgaaaagccaagtgaaaactatcatcaggatccaaaactgcctgaagaaattacaactaaacctacaaaaagtgattttactaaactatcctcacttaacagtcaggagttgactttgagtaatgccaccaaaagtgcctctgccggttcaaccactgaaaccgttgagaactctaattccattgatattgtggggatttcttccctggttgagaaggatgagaatgagttgaataccatagaaaagcctattctaagaggacataatgaagggaaccaatcactgatctcagctgaaccaattgttgtttccagtgatgaagaaggacctgttgaacataaaagttcagaaattcttaagttacaatctaagcaagaccgtgagacaactaatgaaaatgagagtacttctgaatcagcattgttagaactaccattgattacatgtgaatctgtacagatgtcatctgaattatgcccatataatcctgtcatggagaacatttccagtattatgcctagtaatgagatggatctacaactggattttatatttacttctgtttatattggtaaaataaaaggagcttctaaaggttgtgttacaatcacaaaaaaatatattaagatcccatttcaagtgtccctgaatgagatttcattgctagtggataccacacatttaaagcggtttgggttatggaaaagtaaggatgataatcacagtaaaaggagtcatgctattcttttcttctgggtctcttcagattatcttcaagagattcagacccaattagaacactctgtattaagccagcaatcaaaatctagtgaattcattttccttgaactacacaatcctgtttcacaaagagaagaattgaagctgaaagatattatgacggaaataagtataatcagtggagaattagagctttcttacccgttgtcttgggttcaggcatttcctttgtttcagaacctctcttcaaaagaaagttcttttattcattattactgtgtttcaacttgttctttccctgctggtgttgctgttgctgaagaaatgaagctgaaatcagtatctcagccctcaaacacagatgcggccaagcctacttacaccttcctgcagaagcaaagtagcggttgctactccctttctattacatctaatccagatgaagaatggcgagaagtcaggcacactggacttgttcagaagttgattgtatatcctccaccacctactaaggggggattaggagtaactaatgaagatctggagtgtttagaagaaggagagtttcttaatgatgtaatcattgatttttaccttaagtatcttatattggagaaggcatcagatgaacttgttgaacgaagtcacatttttagtagctttttctataaatgcttgacaagaaaggaaaataatttaacagaagataatccaaatctttcaatggcacagagaagacataaaagagtaagaacatggactcgtcacataaacatttttaataaagattacatctttgtacctgtaaatgagtcgtctcactggtatctcgcagtcatttgttttccatggttagaagaagctgtgtatgaagattttccacaaactgtatcccagcagtcccaggctcagcagtcccaaaatgacaacaaaacaatagataatgatctacgtactacttcgacactgtctttgagtgcagaggattcccaaagtaccgagtcgaatatgtcagtaccaaagaaaatgtgtaaaaggccatgtattcttatactagactccttgaaagctgcttctgtacaaaacacagttcagaatttacgagagtatttagaggtagagtgggaagttaaactaaaaactcatcgtcaattcagcaaaacaaacatggtggatctatgccctaaagttcctaaacaggacaatagcagtgattgtggagtatatttattgcagtatgtggaaagcttcttcaaggatcctattgttaactttgaacttccaattcatttggagaagtggtttcctcgtcatgtaataaagaccaaacgggaagatattcgagagctcatcttgaaacttcatttacagcaacagaagggcagcagtagctagttaatctgtacaaacatgacacagatgttctctaagattactggaaagcctcttaccagcatttgtgttagccagctcacagagaagaaaataacttgcagtagttttataataagtcattggaacattatttaaaatatgtaggacacattattagaattgttgggatctcatagatggaatgggaatgggggtgatatagataaacttactagatataaattaaaattttataaatatttcatatttttctgagtaaatatgattggattatgcaacagcatatgtaatatgggaatgttttgtagataataaaacttacatgatctgtacttccacgtgactgggtgctgaggggagttaaagcctccctggtgccagccccagtgcttgtcaaatttgctgacaggtcacatcatattgtaattctattctttgcagctcaagcatgcagtatgaatactgtgtattttttaaaaaaataatttagtatcaaggcttcagaaaatgccatttacggcatcccttctgtatgtaacaaaaagacattcataatgttaggaagatgataaaaattcgctcttttaaagtgcagcttattattctcaattgctaaatacgattactctgctttttttttttcatttcttttgatgtcatatgtgagtatcttataatttagttcatttgttcagggtaaaatttgaaacaaaaaattttacctgtgcaaaatagttttttaaaaattatacatgtagctcaacttgaggtactgctatataaatattcactcacattatcacggaatttatgtatagtttctctaatatagaagataaaattggtgtcctcataactttaacaaagaaaaccctcagtcctatttattaatgggtagaattaaatatataattttatagctcagtttacccagtattcatctgcaaagccagattgctctcattgcttttatatttttaaattgtagcttttagagacctatgatcctcatggaacttaattttttattaaatattcaggtaacagttctgaattcatgtgataatggtggcattatatatgattaaacacttcagaactttctaatgttatcaggagtattttgagggagatatgattatattgtattttctcagataagaaaaatgttttttaacaatattattttaatctgttttaagcatctcttagatttacattataactacataaagcagtgaagcaaaggcaaattaagataaagctagaaagtctgaacattttatttcaaaatcatacgaatcggggtcagttaagcctcagtattcttagcttttgttgattttggcactatctttatattattaaatatatttgttgtttggatatttcatataaagatggctataattacatatttcattcccaatttgtgtgtgttggggggtacttttaaaggtgactattgttttgtacatctaattttgggaaagcaagtctataagacatcttgtgatttcttaatgtttttgtttgtatgtttttcaaagatatcactgtcctttatcatgttttgaagattgtttaaaattcattttcctaaattaatgtgcaagtaatgttttgaggatatcagtgttttatattaaacatatttccaattcattaaa

SEQ ID NO: 187398 - DNA, 4945 bp, Homo sapiens
  Payload ID: 16896
  Gene Symbol: SENP7
  Gene Name: SUMO1/sentrin specific peptidase 7
  Uniprot ID: Q9BQF6
  ENST ID: ENST00000394095
  CDS Start-End: 55-3207
ggaggggtcctgaggtgacagcgcctgcaactgaaatttcagcagcgggagaagatggacaagagaaagctcgggcgacggccatcttcatccgaaatcatcacagaaggaaaaaggaaaaagtcatcttctgatttatcggagataagaaagatgttaaatgcaaaaccagaggatgtccatgttcaatcaccactgtccaaattcagaagctcagaacgctggactctccctttgcagtgggaaagaagcctaaggaataaagtcatctctctagaccataaaaataaaaaacatatccgagggtgtcctgttacttccaagtcatcaccagaaaggcaactcaaagttatgttgacgaatgtcctatggacggatttaggacgaaaattcagaaagaccctacctagaaacgatgctaatttatgtgatgccaacaaggtgcaatcagactcattgccttcgacatctgttgacagcctagagacatgtcaaaaattagaacctcttcgccaaagccttaatttatctgaaaggatacccagagttatattgacgaatgtcctgggaacggagttaggaagaaaatacataaggaccccacctgtaactgagggaagtttgagtgatacagacaacttgcaatcagagcaactttcttcatcatctgatggcagcctagaatcttatcaaaatctaaaccctcacaagagctgttatttatctgaaaggggctcacaacgaagtaagacagtagatgacaattctgcaaagcagactgcgcacaataaagaaaaacgaagaaaggatgatggcatttctcttttaatatctgatactcagcctgaagaccttaacagtggaagtagaggttgtgatcatctcgaacaggaaagcagaaacaaggatgttaaatattctgattcaaaagtggaactcactctgatttccaggaagacaaagagaaggcttagaaataatttacctgattctcaatattgtacttctttggataagtcaacagaacagacaaaaaaacaagaagatgactcaacaatatccactgagtttgaaaagccaagtgaaaactatcatcaggatccaaaactgcctgaagaaattacaactaaacctacaaaaagtgattttactaaactatcctcacttaacagtcaggagttgactttgagtaatgccaccaaaagtgcctctgccggttcaaccactgaaaccgttgagaactctaattccattgatattgtggggatttcttccctggttgagaaggatgagaatgagttgaataccatagaaaagcctattctaagaggacataatgaagggaaccaatcactgatctcagctgaaccaattgttgtttccagtgatgaagaaggacctgttgaacataaaagttcagaaattcttaagttacaatctaagcaagaccgtgagacaactaatgaaaatgagagtacttctgaatcagcattgttagaactaccattgattacatgtgaatctgtacagatgtcatctgaattatgcccatataatcctgtcatggagaacatttccagtattatgcctagtaatgagatggatctacaactggattttatatttacttctgtttatattggtaaaataaaaggagcttctaaaggttgtgttacaatcacaaaaaaatatattaagatcccatttcaagtgtccctgaatgagatttcattgctagtggataccacacatttaaagcggtttgggttatggaaaagtaaggatgataatcacagtaaaaggagtcatgctattcttttcttctgggtctcttcagattatcttcaagagattcagacccaattagaacactctgtattaagccagcaatcaaaatctagtgaattcattttccttgaactacacaatcctgtttcacaaagagaagaattgaagctgaaagatattatgacggaaataagtataatcagtggagaattagagctttcttacccgttgtcttgggttcaggcatttcctttgtttcagaacctctcttcaaaagaaagttcttttattcattattactgtgtttcaacttgttctttccctgctggtgttgctgttgctgaagaaatgaagctgaaatcagtatctcagccctcaaacacagatgcggccaagcctacttacaccttcctgcagaagcaaagtagcggttgctactccctttctattacatctaatccagatgaagaatggcgagaagtcaggcacactggacttgttcagaagttgattgtatatcctccaccacctactaaggggggattaggagtaactaatgaagatctggagtgtttagaagaaggagagtttcttaatgatgtaatcattgatttttaccttaagtatcttatattggagaaggcatcagatgaacttgttgaacgaagtcacatttttagtagctttttctataaatgcttgacaagaaaggaaaataatttaacagaagataatccaaatctttcaatggcacagagaagacataaaagagtaagaacatggactcgtcacataaacatttttaataaagattacatctttgtacctgtaaatgagtcgtctcactggtatctcgcagtcatttgttttccatggttagaagaagctgtgtatgaagattttccacaaactgtatcccagcagtcccaggctcagcagtcccaaaatgacaacaaaacaatagataatgatctacgtactacttcgacactgtctttgagtgcagaggattcccaaagtaccgagtcgaatatgtcagtaccaaagaaaatgtgtaaaaggccatgtattcttatactagactccttgaaagctgcttctgtacaaaacacagttcagaatttacgagagtatttagaggtagagtgggaagttaaactaaaaactcatcgtcaattcagcaaaacaaacatggtggatctatgccctaaagttcctaaacaggacaatagcagtgattgtggagtatatttattgcagtatgtggaaagcttcttcaaggatcctattgttaactttgaacttccaattcatttggagaagtggtttcctcgtcatgtaataaagaccaaacgggaagatattcgagagctcatcttgaaacttcatttacagcaacagaagggcagcagtagctagttaatctgtacaaacatgacacagatgttctctaagattactggaaagcctcttaccagcatttgtgttagccagctcacagagaagaaaataacttgcagtagttttataataagtcattggaacattatttaaaatatgtaggacacattattagaattgttgggatctcatagatggaatgggaatgggggtgatatagataaacttactagatataaattaaaattttataaatatttcatatttttctgagtaaatatgattggattatgcaacagcatatgtaatatgggaatgttttgtagataataaaacttacatgatctgtacttccacgtgactgggtgctgaggggagttaaagcctccctggtgccagccccagtgcttgtcaaatttgctgacaggtcacatcatattgtaattctattctttgcagctcaagcatgcagtatgaatactgtgtattttttaaaaaaataatttagtatcaaggcttcagaaaatgccatttacggcatcccttctgtatgtaacaaaaagacattcataatgttaggaagatgataaaaattcgctcttttaaagtgcagcttattattctcaattgctaaatacgattactctgctttttttttttcatttcttttgatgtcatatgtgagtatcttataatttagttcatttgttcagggtaaaatttgaaacaaaaaattttacctgtgcaaaatagttttttaaaaattatacatgtagctcaacttgaggtactgctatataaatattcactcacattatcacggaatttatgtatagtttctctaatatagaagataaaattggtgtcctcataactttaacaaagaaaaccctcagtcctatttattaatgggtagaattaaatatataattttatagctcagtttacccagtattcatctgcaaagccagattgctctcattgcttttatatttttaaattgtagcttttagagacctatgatcctcatggaacttaattttttattaaatattcaggtaacagttctgaattcatgtgataatggtggcattatatatgattaaacacttcagaactttctaatgttatcaggagtattttgagggagatatgattatattgtattttctcagataagaaaaatgttttttaacaatattattttaatctgttttaagcatctcttagatttacattataactacataaagcagtgaagcaaaggcaaattaagataaagctagaaagtctgaacattttatttcaaaatcatacgaatcggggtcagttaagcctcagtattcttagcttttgttgattttggcactatctttatattattaaatatatttgttgtttggatatttcatataaagatggctataattacatatttcattcccaatttgtgtgtgttggggggtacttttaaaggtgactattgttttgtacatctaattttgggaaagcaagtctataagacatcttgtgatttcttaatgtttttgtttgtatgtttttcaaagatatcactgtcctttatcatgttttgaagattgtttaaaattcattttcctaaattaatgtgcaagtaatgttttgaggatatcagtgttttatattaaacatatttccaattcattaaattgaggtgtaatttttttccttaagaaacatgagctactgttagaaataaatttccagttgtatgctg

SEQ ID NO: 187399 - DNA, 435 bp, Homo sapiens
  Payload ID: 16896
  Gene Symbol: SENP7
  Gene Name: SUMO1/sentrin specific peptidase 7
  ENST ID: ENST00000366089
  CDS Start-End: 1-152
agattcagacccaattagaacactctgtattaagccagcaatatggagtctcgctttgtcacccaggctggagtgcagtggcactatctctgctcaccgcaagctctgcctcccgggttcacgccattctcctgcctcagcctcctgagtagctgggactacaggtgcccgccaccgtgcccggctaattttttgtatttttagtagagacggggtttcatcgtgttagccaggatggtctcgatctcctgaccttgtgatccgcccgcctcagcctcccaaagtgctgggattacaggcgtgagccactgcgcctggccctaattttgtttcttaattttaggatagattatttaattcacataatttctccttatagttgtattcaaccaattgaaattctcatctaaaataaaaagaatagcttaaaaaatc

SEQ ID NO: 187400 - DNA, 5717 bp, Homo sapiens
  Payload ID: 16897
  Gene Symbol: SENP2
  Gene Name: SUMO1/sentrin/SMT3 specific peptidase 2
  Uniprot ID: Q9HC62
  ENST ID: ENST00000296257
  CDS Start-End: 241-2010
gtgcgcagattgagaatggagctttccggtcgggcgggaggaggtgacgtcaggagtggtggcgggcgggggcctctggtagccctggggacgctgtatctgtgggctcttgaatcgcgtcacaaatcagcgaccgaactctggcggtggtggttaagacggcgaaggcggcagcggcggcgacagctctggggtttgcgtctcggggtgtgtcggccgccgctgctgcttgggcctggtatgtacagatggctggttaggattctcggcaccattttccgtttctgcgaccggtcggtgccccctgcccgggccctcctgaagaggcggcgctcagacagcactctgttttctacagtggacactgatgaaataccagccaaaagaccaagattagattgctttattcaccaagtgaaaaacagtctctacaatgctgccagcttatttggattcccattccagctgaccacaaagcccatggtaacttctgcttgtaatggaacacggaatgtggccccttcaggagaggtattttcgaactcttcatcttgtgaactgacaggttctggatcctggaacaacatgctgaaactgggtaataaatctcctaatggaataagtgactatccaaagatcagagtgacagttacccgagatcagccacgcagagtcctgccttcctttggttttactttgaactcagaaggctgtaatagaagaccaggtggccgtcgccatagcaaaggtaatccagagagttctttaatgtggaaacctcaggaacaggctgtaacagagatgatttctgaagagagtggcaagggtctgaggcgtccccattgtactgtggaggagggtgttcaaaaagaggaaagagagaagtaccgaaagttattggaacgacttaaagaaagtggtcatggaaactctgtctgtcctgtaacttcaaattatcacagttctcaaagaagtcagatggacacattaaagaccaaaggctggggggaagagcaaaatcacggagtcaaaacaactcagtttgttccaaaacaatatagacttgttgaaacaaggggacctctatgttcattgagaagtgaaaagaggtgttcaaaggggaaaattactgatacagagacgatggtcggaatcagatttgaaaatgaaagtaggaggggataccaactggagcctgacctatcagaagaagtgtcggcccgactccgcctgggcagtggaagcaatggcttactcaggaggaaagtgtcaataattgagacaaaggaaaagaattgctcaggcaaagagagggacagaagaacggacgatctccttgaacttacagaggacatggaaaaggaaatcagtaatgccctaggccatggcccacaggatgaaatcctaagtagtgctttcaaattgcgaattactcgaggagatattcagacattaaagaactatcactggctcaatgatgaagtcattaatttttacatgaatcttctggtggaaagaaataaaaagcaaggctatccagcacttcatgtattcagtactttcttctatcctaaattaaagtctgggggttaccaagcagtgaaacgatggaccaaaggggtaaatctctttgaacaagaaattattctggtgcctattcatcggaaggtacattggagcctggtggtgattgacctaagaaaaaagtgtcttaaatatctggattctatgggacaaaagggccacaggatctgtgagattctccttcagtatttacaggatgaaagtaagaccaaaagaaatagtgatctgaatcttttagagtggacccatcacagcatgaaaccacacgagattcctcaacagctgaatgggagtgattgtggaatgtttacttgtaaatatgcagattatatttctagggacaaacctatcacatttactcagcaccagatgcctctcttccggaagaagatggtgtgggaaatccttcatcagcagttgctgtgagaaaactttgcctggtccctctagctgctggtggttctttcacagacatttccatatacctcatgcattgtgggttaaaaagtccctgcatcacttctgttctcacaggtactgagctgtcaaaagtgcatgaaggcctctcactgtactctagtcctgacttggggtgcagagggctgcttgcaatcctgtttgtaaggctgtgcctgctcagagctttggactgttcaacccacacaagaacaaacgctaactaatattttttttaagagattcttttccctatgaatgtgggaaatgcaggatttattctgtgaattgtttgtttctgtgtgtttgttcagcgtattcattcactcactcgtttgcaaacataatgggcagtggtcatttactgctgctcttttacagttagctctaaattacttgtttgaactatttatttctgaaaggaatgttactcaagctgccactccctgctgaagagcaggagggaactctcactgggggcggaaggaagtggagctggagcagtaactgccaacatgaagctggagggtttgggattttttttgtttttgtttttttgaggctcaaaaaatgctgggagaaatgaaaatgctgtgggatagggctcctgttgcctttcagaggaagtctgacactacagcgttggcacagtgccgtgaacagtggaactgtgcccaagggactctgattatccaagcatcttccgaagagtgttgtggtcaccttaaagagacttccccttctggaaatgtggtgacttggcttagtcttcaaactggattcatggatttgaagtaactgtaaaccctaaatcttcattttcatcccagatctggttgagtataaacctcagaattgtaggggctggcctgagctgtttatttcaaaagatactattcaatttaaagctatttttcctcagagtttttgttttctatatattaagtctaaattaagttttctactcattaagactaacatctccccactccatccccactgaaatttgtggaagaaaatttagtacttggctctgaggttgccagttatacaataatctattttgcatatgaaagtttgtatttaacttttttgttcattaaaaaccttactgatatggttataacttcagacagtttagagttggtcagaacatattttgcaagatctagtgcctagtgttgcttttctgatgtaataaaaggtggtctggcagaacctaaaaaagtatatgctgaaatgatttctaaccctctccctacttaaacctcccagacttgttctggttcataaaagcaagaggtaaaactggaaaaattgtgcacgtgttacctatgaatctacacgcctgccatttgcagtgctccggctgctggtcccagaggtatactggttacagctattgcagccagttccctgagacttgtaaaactcctggtttaggacatggggcctgtggtgtggatggaaaatgctgggcctactggatggtcagccagaggccatgtggtgggtgatgactgaagcgggagcaggttgtaccacacctctcccccccccctcccactccccctccctccctctcccctccccctccctccctcccccctccctccctcccccccctccccctccctccccctccctctctccctaacacccaccctccccctttcccccaccctccccccttctcccctttccccaccctccctccccccttccccctcccccccccccccccgcagcccctgctcctttctctgggctcctggcattgtgccagtgagtgctgggaccaggtaatgagcacagccaaaaaggccagaggttcactaggtcagcatcataccaaacgcctggctttcaccaggcatcagtgtgcttcacttgagagtttggtaccatggttaagatcgagtccatgctaggtaagtcctgttaggaatgtcagtttgtattccgcccacgtgaatgatgctgagcttaatgtattattttgaggggcttcttcagagcagttctcactgagctttccattaacctacactcttccggacggctcttaaaacttgcaggacataatgaaattgggaagagcagagtgttgaagtctatagcatggccttctgcttgaccctgagttcctgaattgaatgtgggagaccacaggccatacttctctaggcactcacatgtctcccttggcataaggaaacatgttagtaatatagttttttagatccaaacagtttatttggatctaaaagtttaagtgttcagttgaaaaacagctattgattttattagtagcaaattatcaccattaaagccagtggttttttttttgttttttttttttgttttttttttttttttttgcgacagagtctcttgtcgcccaggctggagtacaatggtgtgatctcagctcactgcaacctccgcctcccaggttcaagcgattctcctgcctcagcctcctgcgtagctgggattacaggtgcccaccaccacaccctgctaatttttgtacttttagtagagatggggtttcgccatgttggccaggctggtcttgaactgctgacctcaggtgatccacccgcctcggcctcccaaagtgctggtattacagtcatgagccacctcacccagcctgtttttgagacggagtttcacttttgtcgcccaggctggagtgcaatggcgctatctcagctcactgcaacccccacctcccaggttcaagcgattctcctgcctcagcctcccgagtagctgggattacaggcatgtgccaccacccctggctaattttgtatttttagtggagacggggtttctccatgttggtcaggctggtcttaaactcccgacctcaagtgatctgcccgcctcggcctcccaaagtgctgggattacaggcgtgagccattgcacctgtccctgccagtgtgtttttaaaatagtttagggggttgagaaaagatgcagtgagccattattctcctttagcaggtagtctcttaaaaattgatgtggattttaaaaatataccattgagaacacgtatctttctcaaacttgaccttgaacagagctggatgggggtgggagggaaacagatttggggcatatggaagatattcttgggagccccatattctacctcagttaccgaaggctattagaacctctgaatttttcctcctctgaaatcctaagcacaacttcagaaaaccatgtctgatagcggatgtcttcctgctgtgaggagctgcttgatgtggggaccaaggtgtgggtgtgggcggaatgtatcctagtagaaacagtgaacctcagatatgaataaataagcaagagaccgaaagttaagtgtgtgacaacctcagtactgtagttaagctacattctttaaattagcttttgtgaactgattgggaacctaatctcttttgtaactgtttgagaaaaactctgaagcacctgatattcaaacaaacttatggtacttactaactcatttgtaaattggcgatgtagctggctgtagtattgctttgataatttttttcttttaatttacctaatatatataaggaaggggtttggatatattaaaataggtgttaattttatctatttaccaataaattcatctctttaattca

SEQ ID NO: 187401 - DNA, 2383 bp, Homo sapiens
  Payload ID: 16897
  Gene Symbol: SENP2
  Gene Name: SUMO1/sentrin/SMT3 specific peptidase 2
  ENST ID: ENST00000413407
  CDS Start-End: 120-434
acaaatcagcgaccgaactctggcggtggtggttaagacggcgaaggcggcagcggcggcgacagctctggggtttgcgtctcggggtgtgtcggccgccgctgctgcttgggcctggtatgtacagatggctggttaggattctcggcaccattttccgtttctgcgaccggtcggtgccccctgcccgggccctcctgaagaggcggcgctcagacagcactctgttttctacagtggacactgatgaaataccagccaaaagaccaagattagattgctttattcaccaagtgaaaaacagtctctacaatgctgccagcttatttggattcccattccagctgaccacaaagcccatggtaacttctgcttgtaatggaacacggaatgtggccccttcaggagaggtaataaatctcctaatggaataagtgactatccaaagatcagagtgacagttacccgagatcagccacgcagagtcctgccttcctttggttttactttgaactcagaaggctgtaatagaagaccaggtggccgtcgccatagcaaaggtaatccagagagttctttaatgtggaaacctcaggaacaggctgtaacagagatgatttctgaagagagtggcaagggtctgaggcgtccccattgtactgtggaggagggtgttcaaaaagaggaaagagagaagtaccgaaagttattggaacgacttaaagaaagtggtcatggaaactctgtctgtcctgtaacttcaaattatcacagttctcaaagaagtcagatggacacattaaagaccaaaggctggggggaagagcaaaatcacggagtcaaaacaactcagtttgttccaaaacaatatagacttgttgaaacaaggggacctctatgttcattgagaagtgaaaagaggtgttcaaaggggaaaattactgatacagagacgatggtcggaatcagatttgaaaatgaaagtaggaggggataccaactggagcctgacctatcagaagaagtgtcggcccgactccgcctgggcagtggaagcaatggcttactcaggaggaaagtgtcaataattgagacaaaggaaaagaattgctcaggcaaagagagggacagaagaacggacgatctccttgaacttacagaggacatggaaaaggaaatcagtaatgccctaggccatggcccacaggatgaaatcctaagtagtgctttcaaattgcgaattactcgaggagatattcagacattaaagaactatcactggctcaatgatgaagtcattaatttttacatgaatcttctggtggaaagaaataaaaagcaaggctatccagcacttcatgtattcagtactttcttctatcctaaattaaagtctgggggttaccaagcagtgaaacgatggaccaaaggggtaaatctctttgaacaagaaattattctggtgcctattcatcggaaggtacattggagcctggtggtgattgacctaagaaaaaagtgtcttaaatatctggattctatgggacaaaagggccacaggatctgtgagattctccttcagtatttacaggatgaaagtaagaccaaaagaaatagtgatctgaatcttttagagtggacccatcacagcatgaaaccacacgagattcctcaacagctgaatgggagtgattgtggaatgtttacttgtaaatatgcagattatatttctagggacaaacctatcacatttactcagcaccagatgcctctcttccggaagaagatggtgtgggaaatccttcatcagcagttgctgtgagaaaactttgcctggtccctctagctgctggtggttctttcacagacatttccatatacctcatgcattgtgggttaaaaagtccctgcatcacttctgttctcacaggtactgagctgtcaaaagtgcatgaaggcctctcactgtactctagtcctgacttggggtgcagagggctgcttgcaatcctgtttgtaaggctgtgcctgctcagagctttggactgttcaacccacacaagaacaaacgctaactaatattttttttaagagattcttttccctatgaatgtgggaaatgcaggatttattctgtgaattgtttgtttctgtgtgtttgttcagcgtattcattcactcactcgtttgcaaacataatgggcagtggtcatttactgctgctcttttacagttagctctaaattacttgtttgaactatttatttctgaaaggaatgttactcaagctgccactccctgctgaagagcaggagggaactctcactgggggcggaaggaagtggagctggagcagtaactgccaacatgaagctggagggtt

SEQ ID NO: 187402 - DNA, 596 bp, Homo sapiens
  Payload ID: 16897
  Gene Symbol: SENP2
  Gene Name: SUMO1/sentrin/SMT3 specific peptidase 2
  ENST ID: ENST00000439684
  CDS Start-End: 120-302
acaaatcagcgaccgaactctggcggtggtggttaagacggcgaaggcggcagcggcggcgacagctctggggtttgcgtctcggggtgtgtcggccgccgctgctgcttgggcctggtatgtacagatggctggttaggattctcggcaccattttccgtttctgcgaccggtcggtgccccctgcccgggccctcctgaagaggcggcgctcagacagcactctgttttctacagtggacactgatgaaataccagccaaaagaccaagattaggtattttcgaactcttcatcttgtgaactgacaggttctggatcctggaacaacatgctgaaactgggtaataaatctcctaatggaataagtgactatccaaagatcagagtgacagttacccgagatcagccacgcagagtcctgccttcctttggttttactttgaactcagaaggctgtaatagaagaccaggtggccgtcgccatagcaaaggtaatccagagagttctttaatgtggaaacctcaggaacaggctgtaacagagatgatttctgaagagagtggcaagggtctgaggcgtccccattgtactgt

SEQ ID NO: 187403 - DNA, 829 bp, Homo sapiens
  Payload ID: 16897
  Gene Symbol: SENP2
  Gene Name: SUMO1/sentrin/SMT3 specific peptidase 2
  ENST ID: ENST00000453532
  CDS Start-End: 174-491
gggggcctctggtagccctggggacgctgtatctgtgggctcttgaatcgcgtcacaaatcagcgaccgaactctggcggtggtggttaagacggcgaaggcggcagcggcggcgacagctctggggtttgcgtctcggggtgtgtcggccgccgctgctgcttgggcctggtatgtacagatggctggttaggattctcggcaccattttccgtttctgcgaccggtcggtgccccctgcccgggccctcctgaagaggcggcgctcagacagcactctgttttctacagtggacactgatgaaataccagccaaaagaccaagattagattgctttattcaccaagtgaaaaacagtctctacaatgctgccagcttatttggattcccattccagctgaccacaaagcccatggtaacttctgcttgtaatggaacacggaatgtggccccttcaggagaggttctggatcctggaacaacatgctgaaactgggtaataaatctcctaatggaataagtgactatccaaagatcagagtgacagttacccgagatcagccacgcagagtcctgccttcctttggttttactttgaactcagaaggctgtaatagaagaccaggtggccgtcgccatagcaaaggtaatccagagagttctttaatgtggaaacctcaggaacaggctgtaacagagatgatttctgaagagagtggcaagggtctgaggcgtccccattgtactgtggaggagggtgttcaaaaagaggaaagagagaagtaccgaaagttattggaacgacttaaagaaagtggtcatggaaac

SEQ ID NO: 187404 - DNA, 878 bp, Homo sapiens
  Payload ID: 16897
  Gene Symbol: SENP2
  Gene Name: SUMO1/sentrin/SMT3 specific peptidase 2
  ENST ID: ENST00000430355
  CDS Start-End: 60-878
ataaggatcttcttggagaactggggcatctgattggaacacctgcgaaagcttaagcgatgaggttgtgcccctcttgcagtacaaggctgcaaattatccaagccaagggcagaaatctcaatgtccttgttactccatatggccttgggattctcccatggccctccagtaaagcgctgctaggtcccggaaaggctgtggcagtggtggggttggggttaaggataatcccactccttggccagtggatggacagtcacccatgtctctactgtggaccacaggacagcgaaggcaccaactggcagacaagtcccagcactctgttttctacagtggacactgatgaaataccagccaaaagaccaagattagattgctttattcaccaagtgaaaaacagtctctacaatgctgccagcttatttggattcccattccagctgaccacaaagcccatggtaacttctgcttgtaatggaacacggaatgtggccccttcaggagaggtattttcgaactcttcatcttgtgaactgacaggttctggatcctggaacaacatgctgaaactgggtaataaatctcctaatggaataagtgactatccaaagatcagagtgacagttacccgagatcagccacgcagagtcctgccttcctttggttttactttgaactcagaaggctgtaatagaagaccaggtggccgtcgccatagcaaaggtaatccagagagttctttaatgtggaaacctcaggaacaggctgtaacagagatgatttctgaagagagtggcaagggtctgaggcgtccccattgtactgtggaggagggtgttcaaaaagaggaaagagagaagtaccgaaagtta

SEQ ID NO: 187405 - DNA, 610 bp, Homo sapiens
  Payload ID: 16897
  Gene Symbol: SENP2
  Gene Name: SUMO1/sentrin/SMT3 specific peptidase 2
  ENST ID: ENST00000444509
  CDS Start-End: 1-610
gggaaaattactgatacagagacgatggtcggaatcagatttgaaaatgaaagtaggaggggataccaactggagcctgacctatcagaagaagtgtcggcccgactccgcctgggcagtggaagcaatggcttactcaggaggaaagtgtcaataattgagacaaaggaaaagaattgctcaggcaaagagagggacagaagaacggacgatctccttgaacttacagaggtcattaatttttacatgaatcttctggtggaaagaaataaaaagcaaggctatccagcacttcatgtattcagtactttcttctatcctaaattaaagtctgggggttaccaagcagtgaaacgatggaccaaaggggtaaatctctttgaacaagaaattattctggtgcctattcatcggaaggtacattggagcctggtggtgattgacctaagaaaaaagtgtcttaaatatctggattctatgggacaaaagggccacaggatctgtgagattctccttcagtatttacaggatgaaagtaagaccaaaagaaatagtgatctgaatcttttagagtggacccatcacagcatgaaaccacacgagattcctc

SEQ ID NO: 187406 - DNA, 553 bp, Homo sapiens
  Payload ID: 16897
  Gene Symbol: SENP2
  Gene Name: SUMO1/sentrin/SMT3 specific peptidase 2
  ENST ID: ENST00000458551
  CDS Start-End: 117-281
aatcagcgaccgaactctggcggtggtggttaagacggcgaaggcggcagcggcggcgacagctctggggtttgcgtctcggggtgtgtcggccgccgctgctgcttgggcctggtatgtacagatggctggttaggattctcggcaccattttccgtttctgcgaccggtcggtgccccctgcccgggccctcctgaagaggcggcgctcagacagcactctgttttctacagtggacactgatgaaataccagccaaaagaccaagattagtttgttgacactttctagattgctttattcaccaagtgaaaaacagtctctacaatgctgccagcttatttggattcccattccagctgaccacaaagcccatggtaacttctgcttgtaatggaacacggaatgtggccccttcaggagaggtattttcgaactcttcatcttgtgaactgacaggttctggatcctggaacaacatgctgaaactgggtaataaatctcctaatggaataagtgactatccaaagatcagagtgacagttacccgaga

SEQ ID NO: 187407 - DNA, 2611 bp, Homo sapiens
  Payload ID: 16898
  Gene Symbol: SENP3
  Gene Name: SUMO1/sentrin/SMT3 specific peptidase 3
  Uniprot ID: Q9H4L4
  ENST ID: ENST00000321337
  CDS Start-End: 401-2125
cgggaccgcgcgcttggtggccgcgccggcgctcttcgccgggtgtgacgtactaatcgtgcgccaccgctgccggtgggcccggggctcgcgggaggggaaggaggagggggggaggagtggcggcggcggcggtggcgctggtggcggcggtggcggaggtggaggtggaggtggaagctgaagctgaagcagagccagaggcggcgcggcggggtgctcggcggcgcggcacgcggcccagaagcgttggaatcctgaattgagacggctgcgcctaaagacagcaggagtggcggggccgccgccgtcgccggagagatgagccgggaagcttgaggccggagacgcccgccttcgggcccgtccgcccggcttccccgctcccgggtactggaagatgaaagagactatacaagggaccgggtcctgggggcctgagcctcctggacccggcatacccccagcttactcaagtcccaggcgggagcgtcttcgttggcccccacctcccaaaccccgactcaagtcaggtggagggtttgggccagatcctgggtcagggaccacagtgccagccagacgcctccctgtcccccgaccctcttttgatgcctcagcaagtgaagaggaggaagaagaggaggaggaggaggatgaagatgaagaggaggaagtggcagcttggaggctgcccccaagatggagtcagctgggaacctcccagcggccccgcccttcccgccccactcatcgaaaaacctgctcacagcgccgccgccgagccatgagagccttccggatgctgctctactcaaaaagcacctcgctgacattccactggaagctttgggggcgccaccggggccggcggcggggcctcgcacaccccaagaaccatctttcaccccagcaagggggtgcgacgccacaggtgccatccccctgttgtcgttttgactccccccgggggccacctccaccccggctgggtctgctaggtgctctcatggctgaggatggggtgagagggtctccaccagtgccctctgggccccccatggaggaagatggactcaggtggactccaaagtctcctctggaccctgactcgggcctcctttcatgtactctgcccaacggttttgggggacaatctgggccagaaggggagcgcagcttggcaccccctgatgccagcatcctcatcagcaatgtgtgcagcatcggggaccatgtggcccaggagctttttcagggctcagatttgggcatggcagaagaggcagagaggcctggggagaaagccggccagcacagccccctgcgagaggagcatgtgacctgcgtacagagcatcttggacgaattccttcaaacgtatggcagcctcatacccctcagcactgatgaggtagtagagaagctggaggacattttccagcaggagttttccaccccttccaggaagggcctggtgttgcagctgatccagtcttaccagcggatgccaggcaatgccatggtgaggggcttccgagtggcttataagcggcacgtgctgaccatggatgacttggggaccttgtatggacagaactggctcaatgaccaggtgatgaacatgtatggagacctggtcatggacacagtccctgaaaaggtgcatttcttcaatagtttcttctatgataaactccgtaccaagggttatgatggggtgaaaaggtggaccaaaaacgtggacatcttcaataaggagctactgctaatccccatccacctggaggtgcattggtccctcatctctgttgatgtgaggcgacgcaccatcacctattttgactcgcagcgtaccctaaaccgccgctgccctaagcatattgccaagtatctacaggcagaggcggtaaagaaagaccgactggatttccaccagggctggaaaggttacttcaaaatgaatgtggccaggcagaataatgacagtgactgtggtgcttttgtgttgcagtactgcaagcatctggccctgtctcagccattcagcttcacccagcaggacatgcccaaacttcgtcggcagatctacaaggagctgtgtcactgcaaactcactgtgtgagcctcgtaccccagaccccaagcccataaatgggaagggagacatgggagtcccttcccaagaaactccagttcctttcctctcttgcctcttcccactcacttccctttggtttttcatatttaaatgtttcaatttctgtatttttttttctttgagagaatacttgttgatttctgatgtgcagggggtggctacagaaaagcccctttcttcctctgtttgcaggggagtgtggccctgtggcctgggtggagcagtcatcctcccccttccccgtgcagggagcaggaaatcagtgctgggggtggtgggcggacaataggatcactgcctgccagatcttcaaacttttatatatatatatatatatatatatatatatatatatatatatatatatatatatatatatatatatatataaaaatatataaatgccacggtcctgctctggtcaataaaggatcctttgttgatacgtaa

SEQ ID NO: 187408 - DNA, 2222 bp, Homo sapiens
  Payload ID: 16898
  Gene Symbol: SENP3
  Gene Name: SUMO1/sentrin/SMT3 specific peptidase 3
  Uniprot ID: Q9H4L4
  ENST ID: ENST00000429205
  CDS Start-End: 50-1774
ccgccttcgggcccgtccgcccggcttccccgctcccgggtactggaagatgaaagagactatacaagggaccgggtcctgggggcctgagcctcctggacccggcatacccccagcttactcaagtcccaggcgggagcgtcttcgttggcccccacctcccaaaccccgactcaagtcaggtggagggtttgggccagatcctgggtcagggaccacagtgccagccagacgcctccctgtcccccgaccctcttttgatgcctcagcaagtgaagaggaggaagaagaggaggaggaggaggatgaagatgaagaggaggaagtggcagcttggaggctgcccccaagatggagtcagctgggaacctcccagcggccccgcccttcccgccccactcatcgaaaaacctgctcacagcgccgccgccgagccatgagagccttccggatgctgctctactcaaaaagcacctcgctgacattccactggaagctttgggggcgccaccggggccggcggcggggcctcgcacaccccaagaaccatctttcaccccagcaagggggtgcgacgccacaggtgccatccccctgttgtcgttttgactccccccgggggccacctccaccccggctgggtctgctaggtgctctcatggctgaggatggggtgagagggtctccaccagtgccctctgggccccccatggaggaagatggactcaggtggactccaaagtctcctctggaccctgactcgggcctcctttcatgtactctgcccaacggttttgggggacaatctgggccagaaggggagcgcagcttggcaccccctgatgccagcatcctcatcagcaatgtgtgcagcatcggggaccatgtggcccaggagctttttcagggctcagatttgggcatggcagaagaggcagagaggcctggggagaaagccggccagcacagccccctgcgagaggagcatgtgacctgcgtacagagcatcttggacgaattccttcaaacgtatggcagcctcatacccctcagcactgatgaggtagtagagaagctggaggacattttccagcaggagttttccaccccttccaggaagggcctggtgttgcagctgatccagtcttaccagcggatgccaggcaatgccatggtgaggggcttccgagtggcttataagcggcacgtgctgaccatggatgacttggggaccttgtatggacagaactggctcaatgaccaggtgatgaacatgtatggagacctggtcatggacacagtccctgaaaaggtgcatttcttcaatagtttcttctatgataaactccgtaccaagggttatgatggggtgaaaaggtggaccaaaaacgtggacatcttcaataaggagctactgctaatccccatccacctggaggtgcattggtccctcatctctgttgatgtgaggcgacgcaccatcacctattttgactcgcagcgtaccctaaaccgccgctgccctaagcatattgccaagtatctacaggcagaggcggtaaagaaagaccgactggatttccaccagggctggaaaggttacttcaaaatgaatgtggccaggcagaataatgacagtgactgtggtgcttttgtgttgcagtactgcaagcatctggccctgtctcagccattcagcttcacccagcaggacatgcccaaacttcgtcggcagatctacaaggagctgtgtcactgcaaactcactgtgtgagcctcgtaccccagaccccaagcccataaatgggaagggagacatgggagtcccttcccaagaaactccagttcctttcctctcttgcctcttcccactcacttccctttggtttttcatatttaaatgtttcaatttctgtatttttttttctttgagagaatacttgttgatttctgatgtgcagggggtggctacagaaaagcccctttcttcctctgtttgcaggggagtgtggccctgtggcctgggtggagcagtcatcctcccccttccccgtgcagggagcaggaaatcagtgctgggggtggtgggcggacaataggatcactgcctgccagatcttcaaacttttatatatatatatatatatatatatatatatataaaaatatataaatgccacggtcctgctctggtcaataaaggatcctttgttgatacgtaa

SEQ ID NO: 187409 - DNA, 493 bp, Homo sapiens
  Payload ID: 16898
  Gene Symbol: SENP3
  Gene Name: SUMO1/sentrin/SMT3 specific peptidase 3
  ENST ID: ENST00000581093
  CDS Start-End: 1-249
gtggacatcttcaataaggagctactgctaatccccatccacctggaggtgcattggtccctcatctctgttgatgtgaggcgacgcaccatcacctattttgactcgcagcgtaccctaaaccgccgctgccctaagtactgcaagcatctggccctgtctcagccattcagcttcacccagcaggacatgcccaaacttcgtcggcagatctacaaggagctgtgtcactgcaaactcactgtgtgagcctcgtaccccagaccccaagcccataaatgggaagggagacatgggagtcccttcccaagaaactccagttcctttcctctcttgcctcttcccactcacttccctttggtttttcatatttaaatgtttcaatttctgtatttttttttctttgagagaatacttgttgatttctgatgtgcagggggtggctacagaaaagcccctttcttcctctgtttgcaggggagtgtggccctgt

SEQ ID NO: 187410 - DNA, 901 bp, Homo sapiens
  Payload ID: 16898
  Gene Symbol: SENP3
  Gene Name: SUMO1/sentrin/SMT3 specific peptidase 3
  ENST ID: ENST00000580231
  CDS Start-End: 1-714
gagcatgtgacctgcgtacagagcatcttggacgaattccttcaaacgtatggcagcctcatacccctcagcactgatgaggtagtagagaagctggaggacattttccagcaggagttttccaccccttccaggaagggcctggtgttgcagctgatccagtcttaccagcggatgccaggcaatgccatggtgaggggcttccgagtggcttataagcggcacgtgctgaccatggatgacttggggaccttgtatggacagaactggctcaatgaccaggtgatgaacatgtatggagacctggtcatggacacagtccctgaaaaggtggacatcttcaataaggagctactgctaatccccatccacctggaggtgcattggtccctcatctctgttgatgtgaggcgacgcaccatcacctattttgactcgcagcgtaccctaaaccgccgctgccctaagcatattgccaagtatctacaggcagaggcggtaaagaaagaccgactggatttccaccagggctggaaaggttacttcaaaatgaatgtggccaggcagaataatgacagtgactgtggtgcttttgtgttgcagtactgcaagcatctggccctgtctcagccattcagcttcacccagcaggacatgcccaaacttcgtcggcagatctacaaggagctgtgtcactgcaaactcactgtgtgagcctcgtaccccagaccccaagcccataaatgggaagggagacatgggagtcccttcccaagaaactccagttcctttcctctcttgcctcttcccactcacttccctttggtttttcatatttaaatgtttcaatttctgtatttttttttctttgagagaatacttgttgatttctgatgtgcag

SEQ ID NO: 187411 - DNA, 536 bp, Homo sapiens
  Payload ID: 16898
  Gene Symbol: SENP3
  Gene Name: SUMO1/sentrin/SMT3 specific peptidase 3
  ENST ID: ENST00000582789
  CDS Start-End: 1-333
gtggacatcttcaataaggagctactgctaatccccatccacctggaggtgcattggtccctcatctctgttgatgtgaggcgacgcaccatcacctattttgactcgcagcgtaccctaaaccgccgctgccctaagcatattgccaagtatctacaggcagaggcggtaaagaaagaccgactggatttccaccagggctggaaaggttacttcaaaatgtactgcaagcatctggccctgtctcagccattcagcttcacccagcaggacatgcccaaacttcgtcggcagatctacaaggagctgtgtcactgcaaactcactgtgtgagcctcgtaccccagaccccaagcccataaatgggaagggagacatgggagtcccttcccaagaaactccagttcctttcctctcttgcctcttcccactcacttccctttggtttttcatatttaaatgtttcaatttctgtatttttttttctttgagagaatacttgttgatttctgatgtgcagggggtggctacagaaa

SEQ ID NO: 187412 - DNA, 606 bp, Homo sapiens
  Payload ID: 16898
  Gene Symbol: SENP3
  Gene Name: SUMO1/sentrin/SMT3 specific peptidase 3
  ENST ID: ENST00000610454
  CDS Start-End: 1-534
ttctatgataaactccgtaccaagggttatgatggggtgaaaaggtggaccaaaaacgtggacatcttcaataaggagctactgctaatccccatccacctggaggtgcattggtccctcatctctgttgatgtgaggcgacgcaccatcacctattttgactcgcagcgtaccctaaaccgccgctgccctaagcatattgccaagtatctacaggcagaggcggtaaagaaagaccgactggatttccaccagggctggaaaggttacttcaaaatgaatgtggccaggcagaataatgacagtgactgtggtgcttttgtgttgcagtactgcaagcatctggccctgtctcagccattcagcttcacccagcaggacatgcccaaacttcgtcggcagatctacaaggagctgtgtcactgcaaactcactgtgggagtgtggccctgtggcctgggtggagcagtcatcctcccccttccccgtgcagggagcaggaaatcagtgctgggggtggtgggcggacaataggatcactgcctgccagatcttcaaacttttatatatatatatatatatatatatatatatatatatatatat

SEQ ID NO: 187413 - DNA, 634 bp, Homo sapiens
  Payload ID: 16898
  Gene Symbol: SENP3
  Gene Name: SUMO1/sentrin/SMT3 specific peptidase 3
  ENST ID: ENST00000619785
  CDS Start-End: 1-190
ccagtcttaccagcggatgccaggcaatgccatggtgaggggcttccgagtggcttataagcggcacgtgctgaccatggatgacttggggaccttgtatggacagaactggctcaatgaccagctgcctcccatcttctccccaggtgatgaacatgtatggagacctggtcatggacacagtccctgaaaaggtgcatttcttcaatagtttcttctatgataaactccgtaccaagggttatgatggggtgaaaaggtggaccaaaaacgtggacatcttcaataaggagctactgctaatccccatccacctggaggtgcattggtccctcatctctgttgatgtgaggcgacgcaccatcacctattttgactcgcagcgtaccctaaaccgccgctgccctaagcatattgccaagtatctacaggcagaggcggtaaagaaagaccgactggatttccaccagggctggaaaggttacttcaaaatgaatgtggccaggcagaataatgacagtgactgtggtgcttttgtgttgcagtactgcaagcatctggccctgtctcagccattcagcttcacccagcaggacatgcccaaacttcgtcggcagatctacaaggagctgtg

SEQ ID NO: 187414 - DNA, 1891 bp, Homo sapiens
  Payload ID: 16899
  Gene Symbol: SIMC1
  Gene Name: SUMO-interacting motifs containing 1
  Uniprot ID: Q8NDZ2
  ENST ID: ENST00000332772
  CDS Start-End: 346-1347
ggatcatttcacctgtaacagaatacccaactcaggcttggcccaacagtcaagttgagccaagccaacagacttggctcaatcagctcgcatgactggaagttcatcagtagagtggacatcatggcggtttgatctagcagcacaggagtcattaaagaaccagtttctctttctctgttttgccatctgtagttttgggtatatcctgaggttgataggttcagtgagagggagagattgacttcccatggctgcctcttaaatcaaatgatctacaatcctagagattccagtagatatctgattgcagcttaggtgttagaaaattataattatctgcagatgcctagatcctttgaacaagtaataatacttaaaaaatggtttctgaaaccttataagggacaaactctgcctgggcgagtccttttcctgcgttatgtcgttcagaccctagaagatgactttcagcagaccctgaggaggcaacggcagcacctgcagcaatccattgcaaacatggtgctttcctgtgacaagcagccccacaatgtcagggatgttatcaagtggctggtcaaagcagtaactgaagatggattgactcagcccccaaatggaaatcaaacgtcttcaggaacaggaatcttgaaagccagcagtagccacccttcttcccagcccaacctgacaaagaacaccaatcagctgattgtgtgccagcttcagaggatgctctccatagccgtagaggtggacaggacccccacctgcagctccaataaaattgccgagatgatgtttgggtttgtgctggacattcctgagaggagccagagagaaatgttctttactaccatggaaagccaccttctgcgctgcaaagtgttagaaatcatattcctccacagctgtgagacacccacccgcctgcctctgtctctggcccaggccctctactttctgaataattctacgtcactgctcaagtgtcagtcagataaaagccagtggcagacttgggacgaattggttgagcatctgcagtttctgctgtccagttatcaacatgttttaagagaacacttaaggagttccgtgatcgaccgaaaggacttaataatcaaaaggattaagcccaaaccccagcaaggagatgacatcacagtggtagacgtagagaagcagattgaggccttccgcagccgcctgatccagatgctgggggagcctcttgtcccccaactccaagacaaagtgcacttgttgaagctcctgctcttctatgctgcggacttgaaccctgatgcagagccctttcaaaagggctggagcggctcctgagggcctgccaagcactgaatgccaagaatacctcctgaactctctctccaactgctcagaagctctaaaagcatgaaaagtggttaaaatcttacaggaccaaacctgcattatttaatcagtaggttgtaatttctaactctagtaaatatctttttttaaataatcctatcctagcctgttctcaaatatggcttaaatatacaaggtatatatattttttaataaattatttatctatacttttttgaaacaggttaatactctgtgcatcacatgtttaacattttcattcaagatgtggaaaaaatccctctgctgaacctagtctatacaccaatattatgtcattcaaggtaccgacaacctgtttcaggagagagacgttcatttttccctaatgaaatgcaagcattctgttagacctattatattgcctgttaatttgactgtaatgaatagggggtagaaacaaaaggatcaagtgtgttataaaacatttgatgttaaaaggagacaataaaaaggcaatggtttttcaaaa

SEQ ID NO: 187415 - DNA, 2056 bp, Homo sapiens
  Payload ID: 16899
  Gene Symbol: SIMC1
  Gene Name: SUMO-interacting motifs containing 1
  Uniprot ID: Q8NDZ2
  ENST ID: ENST00000341199
  CDS Start-End: 143-1516
gctcggggcggggccggcgtggcggtggcccgggttgtagccgccgccgctgccgccgccccgccgccgccacctcagaagcaggaaccgaagtcgtcgccgccgccgccactgcctgggtcttcggtcggggcccgcagccatggaggatttcatcgtgatctcggacgacagcggctctgagagctccgggggcgcccgcccgggccggtcgcggaggccgcgccgggccctgtcgcgaacctccggcgcgctgccccgccggaccgtgaacaagggtcaaaaattagaacccatccctcatcgaagactaagaatggtaacaaataccattgaagagaattttcctctggggactgtgcagtttttgatggactttgtgtcaccccagcattacccaccaagagaaatcgtggctcacatcatccagaaaatcttgctcagtggctctgagactgtggatgtcctaaaggaggcctacatgcttctcatgaaaattcaacagctacatccagccaatgccaagacagtggagtgggactggaaactgctcacctatgtcatggaggaagagggacaaactctgcctgggcgagtccttttcctgcgttatgtcgttcagaccctagaagatgactttcagcagaccctgaggaggcaacggcagcacctgcagcaatccattgcaaacatggtgctttcctgtgacaagcagccccacaatgtcagggatgttatcaagtggctggtcaaagcagtaactgaagatggattgactcagcccccaaatggaaatcaaacgtcttcaggaacaggaatcttgaaagccagcagtagccacccttcttcccagcccaacctgacaaagaacaccaatcagctgattgtgtgccagcttcagaggatgctctccatagccgtagaggtggacaggacccccacctgcagctccaataaaattgccgagatgatgtttgggtttgtgctggacattcctgagaggagccagagagaaatgttctttactaccatggaaagccaccttctgcgctgcaaagtgttagaaatcatattcctccacagctgtgagacacccacccgcctgcctctgtctctggcccaggccctctactttctgaataattctacgtcactgctcaagtgtcagtcagataaaagccagtggcagacttgggacgaattggttgagcatctgcagtttctgctgtccagttatcaacatgttttaagagaacacttaaggagttccgtgatcgaccgaaaggacttaataatcaaaaggattaagcccaaaccccagcaaggagatgacatcacagtggtagacgtagagaagcagattgaggccttccgcagccgcctgatccagatgctgggggagcctcttgtcccccaactccaagacaaagtgcacttgttgaagctcctgctcttctatgctgcggacttgaaccctgatgcagagccctttcaaaagggctggagcggctcctgagggcctgccaagcactgaatgccaagaatacctcctgaactctctctccaactgctcagaagctctaaaagcatgaaaagtggttaaaatcttacaggaccaaacctgcattatttaatcagtaggttgtaatttctaactctagtaaatatctttttttaaataatcctatcctagcctgttctcaaatatggcttaaatatacaaggtatatatattttttaataaattatttatctatacttttttgaaacaggttaatactctgtgcatcacatgtttaacattttcattcaagatgtggaaaaaatccctctgctgaacctagtctatacaccaatattatgtcattcaaggtaccgacaacctgtttcaggagagagacgttcatttttccctaatgaaatgcaagcattctgttagacctattatattgcctgttaatttgactgtaatgaatagggggtagaaacaaaaggatcaagtgtgttataaaacatttgatgttaaaaggagacaataaaaaggcaatggtttttc

SEQ ID NO: 187416 - DNA, 3572 bp, Homo sapiens
  Payload ID: 16899
  Gene Symbol: SIMC1
  Gene Name: SUMO-interacting motifs containing 1
  Uniprot ID: Q8NDZ2
  ENST ID: ENST00000443967
  CDS Start-End: 408-3026
gctcggggcggggccggcgtggcggtggcccgggttgtagccgccgccgctgccgccgccccgccgccgccacctcagaagcaggaaccgaagtcgtcgccgccgccgccactgcctgggtcttcggtcggggcccgcagccatggaggatttcatcgtgatctcggacgacagcggctctgagagctccgggggcgcccgcccgggccggtcgcggaggccgcgccgggccctgtcgcgaacctccggcgcgctgccccgccggaccgtgacggtgtcttgctgtgtcactcaggctggagtgcagtcgcacaacctcagctcactgcaacctctgcctcccgggttcaagtgattctcctgcctcagcttcctgagtagctgggattacaggctgaacaagaagcatggcaccagcatctgcttctggtgaggacctcaggaagcttccaaccatggcagaggtgaatggggagcaggacttcattgacttaactagagagaccagaccaaggacaaaagatcgcagtggactgtatgtgattgacctgacaagagctgagggagaaaatagacctattgccactcttgacttaactttagaacctgtcactccttcccagaaggagccaaccagtcttcagacatgtgccagcctctctggcaaagcggtgatggaagggcacgtggacagaagctctcagcctacagcacggagaatcattaacagtgatcctgtagatttggacctagtggaagaaaacacctttgtaggtcccccacccgctacatccatcagtggaggctctgtttatccaacagagcctaattgtagctcagccacattcacaggtaacctcagcttcttggcaagtctacagctgtcttcagatgttagctccctctccccaacaagcaataatagtaggagcagcagcagcagcagcaatcaaaaagcacccttgccatgcccacagcaagatgtatctcgcccaccacaggccttgccgtgccccctgcgacctttgccatgcccaccgagagcctcaccatgtccaccacgagcctcctcatgcccaccacgagccttgtcatgcccatcacaaaccatgcagtgccaactaccagctctaactcacccacctcaagaagtgccatgccctcggcagaatatcccaggcccacctcaagactctctgggcctacctcaagatgtgccagggctgcctcaaagcatattacatccacaagatgtggcatacctgcaagacatgccacggtcaccaggagatgtgccacagtcaccaagtgatgtttcaccgtcaccagatgcaccacagtcaccagggggcatgccacacttaccgggagatgtgttacattcacctggagacatgccacactcatcaggggacgtgacacactcacctagagacatccctcacttaccaggagacaggcctgactttacccagaatgatgtacagaaccgtgacatgcctatggatatctcagctctgtcctctccaagctgctctcccagcccacagtctgaaactcccttagagaaagttccttggctctctgtcatggaaaccccagccagaaaagaaatatcactgtcagagcctgccaaacctgggtctgcccacgtacaatcacgaacaccacaaggtgggttgtacaacagaccatgcctgcatagactgaagtacttcttacgtcctccggttcatcacctcttctttcagacgctaataccggataaagacacaagagagaacaagggtcaaaaattagaacccatccctcatcgaagactaagaatggtaacaaataccattgaagagaattttcctctggggactgtgcagtttttgatggactttgtgtcaccccagcattacccaccaagagaaatcgtggctcacatcatccagaaaatcttgctcagtggctctgagactgtggatgtcctaaaggaggcctacatgcttctcatgaaaattcaacagctacatccagccaatgccaagacagtggagtgggactggaaactgctcacctatgtcatggaggaagagggacaaactctgcctgggcgagtccttttcctgcgttatgtcgttcagaccctagaagatgactttcagcagaccctgaggaggcaacggcagcacctgcagcaatccattgcaaacatggtgctttcctgtgacaagcagccccacaatgtcagggatgttatcaagtggctggtcaaagcagtaactgaagatggattgactcagcccccaaatggaaatcaaacgtcttcaggaacaggaatcttgaaagccagcagtagccacccttcttcccagcccaacctgacaaagaacaccaatcagctgattgtgtgccagcttcagaggatgctctccatagccgtagaggtggacaggacccccacctgcagctccaataaaattgccgagatgatgtttgggtttgtgctggacattcctgagaggagccagagagaaatgttctttactaccatggaaagccaccttctgcgctgcaaagtgttagaaatcatattcctccacagctgtgagacacccacccgcctgcctctgtctctggcccaggccctctactttctgaataattctacgtcactgctcaagtgtcagtcagataaaagccagtggcagacttgggacgaattggttgagcatctgcagtttctgctgtccagttatcaacatgttttaagagaacacttaaggagttccgtgatcgaccgaaaggacttaataatcaaaaggattaagcccaaaccccagcaaggagatgacatcacagtggtagacgtagagaagcagattgaggccttccgcagccgcctgatccagatgctgggggagcctcttgtcccccaactccaagacaaagtgcacttgttgaagctcctgctcttctatgctgcggacttgaaccctgatgcagagccctttcaaaagggctggagcggctcctgagggcctgccaagcactgaatgccaagaatacctcctgaactctctctccaactgctcagaagctctaaaagcatgaaaagtggttaaaatcttacaggaccaaacctgcattatttaatcagtaggttgtaatttctaactctagtaaatatctttttttaaataatcctatcctagcctgttctcaaatatggcttaaatatacaaggtatatatattttttaataaattatttatctatacttttttgaaacaggttaatactctgtgcatcacatgtttaacattttcattcaagatgtggaaaaaatccctctgctgaacctagtctatacaccaatattatgtcattcaaggtaccgacaacctgtttcaggagagagacgttcatttttccctaatgaaatgcaagcattctgttagacctattatattgcctgttaatttgactgtaatgaatagggggtagaaacaaaaggatcaagtgtgttataaaacatttgatgttaaaaggagacaataaaaaggcaatggtttttcaaaata

SEQ ID NO: 187417 - DNA, 1925 bp, Homo sapiens
  Payload ID: 16899
  Gene Symbol: SIMC1
  Gene Name: SUMO-interacting motifs containing 1
  Uniprot ID: Q8NDZ2
  ENST ID: ENST00000430704
  CDS Start-End: 143-1516
gctcggggcggggccggcgtggcggtggcccgggttgtagccgccgccgctgccgccgccccgccgccgccacctcagaagcaggaaccgaagtcgtcgccgccgccgccactgcctgggtcttcggtcggggcccgcagccatggaggatttcatcgtgatctcggacgacagcggctctgagagctccgggggcgcccgcccgggccggtcgcggaggccgcgccgggccctgtcgcgaacctccggcgcgctgccccgccggaccgtgaacaagggtcaaaaattagaacccatccctcatcgaagactaagaatggtaacaaataccattgaagagaattttcctctggggactgtgcagtttttgatggactttgtgtcaccccagcattacccaccaagagaaatcgtggctcacatcatccagaaaatcttgctcagtggctctgagactgtggatgtcctaaaggaggcctacatgcttctcatgaaaattcaacagctacatccagccaatgccaagacagtggagtgggactggaaactgctcacctatgtcatggaggaagagggacaaactctgcctgggcgagtccttttcctgcgttatgtcgttcagaccctagaagatgactttcagcagaccctgaggaggcaacggcagcacctgcagcaatccattgcaaacatggtgctttcctgtgacaagcagccccacaatgtcagggatgttatcaagtggctggtcaaagcagtaactgaagatggattgactcagcccccaaatggaaatcaaacgtcttcaggaacaggaatcttgaaagccagcagtagccacccttcttcccagcccaacctgacaaagaacaccaatcagctgattgtgtgccagcttcagaggatgctctccatagccgtagaggtggacaggacccccacctgcagctccaataaaattgccgagatgatgtttgggtttgtgctggacattcctgagaggagccagagagaaatgttctttactaccatggaaagccaccttctgcgctgcaaagtgttagaaatcatattcctccacagctgtgagacacccacccgcctgcctctgtctctggcccaggccctctactttctgaataattctacgtcactgctcaagtgtcagtcagataaaagccagtggcagacttgggacgaattggttgagcatctgcagtttctgctgtccagttatcaacatgttttaagagaacacttaaggagttccgtgatcgaccgaaaggacttaataatcaaaaggattaagcccaaaccccagcaaggagatgacatcacagtggtagacgtagagaagcagattgaggccttccgcagccgcctgatccagatgctgggggagcctcttgtcccccaactccaagacaaagtgcacttgttgaagctcctgctcttctatgctgcggacttgaaccctgatgcagagccctttcaaaagggctggagcggctcctgagggcctgccaagcactgaatgccaagaatacctcctgaactctctctccaactgctcagaagctctaaaagcatgaaaagtggttaaaatcttacaggaccaaacctgcattatttaatcagttaatactctgtgcatcacatgtttaacattttcattcaagatgtggaaaaaatccctctgctgaacctagtctatacaccaatattatgtcattcaaggtaccgacaacctgtttcaggagagagacgttcatttttccctaatgaaatgcaagcattctgttagacctattatattgcctgttaatttgactgtaatgaatagggggtagaaacaaaaggatcaagtgtgttataaaacatttgatgttaaaaggagacaataaaaaggcaatggtttttcaaaa

SEQ ID NO: 187418 - DNA, 2694 bp, Homo sapiens
  Payload ID: 16899
  Gene Symbol: SIMC1
  Gene Name: SUMO-interacting motifs containing 1
  ENST ID: ENST00000429602
  CDS Start-End: 19-2694
cggtcggggcccgcagccatggaggatttcatcgtgatctcggacgacagcggctctgagagctccgggggcgcccgcccgggccggtcgcggaggccgcgccgggccctgtcgcgaacctccggcgcgctgccccgccggaccgtggacttcattgacttaactagagagaccagaccaaggacaaaagatcgcagtggactgtatgtgattgacctgacaagagctgagggagaaaatagacctattgccactcttgacttaactttagaacctgtcactccttcccagaaggagccaaccagtcttcagacatgtgccagcctctctggcaaagcggtgatggaagggcacgtggacagaagctctcagcctacagcacggagaatcattaacagtgatcctgtagatttggacctagtggaagaaaacacctttgtaggtcccccacccgctacatccatcagtggaggctctgtttatccaacagagcctaattgtagctcagccacattcacaggtaacctcagcttcttggcaagtctacagctgtcttcagatgttagctccctctccccaacaagcaataatagtaggagcagcagcagcagcagcaatcaaaaagcacccttgccatgcccacagcaagatgtatctcgcccaccacaggccttgccgtgccccctgcgacctttgccatgcccaccgagagcctcaccatgtccaccacgagcctcctcatgcccaccacgagccttgtcatgcccatcacaaaccatgcagtgccaactaccagctctaactcacccacctcaagaagtgccatgccctcggcagaatatcccaggcccacctcaagactctctgggcctacctcaagatgtgccagggctgcctcaaagcatattacatccacaagatgtggcatacctgcaagacatgccacggtcaccaggagatgtgccacagtcaccaagtgatgtttcaccgtcaccagatgcaccacagtcaccagggggcatgccacacttaccgggagatgtgttacattcacctggagacatgccacactcatcaggggacgtgacacactcacctagagacatccctcacttaccaggagacaggcctgactttacccagaatgatgtacagaaccgtgacatgcctatggatatctcagctctgtcctctccaagctgctctcccagcccacagtctgaaactcccttagagaaagttccttggctctctgtcatggaaaccccagccagaaaagaaatatcactgtcagagcctgccaaacctgggtctgcccacgtacaatcacgaacaccacaaggtgggttgtacaacagaccatgcctgcatagactgaagtacttcttacgtcctccggttcatcacctcttctttcagacgctaataccggataaagacacaagagagaacaagggtcaaaaattagaacccatccctcatcgaagactaagaatggtaacaaataccattgaagagaattttcctctggggactgtgcagtttttgatggactttgtgtcaccccagcattacccaccaagagaaatcgtggctcacatcatccagaaaatcttgctcagtggctctgagactgtggatgtcctaaaggaggcctacatgcttctcatgaaaattcaacagctacatccagccaatgccaagacagtggagtgggactggaaactgctcacctatgtcatggaggaagagggacaaactctgcctgggcgagtccttttcctgcgttatgtcgttcagaccctagaagatgactttcagcagaccctgaggaggcaacggcagcacctgcagcaatccattgcaaacatggtgctttcctgtgacaagcagccccacaatgtcagggatgttatcaagtggctggtcaaagcagtaactgaagatggattgactcagcccccaaatggaaatcaaacgtcttcaggaacaggaatcttgaaagccagcagtagccacccttcttcccagcccaacctgacaaagaacaccaatcagctgattgtgtgccagcttcagaggatgctctccatagccgtagaggtggacaggacccccacctgcagctccaataaaattgccgagatgatgtttgggtttgtgctggacattcctgagaggagccagagagaaatgttctttactaccatggaaagccaccttctgcgctgcaaagtgttagaaatcatattcctccacagctgtgagacacccacccgcctgcctctgtctctggcccaggccctctactttctgaataattctacgtcactgctcaagtgtcagtcagataaaagccagtggcagacttgggacgaattggttgagcatctgcagtttctgctgtccagttatcaacatgttttaagagaacacttaaggagttccgtgatcgaccgaaaggacttaataatcaaaaggattaagcccaaaccccagcaaggagatgacatcacagtggtagacgtagagaagcagattgaggccttccgcagccgcctgatccagatgctgggggagcctcttgtcccccaactccaagacaaagtgcacttgttgaagctcctgctcttctatgctgcggacttgaaccctgatgcagagccctttcaaaagggctggagcggctcctga

SEQ ID NO: 187419 - DNA, 5556 bp, Homo sapiens
  Payload ID: 16900
  Gene Symbol: SUCO
  Gene Name: SUN domain containing ossification factor
  Uniprot ID: Q9UBS9
  ENST ID: ENST00000263688
  CDS Start-End: 220-3984
ccggagtcctgtgaagcgcccctgtccgcgcctctgtggggccctcagagagggctgccaggacgcgagccactgaggagccgctcagccagcgccatagcccttaggactatcggtcacattctcgcgctcctgctccggctcctccatcttggcctcggcagtggcggctgccgggaggatgtgccgccttctggcagggggaagaaggaggagaagatgaagaagcaccggcgggccttggccctggtctcctgcctctttctgtgctctctggtctggcttcccagctggcgtgtatgttgtaaagagagttcttcagcttcagcgtcatcatattactctcaagatgacaactgcgcactagaaaatgaagatgtacaattccagaaaaaggatgaaagagagggacctatcaatgccgaatcattgggaaaatcaggttcaaatttacctatttctccaaaagaacataaattaaaagatgattctattgtggatgtacaaaatacagagtcaaaaaagttaagtccaccggtggtggagacactccctacagttgatttgcatgaagagtcttccaatgcagttgtggacagtgaaactgttgaaaatatttccagctcatctacctcagaaatcactccaatctcaaagcttgatgaaatagaaaaatctggtactattccgatagccaaaccaagtgaaactgagcagtctgaaactgattgtgatgttggtgaggcccttgatgctagtgctccaattgaacaaccttcctttgtcagtccacctgacagccttgttggccagcatatagaaaatgtatcatcttcacatggtaaaggaaagataacaaaatcagaatttgaatcaaaagtttcagcaagtgaacagggcggtggtgatccaaaatctgcattgaatgcttcagataatttaaaaaatgagagctctgattatacaaaaccaggagacattgaccctacatcagtagcaagtcccaaagatccagaagatataccaacatttgatgaatggaagaagaaagttatggaagtagaaaaagaaaaaagtcagtcgatgcatgcatcttctaatggaggttcacatgccaccaaaaaggtccagaaaaatcgaaataattatgcctcagtagaatgtggtgccaaaattctagcagctaatccagaagccaagagcacatctgctattcttatagaaaatatggatctttacatgttgaatccttgcagcactaaaatttggtttgttattgaactttgtgaaccaattcaagtaaaacagcttgatattgcaaattatgaattattttcttctactcctaaagattttctggtttctatcagtgacagatatccaacaaataagtggattaagctgggtacttttcatggtagagatgagcggaatgtacagagtttccctttagatgaacagatgtatgcaaaatatgtcaagatgttcatcaagtacataaaggttgagttgctatcacattttggatcagagcacttttgtccattaagccttataagggtatttggcactagcatggtggaagaatatgaagaaattgctgattcccagtatcactcagaacgccaggaactatttgatgaggactatgattatccactggattataatactggagaggataaatcctcaaaaaatcttcttggttctgctacaaatgccattctaaatatggtgaatattgctgctaatattctgggagcaaaaactgaagacctgacagaaggaaataaaagtatatctgagaatgccactgccacagctgcacctaaaatgcctgaatcaactcctgtttcaactcctgttccatctcctgagtatgtaaccactgaagtacacacacatgacatggagccgtcaacaccagatactccaaaagagagtcccattgtacagttagttcaagaggaggaagaggaggcaagtccatctacagtgacccttctgggcagcggtgaacaggaagatgaatcatcaccctggtttgagtcagagacacaaatattttgcagtgaactgaccacaatttgttgtatttctagtttttcagaatacatatataaatggtgttcagttagagttgctctttatcggcagcgcagccgaactgctttgagtaaaggaaaagattatcttgtgttagctcaaccacccttactacttcctgcggaatcagtagatgtttcagtattgcaacctctgagtggagaattggaaaatacgaatatagaaagggaagctgaaactgttgttctgggtgatttaagtagtagtatgcaccaggatgacttggtgaatcacactgtagatgcagttgaacttgaaccaagccattctcaaactctttctcagtctcttcttttagatattaccccagaaatcaatcccttgcctaaaatagaagtatctgagtctgttgaatatgaggcaggacatataccatcaccagtgattccccaagagagttctgttgagatcgataatgaaacagaacaaaagtctgagagctttagttctatagagaaaccatctattacctatgaaacaaataaagttaatgagttaatggataatattataaaagaagatgtgaactccatgcaaattttcacaaagctgtctgaaacaatagtgccaccaataaatacagccactgtacccgacaatgaagatggggaagccaaaatgaatatagctgacacagcaaagcaaactttgatttctgttgtggattcttcttcattacctgaagtaaaagaagaagaacagtctccagaagatgcccttttgagagggttacagaggacagctacagatttttatgctgaattgcaaaattctacagatctaggatatgctaatggaaatcttgtacatggatcaaaccaaaaggagtcagtatttatgagacttaataatcgtattaaagccttagaagttaacatgtctctcagtggtcgctatctggaggagcttagccaaaggtaccgaaaacaaatggaagaaatgcaaaaggctttcaataaaacaatcgtgaaacttcagaatacttcaagaatagcagaggagcaggatcagcggcaaactgaagccatccagttgctacaggcacagctgaccaacatgacacagcttgtttcaaatttatcagcaacagtagcagaattgaaacgggaggtttcagatcgacaaagctatcttgtcatatctttggttctttgtgttgtcttgggactgatgctttgtatgcagcgttgtcgaaatacttctcaatttgatggagattatatttcaaaacttcctaaaagtaatcagtatccaagccctaaaaggtgtttctcttcctatgatgatatgaatttgaaaagaagaacttcattcccactcatgagatccaagtctctacagttaactggcaaagaagtagacccaaatgatttgtacattgtagaacccctcaagttttctccagaaaagaagaagaagcgctgcaagtacaaaattgaaaaaattgagaccataaagcctgaagaaccattgcaccccatagccaatggcgacataaaaggaagaaagccctttacgaaccagagagatttttctaatatgggagaagtttatcactcttcttataaaggtcctccatctgaaggaagctcagaaacttcatcacagtcagaagagtcctatttttgtggcatttcagcttgcacaagtctgtgcaatggacagtctcaaaagacaaaaactgagaagagggctttaaaacgaagacgatctaaagtccaagaccaaggaaaattgataaaaactctaatacagactaagtcgggatcattgccgagcctgcatgacataatcaaaggaaacaaagagatcaccgtgggaacatttggtgttacagcagtctcgggacatatctaaaattaattgaacttttcatacagaagacttttttgttgttgttctttgaagaacagtctgtagtatttgaagggtttgggggagggagaaaatattaatgggaaaggcattcagaaattatggtttctacctttttaaaaagtagatgggattgtgtcaatcttggttaatgagctacagttttacaaagctgatcacttcctataaggacaatggtagacattttataaagatgttttttcacaagattaattactgggacaaaagtaatttggaagcccagttccttaggtgggataggaatgaaagcctaaacctcttcctttagctttgttcctatttcttgcaccttcccatatttatgtgccttttgtctatttataatgccactggaagaggagggataactttttctgttatttgatttcttttataactttgttaggtttttgaagctgcaaacactacaatgctttgagggggtctgtgcctgaagctcaggagtgtggatcagacagtctaaagatcctaaaaacttgccaactggatctttgtttagcaaactcactggaaatgaacacttaatggaatttttaagtctgttctgttaggtagatggtgatgctcttgttattttcacttattcagactggattacttcttacttagttactaactcaatgaggaaaaatccctacaggatctttttttgcaaacaactgatatatgcagacaaatttttgacaaattcaccttttaaacacacttaaccatttgtgaaggttttctttagcttacattttaaacatacacaataaacactaatcctccaaactttcactgtttttattagtatgaatataaaatttgaaggtttggccaattagtacaagtctcatgatataatcactgcctgcatacatatgcacagatccagttagtgagtttgtcaagcttaatctaattggttaagtctaaagagattattattccttgatgtttgctttgtattggctacaaatgtgcagaggtaatacatatgtgatgtcgatgtctctgtctttttttttgtctttaaaaaataattggcagcaactgtatttgaataaaatgatttcttagtatgattgtacagtaatgaatgaaagtggaacatgtttctttttgaaagggagagaattgaccatttattgttgtgatgtttaagttataacttattgagcacttttagtagtgataactgtttttaaacttgcctaatacctttcttgggtattgtttgtaatgtgacttatttaacgccttttttgtttgtttaagttgctgctttaggttaacagcgtgttttagaagatttaaatttctttcctgtctgcacaattagctattcagagcaagagggcctgattttatagaagccccttgaaaagaggtccagatgagagcagagatacagtgagaaattatgtgatctgtgtgttgtgggaagagaattttcaatatgtaactacggagctgtagtgccattagaaactgtgaatttccaaataaatctgaacacttgtctttatt

SEQ ID NO: 187420 - DNA, 5916 bp, Homo sapiens
  Payload ID: 16900
  Gene Symbol: SUCO
  Gene Name: SUN domain containing ossification factor
  Uniprot ID: Q9UBS9
  ENST ID: ENST00000367723
  CDS Start-End: 125-4342
cccaaagttcgaaaccaacagaacgaaaagcaacgaagcacacttaaagtgaggaacccggcaagcggcgaaattcttgctgaagagaagaaaaagcgaaaggttttccgctgcaaccaatcagatgagaggattcttggcacgcccctttctatctaccaatcaacatctagctcaatggggcagtccattgccacagggaaagggcttggtgcagcttccctcacaacacacacgtcattctaggccattccacgaactgtgctcaaaagaggaaaacagtgcaacagttccaaagctgatcagtctcgtggtgagcagcgaaactatagacttctctaacaaaaccatggattctaggagggactgggaaagagaaaaacgaattctggaaggcaaactacaactcccaaaggcccttgcgcggactcagcgcgcgagggacgaagggcgggcgtggacgagccggtggctgcagcggcggcggtccccggagtcctgtgaagcgcccctgtccgcgcctctgtggggccctcagagagggctgccaggacgcgagccactgaggagccgctcagccagcgccatagcccttaggactatcggtcacattctcgcgctcctgctccggctcctccatcttggcctcggcagtggcggctgccgggaggatgtgccgccttctggcagggggaagaaggaggagaagatgaagaagcaccggcgggccttggccctggtctcctgcctctttctgtgctctctggtctggcttcccagctggcgtgtatgttgtaaagagagttcttcagcttcagcgtcatcatattactctcaagatgacaactgcgcactagaaaatgaagatgtacaattccagaaaaagaatacagagtcaaaaaagttaagtccaccggtggtggagacactccctacagttgatttgcatgaagagtcttccaatgcagttgtggacagtgaaactgttgaaaatatttccagctcatctacctcagaaatcactccaatctcaaagcttgatgaaatagaaaaatctggtactattccgatagccaaaccaagtgaaactgagcagtctgaaactgattgtgatgttggtgaggcccttgatgctagtgctccaattgaacaaccttcctttgtcagtccacctgacagccttgttggccagcatatagaaaatgtatcatcttcacatggtaaaggaaagataacaaaatcagaatttgaatcaaaagtttcagcaagtgaacagggcggtggtgatccaaaatctgcattgaatgcttcagataatttaaaaaatgagagctctgattatacaaaaccaggagacattgaccctacatcagtagcaagtcccaaagatccagaagatataccaacatttgatgaatggaagaagaaagttatggaagtagaaaaagaaaaaagtcagtcgatgcatgcatcttctaatggaggttcacatgccaccaaaaaggtccagaaaaatcgaaataattatgcctcagtagaatgtggtgccaaaattctagcagctaatccagaagccaagagcacatctgctattcttatagaaaatatggatctttacatgttgaatccttgcagcactaaaatttggtttgttattgaactttgtgaaccaattcaagtaaaacagcttgatattgcaaattatgaattattttcttctactcctaaagattttctggtttctatcagtgacagatatccaacaaataagtggattaagctgggtacttttcatggtagagatgagcggaatgtacagagtttccctttagatgaacagatgtatgcaaaatatgtcaaggttgagttgctatcacattttggatcagagcacttttgtccattaagccttataagggtatttggcactagcatggtggaagaatatgaagaaattgctgattcccagtatcactcagaacgccaggaactatttgatgaggactatgattatccactggattataatactggagaggataaatcctcaaaaaatcttcttggttctgctacaaatgccattctaaatatggtgaatattgctgctaatattctgggagcaaaaactgaagacctgacagaaggaaataaaagtatatctgagaatgccactgccacagctgcacctaaaatgcctgaatcaactcctgtttcaactcctgttccatctcctgagtatgtaaccactgaagtacacacacatgacatggagccgtcaacaccagatactccaaaagagagtcccattgtacagttagttcaagaggaggaagaggaggcaagtccatctacagtgacccttctgggcagcggtgaacaggaagatgaatcatcaccctggtttgagtcagagacacaaatattttgcagtgaactgaccacaatttgttgtatttctagtttttcagaatacatatataaatggtgttcagttagagttgctctttatcggcagcgcagccgaactgctttgagtaaaggaaaagattatcttgtgttagctcaaccacccttactacttcctgcggaatcagtagatgtttcagtattgcaacctctgagtggagaattggaaaatacgaatatagaaagggaagctgaaactgttgttctgggtgatttaagtagtagtatgcaccaggatgacttggtgaatcacactgtagatgcagttgaacttgaaccaagccattctcaaactctttctcagtctcttcttttagatattaccccagaaatcaatcccttgcctaaaatagaagtatctgagtctgttgaatatgaggcaggacatataccatcaccagtgattccccaagagagttctgttgagatcgataatgaaacagaacaaaagtctgagagctttagttctatagagaaaccatctattacctatgaaacaaataaagttaatgagttaatggataatattataaaagaagatgtgaactccatgcaaattttcacaaagctgtctgaaacaatagtgccaccaataaatacagccactgtacccgacaatgaagatggggaagccaaaatgaatatagctgacacagcaaagcaaactttgatttctgttgtggattcttcttcattacctgaagtaaaagaagaagaacagtctccagaagatgcccttttgagagggttacagaggacagctacagatttttatgctgaattgcaaaattctacagatctaggatatgctaatggaaatcttgtacatggatcaaaccaaaaggagtcagtatttatgagacttaataatcgtattaaagccttagaagttaacatgtctctcagtggtcgctatctggaggagcttagccaaaggtaccgaaaacaaatggaagaaatgcaaaaggctttcaataaaacaatcgtgaaacttcagaatacttcaagaatagcagaggagcaggatcagcggcaaactgaagccatccagttgctacaggcacagctgaccaacatgacacagcttgtttcaaatttatcagcaacagtagcagaattgaaacgggaggtttcagatcgacaaagctatcttgtcatatctttggttctttgtgttgtcttgggactgatgctttgtatgcagcgttgtcgaaatacttctcaatttgatggagattatatttcaaaacttcctaaaagtaatcagtatccaagccctaaaaggtgtttctcttcctatgatgatatgaatttgaaaagaagaacttcattcccactcatgagatccaagtctctacagttaactggcaaagaagtagacccaaatgatttgtacattgtagaacccctcaagttttctccagaaaagaagaagaagcgctgcaagtacaaaattgaaaaaattgagaccataaagcctgaagaaccattgcaccccatagccaatggcgacataaaaggaagaaagccctttacgaaccagagagatttttctaatatgggagaagtttatcactcttcttataaaggtcctccatctgaaggaagctcagaaacttcatcacagtcagaagagtcctatttttgtggcatttcagcttgcacaagtctgtgcaatggacagtctcaaaagacaaaaactgagaagagggctttaaaacgaagacgatctaaagtccaagaccaaggaaaattgataaaaactctaatacagactaagtcgggatcattgccgagcctgcatgacataatcaaaggaaacaaagagatcaccgtgggaacatttggtgttacagcagtctcgggacatatctaaaattaattgaacttttcatacagaagacttttttgttgttgttctttgaagaacagtctgtagtatttgaagggtttgggggagggagaaaatattaatgggaaaggcattcagaaattatggtttctacctttttaaaaagtagatgggattgtgtcaatcttggttaatgagctacagttttacaaagctgatcacttcctataaggacaatggtagacattttataaagatgttttttcacaagattaattactgggacaaaagtaatttggaagcccagttccttaggtgggataggaatgaaagcctaaacctcttcctttagctttgttcctatttcttgcaccttcccatatttatgtgccttttgtctatttataatgccactggaagaggagggataactttttctgttatttgatttcttttataactttgttaggtttttgaagctgcaaacactacaatgctttgagggggtctgtgcctgaagctcaggagtgtggatcagacagtctaaagatcctaaaaacttgccaactggatctttgtttagcaaactcactggaaatgaacacttaatggaatttttaagtctgttctgttaggtagatggtgatgctcttgttattttcacttattcagactggattacttcttacttagttactaactcaatgaggaaaaatccctacaggatctttttttgcaaacaactgatatatgcagacaaatttttgacaaattcaccttttaaacacacttaaccatttgtgaaggttttctttagcttacattttaaacatacacaataaacactaatcctccaaactttcactgtttttattagtatgaatataaaatttgaaggtttggccaattagtacaagtctcatgatataatcactgcctgcatacatatgcacagatccagttagtgagtttgtcaagcttaatctaattggttaagtctaaagagattattattccttgatgtttgctttgtattggctacaaatgtgcagaggtaatacatatgtgatgtcgatgtctctgtctttttttttgtctttaaaaaataattggcagcaactgtatttgaataaaatgatttcttagtatgattgtacagtaatgaatgaaagtggaacatgtttctttttgaaagggagagaattgaccatttattgttgtgatgtttaagttataacttattgagcacttttagtagtgataactgtttttaaacttgcctaatacctttcttgggtattgtttgtaatgtgacttatttaacgccttttttgtttgtttaagttgctgctttaggttaacagcgtgttttagaagatttaaatttctttcctgtctgcacaattagctattcagagcaagagggcctgattttatagaagccccttgaaaagaggtccagatgagagcagagatacagtgagaaattatgtgatctgtgtgttgtgggaagagaattttcaatatgtaactacggagctgtagtgccattagaaactgtgaatttccaaataaatctgaacacttgtctttattaa

SEQ ID NO: 187421 - DNA, 2925 bp, Homo sapiens
  Payload ID: 16900
  Gene Symbol: SUCO
  Gene Name: SUN domain containing ossification factor
  ENST ID: ENST00000610051
  CDS Start-End: 254-2905
gtggacgagccggtggctgcagcggcggcggtccccggagtcctgtgaagcgcccctgtccgcgcctctgtggggccctcagagagggctgccaggacgcgagccactgaggagccgctcagccagcgccatagcccttaggactatcggtcacattctcgcgctcctgctccggctcctccatcttggcctcggcagtggcggctgccgggaggatgtgccgccttctggcagggggaagaaggaggagaagatgaagaagcaccggcgggccttggccctggtctcctgcctctttctgtgctctctggtctggcttcccagctggcgtgtatgttgtaaagagagttcttcagcttcagcgtcatcatattactctcaagatgacaactgcgcactagaaaatgaagatgtacaattccagaaaaagaatacagagtcaaaaaagttaagtccaccggtggtggagacactccctacagttgatttgcatgaagagtcttccaatgcagttgtggacagtgaaactgttgaaaatatttccagctcatctacctcagaaatcactccaatctcaaagcttgatgaaatagaaaaatctggtactattccgatagccaaaccaagtgaaactgagcagtctgaaactgattgtgatgttggtgaggcccttgatgctagtgctccaattgaacaaccttcctttgtcagtccacctgacagccttgttggccagcatatagaaaatgtatcatcttcacatggtaaaggaaagataacaaaatcagaatttgaatcaaaagtttcagcaagtgaacagggcggtggtgatccaaaatctgcattgaatgcttcagataatttaaaaaatgagagctctgattatacaaaaccaggagacattgaccctacatcagtagcaagtcccaaagatccagaagatataccaacatttgatgaatggaagaagaaagttatggaagtagaaaaagaaaaaagtcagtcgatgcatgcatcttctaatggaggttcacatgccaccaaaaaggtccagaaaaatcgaaataattatgcctcagtagaatgtggtgccaaaattctagcagctaatccagaagccaagagcacatctgctattcttatagaaaatatggatctttacatgttgaatccttgcagcactaaaatttggtttgttattgaactttgtgaaccaattcaagtaaaacagcttgatattgcaaattatgaattattttcttctactcctaaagattttctggtttctatcagtgacagatatccaacaaataagtggattaagctgggtacttttcatggtagagatgagcggaatgtacagagtttccctttagatgaacagatgtatgcaaaatatgtcaagatgttcatcaagtacataaaggttgagttgctatcacattttggatcagagcacttttgtccattaagccttataagggtatttggcactagcatggtggaagaatatgaagaaattgctgattcccagtatcactcagaacgccaggaactatttgatgaggactatgattatccactggattataatactggagaggataaatcctcaaaaaatcttcttggttctgctacaaatgccattctaaatatggtgaatattgctgctaatattctgggagcaaaaactgaagacctgacagaaggaaataaaagtatatctgagaatgccactgccacagctgcacctaaaatgcctgaatcaactcctgtttcaactcctgttccatctcctgagtatgtaaccactgaagtacacacacatgacatggagccgtcaacaccagatactccaaaagagagtcccattgtacagttagttcaagaggaggaagaggaggcaagtccatctacagtgacccttctgggcagcggtgaacaggaagatgaatcatcaccctggtaccgaaaacaaatggaagaaatgcaaaaggctttcaataaaacaatcgtgaaacttcagaatacttcaagaatagcagaggagcaggatcagcggcaaactgaagccatccagttgctacaggcacagctgaccaacatgacacagcttgtttcaaatttatcagcaacagtagcagaattgaaacgggaggtttcagatcgacaaagctatcttgtcatatctttggttctttgtgttgtcttgggactgatgctttgtatgcagcgttgtcgaaatacttctcaatttgatggagattatatttcaaaacttcctaaaagtaatcagtatccaagccctaaaaggtgtttctcttcctatgatgatatgaatttgaaaagaagaacttcattcccactcatgagatccaagtctctacagttaactggcaaagaagtagacccaaatgatttgtacattgtagaacccctcaagttttctccagaaaagaagaagaagcgctgcaagtacaaaattgaaaaaattgagaccataaagcctgaagaaccattgcaccccatagccaatggcgacataaaaggaagaaagccctttacgaaccagagagatttttctaatatgggagaagtttatcactcttcttataaaggtcctccatctgaaggaagctcagaaacttcatcacagtcagaagagtcctatttttgtggcatttcagcttgcacaagtctgtgcaatggacagtctcaaaagacaaaaactgagaagagggctttaaaacgaagacgatctaaagtccaagaccaaggaaaattgataaaaactctaatacagactaagtcgggatcattgccgagcctgcatgacataatcaaaggaaacaaagagatcaccgtgggaacatttggtgttacagcagtctcgggacatatctaaaattaattgaacttttcata

SEQ ID NO: 187422 - DNA, 5790 bp, Homo sapiens
  Payload ID: 16900
  Gene Symbol: SUCO
  Gene Name: SUN domain containing ossification factor
  Uniprot ID: Q9UBS9
  ENST ID: ENST00000608151
  CDS Start-End: 1-4218
atgagaggattcttggcacgcccctttctatctaccaatcaacatctagctcaatggggcagtccattgccacagggaaagggcttggtgcagcttccctcacaacacacacgtcattctaggccattccacgaactgtgctcaaaagaggaaaacagtgcaacagttccaaagctgatcagtctcgtggtgagcagcgaaactatagacttctctaacaaaaccatggattctaggagggactgggaaagagaaaaacgaattctggaaggcaaactacaactcccaaaggcccttgcgcggactcagcgcgcgagggacgaagggcgggcgtggacgagccggtggctgcagcggcggcggtccccggagtcctgtgaagcgcccctgtccgcgcctctgtggggccctcagagagggctgccaggacgcgagccactgaggagccgctcagccagcgccatagcccttaggactatcggtcacattctcgcgctcctgctccggctcctccatcttggcctcggcagtggcggctgccgggaggatgtgccgccttctggcagggggaagaaggaggagaagatgaagaagcaccggcgggccttggccctggtctcctgcctctttctgtgctctctggtctggcttcccagctggcgtgtatgttgtaaagagagttcttcagcttcagcgtcatcatattactctcaagatgacaactgcgcactagaaaatgaagatgtacaattccagaaaaagaatacagagtcaaaaaagttaagtccaccggtggtggagacactccctacagttgatttgcatgaagagtcttccaatgcagttgtggacagtgaaactgttgaaaatatttccagctcatctacctcagaaatcactccaatctcaaagcttgatgaaatagaaaaatctggtactattccgatagccaaaccaagtgaaactgagcagtctgaaactgattgtgatgttggtgaggcccttgatgctagtgctccaattgaacaaccttcctttgtcagtccacctgacagccttgttggccagcatatagaaaatgtatcatcttcacatggtaaaggaaagataacaaaatcagaatttgaatcaaaagtttcagcaagtgaacagggcggtggtgatccaaaatctgcattgaatgcttcagataatttaaaaaatgagagctctgattatacaaaaccaggagacattgaccctacatcagtagcaagtcccaaagatccagaagatataccaacatttgatgaatggaagaagaaagttatggaagtagaaaaagaaaaaagtcagtcgatgcatgcatcttctaatggaggttcacatgccaccaaaaaggtccagaaaaatcgaaataattatgcctcagtagaatgtggtgccaaaattctagcagctaatccagaagccaagagcacatctgctattcttatagaaaatatggatctttacatgttgaatccttgcagcactaaaatttggtttgttattgaactttgtgaaccaattcaagtaaaacagcttgatattgcaaattatgaattattttcttctactcctaaagattttctggtttctatcagtgacagatatccaacaaataagtggattaagctgggtacttttcatggtagagatgagcggaatgtacagagtttccctttagatgaacagatgtatgcaaaatatgtcaaggttgagttgctatcacattttggatcagagcacttttgtccattaagccttataagggtatttggcactagcatggtggaagaatatgaagaaattgctgattcccagtatcactcagaacgccaggaactatttgatgaggactatgattatccactggattataatactggagaggataaatcctcaaaaaatcttcttggttctgctacaaatgccattctaaatatggtgaatattgctgctaatattctgggagcaaaaactgaagacctgacagaaggaaataaaagtatatctgagaatgccactgccacagctgcacctaaaatgcctgaatcaactcctgtttcaactcctgttccatctcctgagtatgtaaccactgaagtacacacacatgacatggagccgtcaacaccagatactccaaaagagagtcccattgtacagttagttcaagaggaggaagaggaggcaagtccatctacagtgacccttctgggcagcggtgaacaggaagatgaatcatcaccctggtttgagtcagagacacaaatattttgcagtgaactgaccacaatttgttgtatttctagtttttcagaatacatatataaatggtgttcagttagagttgctctttatcggcagcgcagccgaactgctttgagtaaaggaaaagattatcttgtgttagctcaaccacccttactacttcctgcggaatcagtagatgtttcagtattgcaacctctgagtggagaattggaaaatacgaatatagaaagggaagctgaaactgttgttctgggtgatttaagtagtagtatgcaccaggatgacttggtgaatcacactgtagatgcagttgaacttgaaccaagccattctcaaactctttctcagtctcttcttttagatattaccccagaaatcaatcccttgcctaaaatagaagtatctgagtctgttgaatatgaggcaggacatataccatcaccagtgattccccaagagagttctgttgagatcgataatgaaacagaacaaaagtctgagagctttagttctatagagaaaccatctattacctatgaaacaaataaagttaatgagttaatggataatattataaaagaagatgtgaactccatgcaaattttcacaaagctgtctgaaacaatagtgccaccaataaatacagccactgtacccgacaatgaagatggggaagccaaaatgaatatagctgacacagcaaagcaaactttgatttctgttgtggattcttcttcattacctgaagtaaaagaagaagaacagtctccagaagatgcccttttgagagggttacagaggacagctacagatttttatgctgaattgcaaaattctacagatctaggatatgctaatggaaatcttgtacatggatcaaaccaaaaggagtcagtatttatgagacttaataatcgtattaaagccttagaagttaacatgtctctcagtggtcgctatctggaggagcttagccaaaggtaccgaaaacaaatggaagaaatgcaaaaggctttcaataaaacaatcgtgaaacttcagaatacttcaagaatagcagaggagcaggatcagcggcaaactgaagccatccagttgctacaggcacagctgaccaacatgacacagcttgtttcaaatttatcagcaacagtagcagaattgaaacgggaggtttcagatcgacaaagctatcttgtcatatctttggttctttgtgttgtcttgggactgatgctttgtatgcagcgttgtcgaaatacttctcaatttgatggagattatatttcaaaacttcctaaaagtaatcagtatccaagccctaaaaggtgtttctcttcctatgatgatatgaatttgaaaagaagaacttcattcccactcatgagatccaagtctctacagttaactggcaaagaagtagacccaaatgatttgtacattgtagaacccctcaagttttctccagaaaagaagaagaagcgctgcaagtacaaaattgaaaaaattgagaccataaagcctgaagaaccattgcaccccatagccaatggcgacataaaaggaagaaagccctttacgaaccagagagatttttctaatatgggagaagtttatcactcttcttataaaggtcctccatctgaaggaagctcagaaacttcatcacagtcagaagagtcctatttttgtggcatttcagcttgcacaagtctgtgcaatggacagtctcaaaagacaaaaactgagaagagggctttaaaacgaagacgatctaaagtccaagaccaaggaaaattgataaaaactctaatacagactaagtcgggatcattgccgagcctgcatgacataatcaaaggaaacaaagagatcaccgtgggaacatttggtgttacagcagtctcgggacatatctaaaattaattgaacttttcatacagaagacttttttgttgttgttctttgaagaacagtctgtagtatttgaagggtttgggggagggagaaaatattaatgggaaaggcattcagaaattatggtttctacctttttaaaaagtagatgggattgtgtcaatcttggttaatgagctacagttttacaaagctgatcacttcctataaggacaatggtagacattttataaagatgttttttcacaagattaattactgggacaaaagtaatttggaagcccagttccttaggtgggataggaatgaaagcctaaacctcttcctttagctttgttcctatttcttgcaccttcccatatttatgtgccttttgtctatttataatgccactggaagaggagggataactttttctgttatttgatttcttttataactttgttaggtttttgaagctgcaaacactacaatgctttgagggggtctgtgcctgaagctcaggagtgtggatcagacagtctaaagatcctaaaaacttgccaactggatctttgtttagcaaactcactggaaatgaacacttaatggaatttttaagtctgttctgttaggtagatggtgatgctcttgttattttcacttattcagactggattacttcttacttagttactaactcaatgaggaaaaatccctacaggatctttttttgcaaacaactgatatatgcagacaaatttttgacaaattcaccttttaaacacacttaaccatttgtgaaggttttctttagcttacattttaaacatacacaataaacactaatcctccaaactttcactgtttttattagtatgaatataaaatttgaaggtttggccaattagtacaagtctcatgatataatcactgcctgcatacatatgcacagatccagttagtgagtttgtcaagcttaatctaattggttaagtctaaagagattattattccttgatgtttgctttgtattggctacaaatgtgcagaggtaatacatatgtgatgtcgatgtctctgtctttttttttgtctttaaaaaataattggcagcaactgtatttgaataaaatgatttcttagtatgattgtacagtaatgaatgaaagtggaacatgtttctttttgaaagggagagaattgaccatttattgttgtgatgtttaagttataacttattgagcacttttagtagtgataactgtttttaaacttgcctaatacctttcttgggtattgtttgtaatgtgacttatttaacgccttttttgtttgtttaagttgctgctttaggttaacagcgtgttttagaagatttaaatttctttcctgtctgcacaattagctattcagagcaagagggcctgattttatagaagccccttgaaaagaggtccagatgagagcagagatacagtgagaaattatgtgatctgtgtgttgtgggaagagaattttcaatatgtaactacggagctgtagtgccattagaaactgtgaatttccaaataaatctgaacacttgtctttatt

SEQ ID NO: 187423 - DNA, 5495 bp, Homo sapiens
  Payload ID: 16900
  Gene Symbol: SUCO
  Gene Name: SUN domain containing ossification factor
  ENST ID: ENST00000616058
  CDS Start-End: 1848-3923
acggagcaaggcccccggcgggcggggaggatatggggcggcagtggcggctgcaggaggcgggcgtggacgagccggtggctgcagcggcggcggtccccggagtcctgtgaagcgcccctgtccgcgcctctgtggggccctcagagagggctgccaggacgcgagccactgaggagccgctcagccagcgccatagcccttaggactatcggtcacattctcgcgctcctgctccggctcctccatcttggcctcggcagtggcggctgccgggaggatgtgccgccttctggcagggggaagaaggaggagaagatgaagaagcaccggcgggccttggccctggtctcctgcctctttctgtgctctctggtctggcttcccagctggcgtgtatgttgtaaagagagttcttcagcttcagcgtcatcatattactctcaagatgacaactgcgcactagaaaatgaagatgtacaattccagaaaaaggatgaaagagagggacctatcaatgccgaatcattgggaaaatcaggttcaaatttacctatttctccaaaagaacataaattaaaagatgattctattgtggatgtacaaaatacagagtcaaaaaagttaagtccaccggtggtggagacactccctacagttgatttgcatgaagagtcttccaatgcagttgtggacagtgaaactgttgaaaatatttccagctcatctacctcagaaatcactccaatctcaaagcttgatgaaatagaaaaatctggtactattccgatagccaaaccaagtgaaactgagcagtctgaaactgattgtgatgttggtgaggcccttgatgctagtgctccaattgaacaaccttcctttgtcagtccacctgacagccttgttggccagcatatagaaaatgtatcatcttcacatggtaaaggaaagataacaaaatcagaatttgaatcaaaagtttcagcaagtgaacagggcggtggtgatccaaaatctgcattgaatgcttcagataatttaaaaaatgagagctctgattatacaaaaccaggagacattgaccctacatcagtagcaagtcccaaagatccagaagatataccaacatttgatgaatggaagaagaaagttatggaagtagaaaaagaaaaaagtcagtcgatgcatgcatcttctaatggaggttcacatgccaccaaaaaggtccagaaaaatcgaaataattatgcctcagtagaatgtggtgccaaaattctagcagctaatccagaagccaagagcacatctgctattcttatagaaaatatggatctttacatgttgaatccttgcagcactaaaatttggtttgttattgaactttgtgaaccaattcaagtaaaacagcttgatattgcaaattatgaattattttcttctactcctaaagattttctggtttctatcagtgacagatatccaacaaataagtggattaagctgggtacttttcatggtagagatgagcggaatgtacagagtttccctttagatgaacagatgtatgcaaaatatgtcaagatgttcatcaagtacataaaggttgagttgctatcacattttggatcagagcacttttgtccattaagccttataagggtatttggcactagcatggtggaagaatatgaagaaattgctgattcccagtatcactcagaacgccaggaactatttgatgaggactatgattatccactggattataatactggagaggataaatcctcaaaaaatcttcttggttctgctacaagtatgtaaccactgaagtacacacacatgacatggagccgtcaacaccagatactccaaaagagagtcccattgtacagttagttcaagaggaggaagaggaggcaagtccatctacagtgacccttctgggcagcggtgaacaggaagatgaatcatcaccctggtttgagtcagagacacaaatattttgcagtgaactgaccacaatttgttgtatttctagtttttcagaatacatatataaatggtgttcagttagagttgctctttatcggcagcgcagccgaactgctttgagtaaaggaaaagattatcttgtgttagctcaaccacccttactacttcctgcggaatcagtagatgtttcagtattgcaacctctgagtggagaattggaaaatacgaatatagaaagggaagctgaaactgttgttctgggtgatttaagtagtagtatgcaccaggatgacttggtgaatcacactgtagatgcagttgaacttgaaccaagccattctcaaactctttctcagtctcttcttttagatattaccccagaaatcaatcccttgcctaaaatagaagtatctgagtctgttgaatatgaggcaggacatataccatcaccagtgattccccaagagagttctgttgagatcgataatgaaacagaacaaaagtctgagagctttagttctatagagaaaccatctattacctatgaaacaaataaagttaatgagttaatggataatattataaaagaagatgtgaactccatgcaaattttcacaaagctgtctgaaacaatagtgccaccaataaatacagccactgtacccgacaatgaagatggggaagccaaaatgaatatagctgacacagcaaagcaaactttgatttctgttgtggattcttcttcattacctgaagtaaaagaagaagaacagtctccagaagatgcccttttgagagggttacagaggacagctacagatttttatgctgaattgcaaaattctacagatctaggatatgctaatggaaatcttgtacatggatcaaaccaaaaggagtcagtatttatgagacttaataatcgtattaaagccttagaagttaacatgtctctcagtggtcgctatctggaggagcttagccaaaggtaccgaaaacaaatggaagaaatgcaaaaggctttcaataaaacaatcgtgaaacttcagaatacttcaagaatagcagaggagcaggatcagcggcaaactgaagccatccagttgctacaggcacagctgaccaacatgacacagcttgtttcaaatttatcagcaacagtagcagaattgaaacgggaggtttcagatcgacaaagctatcttgtcatatctttggttctttgtgttgtcttgggactgatgctttgtatgcagcgttgtcgaaatacttctcaatttgatggagattatatttcaaaacttcctaaaagtaatcagtatccaagccctaaaaggtgtttctcttcctatgatgatatgaatttgaaaagaagaacttcattcccactcatgagatccaagtctctacagttaactggcaaagaagtagacccaaatgatttgtacattgtagaacccctcaagttttctccagaaaagaagaagaagcgctgcaagtacaaaattgaaaaaattgagaccataaagcctgaagaaccattgcaccccatagccaatggcgacataaaaggaagaaagccctttacgaaccagagagatttttctaatatgggagaagtttatcactcttcttataaaggtcctccatctgaaggaagctcagaaacttcatcacagtcagaagagtcctatttttgtggcatttcagcttgcacaagtctgtgcaatggacagtctcaaaagacaaaaactgagaagagggctttaaaacgaagacgatctaaagtccaagaccaaggaaaattgataaaaactctaatacagactaagtcgggatcattgccgagcctgcatgacataatcaaaggaaacaaagagatcaccgtgggaacatttggtgttacagcagtctcgggacatatctaaaattaattgaacttttcatacagaagacttttttgttgttgttctttgaagaacagtctgtagtatttgaagggtttgggggagggagaaaatattaatgggaaaggcattcagaaattatggtttctacctttttaaaaagtagatgggattgtgtcaatcttggttaatgagctacagttttacaaagctgatcacttcctataaggacaatggtagacattttataaagatgttttttcacaagattaattactgggacaaaagtaatttggaagcccagttccttaggtgggataggaatgaaagcctaaacctcttcctttagctttgttcctatttcttgcaccttcccatatttatgtgccttttgtctatttataatgccactggaagaggagggataactttttctgttatttgatttcttttataactttgttaggtttttgaagctgcaaacactacaatgctttgagggggtctgtgcctgaagctcaggagtgtggatcagacagtctaaagatcctaaaaacttgccaactggatctttgtttagcaaactcactggaaatgaacacttaatggaatttttaagtctgttctgttaggtagatggtgatgctcttgttattttcacttattcagactggattacttcttacttagttactaactcaatgaggaaaaatccctacaggatctttttttgcaaacaactgatatatgcagacaaatttttgacaaattcaccttttaaacacacttaaccatttgtgaaggttttctttagcttacattttaaacatacacaataaacactaatcctccaaactttcactgtttttattagtatgaatataaaatttgaaggtttggccaattagtacaagtctcatgatataatcactgcctgcatacatatgcacagatccagttagtgagtttgtcaagcttaatctaattggttaagtctaaagagattattattccttgatgtttgctttgtattggctacaaatgtgcagaggtaatacatatgtgatgtcgatgtctctgtctttttttttgtctttaaaaaataattggcagcaactgtatttgaataaaatgatttcttagtatgattgtacagtaatgaatgaaagtggaacatgtttctttttgaaagggagagaattgaccatttattgttgtgatgtttaagttataacttattgagcacttttagtagtgataactgtttttaaacttgcctaatacctttcttgggtattgtttgtaatgtgacttatttaacgccttttttgtttgtttaagttgctgctttaggttaacagcgtgttttagaagatttaaatttctttcctgtctgcacaattagctattcagagcaagagggcctgattttatagaagccccttgaaaagaggtccagatgagagcagagatacagtgagaaattatgtgatctgtgtgttgtgggaagagaattttcaatatgtaactacggagctgtagtgccattagaaactgtgaatttccaaataaatctgaacacttgtctttatt

SEQ ID NO: 187424 - DNA, 4192 bp, Homo sapiens
  Payload ID: 16901
  Gene Symbol: SKIV2L2
  Gene Name: superkiller viralicidic activity 2-like 2 (S. cerevisiae)
  Uniprot ID: P42285
  ENST ID: ENST00000230640
  CDS Start-End: 255-3383
gctgcctgccacacgccaggcgccacgcgccgccctcgctctttatccactgagcagcttatccactttaggtcggaaaggaaaggaaagaaaagcaggaaaaaaaaaaaaagtcaggggaacatttttgtcggctgcgcgactcgactacttttgtctcctgcgggccactgttgagccttcacgagacgtcactgtcttcggtcgcggggcatcgtgggtaggagggagatttgctctcactgctcccaaaaatggcggacgcattcggagatgagctgttcagcgtgttcgagggcgactcgaccactgcggcgggaaccaaaaaagacaaggaaaaggacaaggggaaatggaaggggcctccagggtctgcagacaaggcagggaaacgttttgatggtaaattacaatcagaatcaactaataatggaaaaaataagagagatgtagatttcgaaggtacagatgaacccatttttggaaagaagcccaggatagaagagtcaataactgaagacttaagtttggcagacctgatgcccagagtcaaggtacaatcagttgaaactgttgaagggtgtacacatgaggttgcacttcctgcagaagaggattatttaccacttaaaccacgagttggaaaagctgctaaggaatacccgttcattcttgatgcttttcaaagagaggccattcagtgtgttgacaataatcagtctgttctagtatctgcacatacctcagcgggaaaaacagtatgcgccgagtatgccattgcattggccttaagggaaaagcagcgtgtaatatttaccagcccaattaaggctctgagtaaccaaaaataccgtgaaatgtatgaagaatttcaagatgttggtttgatgactggtgatgttactattaatcctacggcatcttgtcttgttatgaccacagagattttgagaagtatgctttacagaggttccgaagttatgagagaagttgcttgggttatatttgatgaaattcattatatgagagattcagaacgtggtgtagtatgggaagaaactattattttgcttcctgataacgtccactatgtctttctttcggctactattccaaatgcccgacagtttgctgaatggatttgccatttacataaacagccttgtcatgttatttacacagattatcggcccactccattgcaacactacatttttccagcagggggagatggcctgcatcttgtggttgatgaaaatggtgacttcagagaagataattttaatactgcaatgcaagtgcttcgagatgcaggtgatttggccaaaggagaccagaaagggcggaaaggaggaacaaaaggaccatcaaatgttttcaaaattgtgaagatgattatggaaagaaatttccaacctgtgattattttcagttttagtaagaaagattgtgaagcctatgcacttcaaatgaccaaattagatttcaacacagatgaagaaaagaagatggttgaagaagtattcagtaatgcaattgattgcttatccgatgaagataaaaaactccctcaggtagaacatgtacttcctcttttgaagaggggaattggtattcaccatggtggtttacttcctattttgaaagaaactatagaaattctcttttctgaaggattgataaaggccttatttgccacggagacctttgctatgggaattaacatgccagctagaactgttttatttacaaatgcccgcaaatttgatgggaaggatttccgatggatttcttctggtgaatacattcagatgtctggtcgtgctggaaggagaggaatggatgatagaggaattgtaattcttatggtagatgaaaagatgagcccaacaattggaaaacaattacttaagggctccgctgatcctctaaatagtgctttccatttgacctacaacatggttttgaacttactacgtgtagaagaaattaatcctgagtacatgttggaaaaatccttctaccagtttcagcattatagagcaattccaggagtagtagagaaggtaaagaattcagaagaacagtataataaaatagtaattcccaatgaagaaagtgtggttatctattataagattagacagcagcttgccaaattgggtaaagaaattgaagaatatattcacaaaccaaaatactgcttaccttttctacaaccaggtcgtttggtaaaggtaaagaatgaaggagatgactttggctggggagtagtggtgaatttctcaaaaaagtcaaatgttaagcctaactctggtgaactggatcctttgtatgtagtagaagtacttctgcgctgtagcaaagagagcttgaaaaattcagctacagaagctgcaaaaccagctaaacctgatgagaaaggagagatgcaggttgtcccagttttggtgcatctcctgtctgctatcagcagtgttaggctttacattcctaaagaccttcggccggtggacaatagacagagtgttttaaaatcaatacaggaagttcagaaacgttttcctgacggcatccccttattagaccctattgatgatatgggcattcaagatcaagggctgaaaaaagtcattcagaaagtagaagcttttgagcatcgaatgtattctcatccacttcacaatgatccaaatttggaaactgtgtatacgctttgtgaaaaaaaagcacagattgcaatagatattaaatctgcaaagcgagaactgaagaaagcaagaacagtcctacaaatggatgaactcaaatgtcgcaaacgtgttttaagaaggttgggatttgctacttcttctgatgtaatagagatgaaaggacgagtggcttgtgagataagcagtgctgatgagctccttctaactgagatgatgtttaatggccttttcaatgacctttctgcagaacaggcaacagcattattaagctgctttgtgtttcaagagaattctagtgagatgcccaaattaacagaacaattagcaggaccacttcgtcaaatgcaggaatgtgctaaaagaattgcaaaagtttcagcagaagccaaattggaaattgatgaggaaacttatctaagctcatttaaacctcacttaatggatgtagtatatacctgggcaactggagctacatttgcccatatctgcaaaatgacagatgtctttgaaggcagcataattcgttgtatgaggcgcctggaagaattgcttcgacaaatgtgtcaagcagcaaaagccattggaaacactgagctggaaaataaatttgcagaaggaatcaccaaaatcaagagagatattgtgtttgctgccagcctctacttgtagagtcagctaaaggaatgtgagattttaaattattgaccacctgtttgattacagttgactacaaatgcctgcaagtgtggatttggttctcccatacattttaatatgtattatatttaaatcaaacatcattcatagaaagcatattacatacatgtttatacataagcattacatttttttaataaaaatgtatacaggtggggcactgttttggtggaaggcttggagtttttttaatgagtttagagctattagataaccactgagttaaaggtaactatgtacacacaaagtgtgcatccaagaggcatagcagcagcagaagtctttaaaggcttgtacaccaggaagaaagatgcatcctcttgccttgtggcaatcattttcctttagaaaacaggccagcttcacctgggcaccctgctgcctttcaaggctggtgattgctcggatagtgattcccagttgttggtgtttcatgcagagttgtatgagagtcctcctcttttctttctttaaaagaagttctttctttgaagaaatccgatacatatacagcctacagtgcaaaatatttaatggtataatttagatcaagttaaaaactacatacaaagttgtgatcaacagcatcctaagataaatataaacaaaaggatatactttgaggtgtacagattaagcatataaaaaattagagactaactgggattttttaaagattattccaaattaagagttgctttgttatgccttcagcaaatagcttcattttgccaatactgaataaaagagttatttctaca

SEQ ID NO: 187425 - DNA, 695 bp, Homo sapiens
  Payload ID: 16901
  Gene Symbol: SKIV2L2
  Gene Name: superkiller viralicidic activity 2-like 2 (S. cerevisiae)
  ENST ID: ENST00000505565
  CDS Start-End: 1-265
gaaacgttttgatggtaaattacaatcagaatcaactaataatggaaaaaataagagagatgtagatttcgaaggtacagatgaacccatttttggaaagaagcccaggatagaagagtcaataactgaagacttaagtttggcagacctgatgcccagagtcaaggtacaatcagttgaaactgttgaagggtgtacacatgaggtatgccattgcattggccttaagggaaaagcagcgtgtaatatttaccagcccaattaaggctctgagtaaccaaaaataccgtgaaatgtatgaagaatttcaagatgttggtttgatgactggtgatgttactattaatcctacggcatcttgtcttgttatgaccacagagattttgagaagtatgctttacagaggttccgaagttatgagagaagttgcttgggttatatttgatgaaattcattatatgagagattcagaacgtggtgtagtatgggaagaaactattattttgcttcctgataacgtccactatgtctttctttcggctactattccaaatgcccgacagtttgctgaatggatttgccatttacataaacagccttgtcatgttatttacacagattatcggcccactccattgcaacactacatttttccagcagggggagatggcctgcatcttgtggttgatgaaaat

SEQ ID NO: 187426 - DNA, 3271 bp, Homo sapiens
  Payload ID: 16901
  Gene Symbol: SKIV2L2
  Gene Name: superkiller viralicidic activity 2-like 2 (S. cerevisiae)
  ENST ID: ENST00000506750
  CDS Start-End: 14-283
actgctcccaaaaatggcggacgcattcggagatgagctgttcagcgtgttcgagggcgactcgaccactgcggcgggaaccaaaaaagacaaggaaaaggacaaggggaaatggaaggggcctccagggtctgcagacaaggcagggttgcacttcctgcagaagaggattatttaccacttaaaccacgagttggaaaagctgctaaggaatacccgttcattcttgatgcttttcaaagagaggccattcagtgtgttgacaataatcagtctgttctagtatctgcacatacctcagcgggaaaaacagtatgcgccgagtatgccattgcattggccttaagggaaaagcagcgtgtaatatttaccagcccaattaaggctctgagtaaccaaaaataccgtgaaatgtatgaagaatttcaagatgttggtttgatgactggtgatgttactattaatcctacggcatcttgtcttgttatgaccacagagattttgagaagtatgctttacagaggttccgaagttatgagagaagttgcttgggttatatttgatgaaattcattatatgagagattcagaacgtggtgtagtatgggaagaaactattattttgcttcctgataacgtccactatgtctttctttcggctactattccaaatgcccgacagtttgctgaatggatttgccatttacataaacagccttgtcatgttatttacacagattatcggcccactccattgcaacactacatttttccagcagggggagatggcctgcatcttgtggttgatgaaaatggtgacttcagagaagataattttaatactgcaatgcaagtgcttcgagatgcaggtgatttggccaaaggagaccagaaagggcggaaaggaggaacaaaaggaccatcaaatgttttcaaaattgtgaagatgattatggaaagaaatttccaacctgtgattattttcagttttagtaagaaagattgtgaagcctatgcacttcaaatgaccaaattagatttcaacacagatgaagaaaagaagatggttgaagaagtattcagtaatgcaattgattgcttatccgatgaagataaaaaactccctcaggtagaacatgtacttcctcttttgaagaggggaattggtattcaccatggtggtttacttcctattttgaaagaaactatagaaattctcttttctgaaggattgataaaggccttatttgccacggagacctttgctatgggaattaacatgccagctagaactgttttatttacaaatgcccgcaaatttgatgggaaggatttccgatggatttcttctggtgaatacattcagatgtctggtcgtgctggaaggagaggaatggatgatagaggaattgtaattcttatggtagatgaaaagatgagcccaacaattggaaaacaattacttaagggctccgctgatcctctaaatagtgctttccatttgacctacaacatggttttgaacttactacgtgtagaagaaattaatcctgagtacatgttggaaaaatccttctaccagtttcagcattatagagcaattccaggagtagtagagaaggtaaagaattcagaagaacagtataataaaatagtaattcccaatgaagaaagtgtggttatctattataagattagacagcagcttgccaaattgggtaaagaaattgaagaatatattcacaaaccaaaatactgcttaccttttctacaaccaggtcgtttggtaaaggtaaagaatgaaggagatgactttggctggggagtagtggtgaatttctcaaaaaagtcaaatgttaagcctaactctggtgaactggatcctttgtatgtagtagaagtacttctgcgctgtagcaaagagagcttgaaaaattcagctacagaagctgcaaaaccagctaaacctgatgagaaaggagagatgcaggttgtcccagttttggtgcatctcctgtctgctatcagcagtgttaggctttacattcctaaagaccttcggccggtggacaatagacagagtgttttaaaatcaatacaggaagttcagaaacgttttcctgacggcatccccttattagaccctattgatgatatgggcattcaagatcaagggctgaaaaaagtcattcagaaagtagaagcttttgagcatcgaatgtattctcatccacttcacaatgatccaaatttggaaactgtgtatacgctttgtgaaaaaaaagcacagattgcaatagatattaaatctgcaaagcgagaactgaagaaagcaagaacagtcctacaaatggatgaactcaaatgtcgcaaacgtgttttaagaaggttgggatttgctacttcttctgatgtaatagagatgaaaggacgagtggcttgtgagataagcagtgctgatgagctccttctaactgagatgatgtttaatggccttttcaatgacctttctgcagaacaggcaacagcattattaagctgctttgtgtttcaagagaattctagtgagatgcccaaattaacagaacaattagcaggaccacttcgtcaaatgcaggaatgtgctaaaagaattgcaaaagtttcagcagaagccaaattggaaattgatgaggaaacttatctaagctcatttaaacctcacttaatggatgtagtatatacctgggcaactggagctacatttgcccatatctgcaaaatgacagatgtctttgaaggcagcataattcgttgtatgaggcgcctggaagaattgcttcgacaaatgtgtcaagcagcaaaagccattggaaacactgagctggaaaataaatttgcagaaggaatcaccaaaatcaagagagatattgtgtttgctgccagcctctacttgtagagtcagctaaaggaatgtgagattttaaattattgaccacctgtttgattacagttgactacaaatgcctgcaagtgtggatttggttctcccatacattttaatatgtattatatttaaatcaaacatcattcatagaaagcatattacatacatgtttatacataagcattacatttttttaataaaaatgtatacaggtggggcactgttttggtggaaggcttggagtttttttaatgagtttagagctattagataaccactgagttaaaggtaactatgtacacacaaagtgtgcatccaagaggcatagcagcagcagaagtcttta

SEQ ID NO: 187427 - DNA, 2185 bp, Homo sapiens
  Payload ID: 16901
  Gene Symbol: SKIV2L2
  Gene Name: superkiller viralicidic activity 2-like 2 (S. cerevisiae)
  ENST ID: ENST00000508716
  CDS Start-End: 1-217
cttaatggatgtagtatatacctgggcaactggagctacatttgcccatatctgcaaaatgacagatgtctttgaaggcagcataattcgttgtatgaggcgcctggaagaattgcttcgacaaatgtgtcaagcagcaaaagccattggaaacactgagctggaaaataaatttgcagaaggtcagtatcaaatggataagctgtttctaatttagacaaatttggtgaagcaaatcttgagccctggaccacaacctaggaggacgttttgagatgttcttcactgcattgtcatggagagctatctactagtgtttctataaaatttagtgtgttgggggaaaagttgagattttatatatacatgcatttacgtatattaattgtacgctaactacatgccaggcattgttttaagcactaggggatatagtgaacaaaaagacacccctgccttcatggagtttacattctagtgtggggagatagacaataagtcaacaattaaatttatcagatggtgataagtctgtaagataaaaacaaagcagaaaagacaatagaattggcagatggatatgatggtctagggcctccacagggaaggtggcagttaaggcctttggtgtatgcttgatgtacgtgaacaccagcaagaggccagtgtggctggagcagaatgggcagtgagtagaggagtaggggttgaagtgagaaaggaaatgattccatagttcccagccccaggcttctcaactctgcagtgactggaggtgtggagtttgggagtgacctgccccaacttggactttacaaggtaattgttgctcttacattcagggcaagtctgtagagtagcacagtagaagtggggagaacagatcaagaaaggatggctaaaccaaggtggtagtaatggagtggtggtgggggggcaaggggcataagcttcagtcctgtctactgactcttgaccaagaaaaaggactaagttaatcaaagaatataaccacattgttgctgagtcagtcaatgctagtgatttctgcaaacaacttagtgtcctaagaagaggtttgcaaaaactggctgatatttccacagttgataaatgtaggcctgtttaatgactcagaatttaagtgtaggtgtcaaagttttaaaaataatttgtaatcaaaatttgtatttgtccttccttggcctagaaagaatttcacatgggaactgaaaaaaaagtgtcttctgatataggttgaaaatccaagtctttggattttacatttctttagacagtttagtccttccctataattttttttatttttatttttatttatttatttagtgtgtggagacagagtttcgctcttgttgccccaggctggagtgcaatggcgcaatctcggctcactgcaacctccacatccacctcccaggttcaagcgattctcctgcctcagcctcctgagtagctgaactacaggcatgcgccaccacgcccggctgattttgtatttctagtagagacggggtttctccatgttggtcgggctgctcttgaactcctgacctcaggtgatccgctcgccttggcctcccagagtgctgggattacaggcatgagctactgcgcccgacctagcatttatctttttaaacagttctagacacctctttcctggccagcccccatggagtatttcagagtcaaaagaacaggggtctggcttgtatgttttccacctcacagaggtggctgcaaattcctctaggtgttcagcaaggtgtttgactttctaggctgctcgcttaccagttgaatcagggttggtatactggctttaaaatttcggtagaggcaagttaggtgttttgtggtcttgaaagtttaaaccttactttcttttctcttaggaatcaccaaaatcaagagagatattgtgtttgctgccagcctctacttgtagagtcagctaaaggaatgtgagattttaaattattgaccacctgtttgattacagttgactacaaatgcctgcaagtgtggatttggttctcccatacattttaatatgtattatatttaaatcaaacatcattcatagaaagcatattacatacatgtttatacataagcattacatttttttaataaaaatgtatacaggtggggcactgtt

SEQ ID NO: 187428 - DNA, 966 bp, Homo sapiens
  Payload ID: 16902
  Gene Symbol: SOD1
  Gene Name: superoxide dismutase 1, soluble
  Uniprot ID: P00441
  ENST ID: ENST00000270142
  CDS Start-End: 149-613
gtttggggccagagtgggcgaggcgcggaggtctggcctataaagtagtcgcggagacggggtgctggtttgcgtcgtagtctcctgcagcgtctggggtttccgttgcagtcctcggaaccaggacctcggcgtggcctagcgagttatggcgacgaaggccgtgtgcgtgctgaagggcgacggcccagtgcagggcatcatcaatttcgagcagaaggaaagtaatggaccagtgaaggtgtggggaagcattaaaggactgactgaaggcctgcatggattccatgttcatgagtttggagataatacagcaggctgtaccagtgcaggtcctcactttaatcctctatccagaaaacacggtgggccaaaggatgaagagaggcatgttggagacttgggcaatgtgactgctgacaaagatggtgtggccgatgtgtctattgaagattctgtgatctcactctcaggagaccattgcatcattggccgcacactggtggtccatgaaaaagcagatgacttgggcaaaggtggaaatgaagaaagtacaaagacaggaaacgctggaagtcgtttggcttgtggtgtaattgggatcgcccaataaacattcccttggatgtagtctgaggccccttaactcatctgttatcctgctagctgtagaaatgtatcctgataaacattaaacactgtaatcttaaaagtgtaattgtgtgactttttcagagttgctttaaagtacctgtagtgagaaactgatttatgatcacttggaagatttgtatagttttataaaactcagttaaaatgtctgtttcaatgacctgtattttgccagacttaaatcacagatgggtattaaacttgtcagaatttctttgtcattcaagcctgtgaataaaaaccctgtatggcacttattatgaggctattaaaagaatccaaattcaaactaaa

SEQ ID NO: 187429 - DNA, 865 bp, Homo sapiens
  Payload ID: 16902
  Gene Symbol: SOD1
  Gene Name: superoxide dismutase 1, soluble
  ENST ID: ENST00000389995
  CDS Start-End: 105-512
gtagtcgcggagacggggtgctggtttgcgtcgtagtctcctgcagcgtctggggtttccgttgcagtcctcggaaccaggacctcggcgtggcctagcgagttatggcgacgaaggccgaaagtaatggaccagtgaaggtgtggggaagcattaaaggactgactgaaggcctgcatggattccatgttcatgagtttggagataatacagcaggctgtaccagtgcaggtcctcactttaatcctctatccagaaaacacggtgggccaaaggatgaagagaggcatgttggagacttgggcaatgtgactgctgacaaagatggtgtggccgatgtgtctattgaagattctgtgatctcactctcaggagaccattgcatcattggccgcacactggtggtccatgaaaaagcagatgacttgggcaaaggtggaaatgaagaaagtacaaagacaggaaacgctggaagtcgtttggcttgtggtgtaattgggatcgcccaataaacattcccttggatgtagtctgaggccccttaactcatctgttatcctgctagctgtagaaatgtatcctgataaacattaaacactgtaatcttaaaagtgtaattgtgtgactttttcagagttgctttaaagtacctgtagtgagaaactgatttatgatcacttggaagatttgtatagttttataaaactcagttaaaatgtctgtttcaatgacctgtattttgccagacttaaatcacagatgggtattaaacttgtcagaatttctttgtcattcaagcctgtgaataaaaaccctgtatggcacttattatgaggctattaaaagaatccaaattcaaactaaa

SEQ ID NO: 187430 - DNA, 991 bp, Homo sapiens
  Payload ID: 16903
  Gene Symbol: SOD2
  Gene Name: superoxide dismutase 2, mitochondrial
  ENST ID: ENST00000337404
  CDS Start-End: 112-663
gcgctttcttaaggcccgcgggcggcgcaggagcggcactcgtggctgtggtggcttcggcagcggcttcagcagatcggcggcatcagcggtagcaccagcactagcagcatgttgagccgggcagtgtgcggcaccagcaggcagctggctccggttttggggtatctgggctccaggcagaagcacagcctccccgacctgccctacgactacggcgccctggaacctcacatcaacgcgcagatcatgcagctgcaccacagcaagcaccacgcggcctacgtgaacaacctgaacgtcaccgaggagaagtaccaggaggcgttggccaagggggagttgctggaagccatcaaacgtgactttggttcctttgacaagtttaaggagaagctgacggctgcatctgttggtgtccaaggctcaggttggggttggcttggtttcaataaggaacggggacacttacaaattgctgcttgtccaaatcaggatccactgcaaggaacaacaggccttattccactgctggggattgatgtgtgggagcacgcttactaccttcagtataaaaatgtcaggcctgattatctaaaagctatttggaatgtaatcaactgggagaatgtaactgaaagatacatggcttgcaaaaagtaaaccacgatcgttatgctgagtatgttaagctctttatgactgtttttgtagtggtatagagtactgcagaatacagtaagctgctctattgtagcatttcttgatgttgcttagtcacttatttcataaacaacttaatgttctgaataatttcttactaaacattttgttattgggcaagtgattgaaaatagtaaatgctttgtgtgattgaatctgattggacattttcttcagagagctaaattacaattgtcatttataaaaccatcaaaaatattccatccatatactttggggacttgtagggatgcctttctagtcctat

SEQ ID NO: 187431 - DNA, 815 bp, Homo sapiens
  Payload ID: 16903
  Gene Symbol: SOD2
  Gene Name: superoxide dismutase 2, mitochondrial
  ENST ID: ENST00000367054
  CDS Start-End: 62-613
gtggcttcggcagcggcttcagcagatcggcggcatcagcggtagcaccagcactagcagcatgttgagccgggcagtgtgcggcaccagcaggcagctggctccggttttggggtatctgggctccaggcagaagcacagcctccccgacctgccctacgactacggcgccctggaacctcacatcaacgcgcagatcatgcagctgcaccacagcaagcaccacgcggcctacgtgaacaacctgaacgtcaccgaggagaagtaccaggaggcgttggccaagggggagttgctggaagccatcaaacgtgactttggttcctttgacaagtttaaggagaagctgacggctgcatctgttggtgtccaaggctcaggttggggttggcttggtttcaataaggaacggggacacttacaaattgctgcttgtccaaatcaggatccactgcaaggaacaacaggccttattccactgctggggattgatgtgtgggagcacgcttactaccttcagtataaaaatgtcaggcctgattatctaaaagctatttggaatgtaatcaactgggagaatgtaactgaaagatacatggcttgcaaaaagtaaaccacgatcgttatgctgatcataccctaatgatcccagcaagataatgtcctgtcttctaagatgtgcatcaagcctggtacatactgaaaaccctataaggtcctggataatttttgtttgattattcattgaagaaacatttattttccaattgtgtgaagtttttgactgttaataaaagaatctgtcaaccatcaaa

SEQ ID NO: 187432 - DNA, 990 bp, Homo sapiens
  Payload ID: 16903
  Gene Symbol: SOD2
  Gene Name: superoxide dismutase 2, mitochondrial
  ENST ID: ENST00000367055
  CDS Start-End: 68-736
gctgtggtggcttcggcagcggcttcagcagatcggcggcatcagcggtagcaccagcactagcagcatgttgagccgggcagtgtgcggcaccagcaggcagctggctccggttttggggtatctgggctccaggcagaagcacagcctccccgacctgccctacgactacggcgccctggaacctcacatcaacgcgcagatcatgcagctgcaccacagcaagcaccacgcggcctacgtgaacaacctgaacgtcaccgaggagaagtaccaggaggcgttggccaagggagatgttacagcccagatagctcttcagcctgcactgaagttcaatggtggtggtcatatcaatcatagcattttctggacaaacctcagccctaacggtggtggagaacccaaaggggagttgctggaagccatcaaacgtgactttggttcctttgacaagtttaaggagaagctgacggctgcatctgttggtgtccaaggctcaggttggggttggcttggtttcaataaggaacggggacacttacaaattgctgcttgtccaaatcaggatccactgcaaggaacaacaggccttattccactgctggggattgatgtgtgggagcacgcttactaccttcagtataaaaatgtcaggcctgattatctaaaagctatttggaatgtaatcaactgggagaatgtaactgaaagatacatggcttgcaaaaagtaaaccacgatcgttatgctgatcataccctaatgatcccagcaagataatgtcctgtcttctaagatgtgcatcaagcctggtacatactgaaaaccctataaggtcctggataatttttgtttgattattcattgaagaaacatttattttccaattgtgtgaagtttttgactgttaataaaagaatctgtcaaccatcaaagaggtctgcattatgcttgcatgtcaaaaactttaaaaatcctataatcttc

SEQ ID NO: 187433 - DNA, 523 bp, Homo sapiens
  Payload ID: 16903
  Gene Symbol: SOD2
  Gene Name: superoxide dismutase 2, mitochondrial
  ENST ID: ENST00000401980
  CDS Start-End: 341-523
tcgccttctggcccactcacaggagagtcgcctttcaggcgtggccgcagtcactcgcccgccgccgaaccccgccaggagaggaaaggtgaagggagggaggccgtcggcctagcccgatcggggcctcgaggcacaatggagcagctgctccccggtaacactccccgtcctttcccaggagcctggcgcgagctccgcgggccccggagctcagcaagctcacaccagcaggcagctggctccggttttggggtatctgggctccaggcagaagcacagcctccccgacctgccctacgactacggcgccctggaacctcacatcaacgcgcagatcatgcagctgcaccacagcaagcaccacgcggcctacgtgaacaacctgaacgtcaccgaggagaagtaccaggaggcgttggccaagggggagttgctggaagccatcaaacgtgactttggttcctttgacaagtttaaggagaagctgacggctgcatctgttggtgtccaaggctcaggt

SEQ ID NO: 187434 - DNA, 917 bp, Homo sapiens
  Payload ID: 16903
  Gene Symbol: SOD2
  Gene Name: superoxide dismutase 2, mitochondrial
  ENST ID: ENST00000444946
  CDS Start-End: 75-563
actcgtggctgtggtggcttcggcagcggcttcagcagatcggcggcatcagcggtagcaccagcactagcagcatgttgagccgggcagtgtgcggcaccagcaggcagctggctccggttttggggtatctgggctccaggcagaagcacagcctccccgacctgccctacgactacggcgccctggaacctcacatcaacgcgcagatcatgcagctgcaccacagcaagcaccacgcggcctacgtgaacaacctgaacgtcaccgaggagaagtaccaggaggcgttggccaagggagatgttacagcccagatagctcttcagcctgcactgaagttcaatggtggtggtcatatcaatcatagcattttctggacaaacctcagccctaacggtggtggagaacccaaaggccttattccactgctggggattgatgtgtgggagcacgcttactaccttcagtataaaaatgtcaggcctgattatctaaaagctatttggaatgtaatcaactgggagaatgtaactgaaagatacatggcttgcaaaaagtaaaccacgatcgttatgctgagtatgttaagctctttatgactgtttttgtagtggtatagagtactgcagaatacagtaagctgctctattgtagcatttcttgatgttgcttagtcacttatttcataaacaacttaatgttctgaataatttcttactaaacattttgttattgggcaagtgattgaaaatagtaaatgctttgtgtgattgaatctgattggacattttcttcagagagctaaattacaattgtcatttataaaaccatcaaaaatattccatccatatactttggggacttgtagggatgcctttctagtcctattctattgcagttatagaaaatctagt

SEQ ID NO: 187435 - DNA, 2045 bp, Homo sapiens
  Payload ID: 16903
  Gene Symbol: SOD2
  Gene Name: superoxide dismutase 2, mitochondrial
  ENST ID: ENST00000452684
  CDS Start-End: 78-500
ggcactcgtggctgtggtggcttcggcagcggcttcagcagatcggcggcatcagcggtagcaccagcactagcagcatgttgagccgggcagtgtgcggcaccagcaggcagctggctccggttttggggtatctgggctccaggcagaagcacagcctccccgacctgccctacgactacggcgccctggaacctcacatcaacgcgcagatcatgcagctgcaccacagcaagcaccacgcggcctacgtgaacaacctgaacgtcaccgaggagaagtaccaggaggcgttggccaagggtaggttccaggctgagcggcgggaggcagtccccggcagaggcgaccccagggagccaggccccatacggacgggcctctccgtggaggagaactcgcttcgtatttgtaccggttccgagttttccaggcacgatagtctctcttttaaacacatggtctacctcattgtagaaggagtgcctcgatgggtttgaacacacttctgtcatctcagggaacttggggtcctgcgaaggagcttgccttactgttgtgagccacattccgttacacatattgccagcactggtgaattgtagggcctgaaaagaaagctctactgtgtcactcgttttttttgcaaattgaaattgttcttgttgtataatgtgctttggggaaatgtttggtctctcaggtaggtgtgccagccgtttgcaggagggctgagagcgcctgtccactggtggccagacatcatcgggtccgcaggtgtctctgagtgtcagggtcacctcctgatagaagtgggagtggtgtcttactgccaggtcacactgaaggtgggagacaggaggacactactccgtgctaggaaccatggtccttgtcatcttcctgagagcaaacggggtcgggactccagcctaggacttggagactccctgcatccccagctaccctgcaggtgaaacttcactgagcccacttgacttcaggtgggagaggaggaggcacaccgttgtggtgtgcgttaccaaaaaagcagtaacctaactgtggaacagttcaggatctttagacttgatacttttcttgatttcccttaggggtcaaagttcacaaggaaaatagccctttagtgggaaactgaaacaggcttgtttttatttactatttactcatatttgtaatgcaattaaaatatatgttgttaactttttttttttttctcaagagctcggttgataaaaccaggggtatgtggactttttgagtctgtgccttttgggggtgtgtatgggaatgttatgttttaacgttttttacaaaatagtattgtctttttaatttattcgttagtggtttgcacaaggaagataatcgatagtcatgttttttagactctctgtattgcttggtaagctacgtagtaaaaaatgtttacttttccttaaatgttttgaatttcggggttatgaaatttgttgagtaatttttagacagtcacatcttgttgactggaggcatctagtggaaaaatgcagtatttcagcctgattgtgtttgaagtaaatgattaaaagaggaggaagttaccacattctggaagatttacttgagacagacgaaccttgaattacgggaaaaggccccgtgatttaggaaataacaaatttgggaaacatgtaatggggagagactggggaataccccagttgtgaaagtacttcctgtaaggcaacatctgacaccaggaacctttctcttcagtattttaaaaacaacttaatttcagtcctttacttgtggaatcagagccttacttatgtaatacaacccactggaaaaaagctttttattgtattgtactatattgtttataagtgattgagtacctgcagagctttcttttacttaaacatattttaaaaattattaaaaagattttcatgtttgaaaacttggggaaaaaagataaaacaatgtcataatctcatcacatttaactgactaatatgaatatttttcaacaaaaa

SEQ ID NO: 187436 - DNA, 507 bp, Homo sapiens
  Payload ID: 16903
  Gene Symbol: SOD2
  Gene Name: superoxide dismutase 2, mitochondrial
  ENST ID: ENST00000537657
  CDS Start-End: 173-507
tattaccatcaacaccttctattcacactctatctcccaagtgctagcagtctaaagcaccagcaggcagctggctccggttttggggtatctgggctccaggcagaagcacagcctccccgacctgccctacgactacggcgccctggaacctcacatcaacgcgcagatcatgcagctgcaccacagcaagcaccacgcggcctacgtgaacaacctgaacgtcaccgaggagaagtaccaggaggcgttggccaagggagatgttacagcccagatagctcttcagcctgcactgaagttcaatggtggtggtcatatcaatcatagcattttctggacaaacctcagccctaacggtggtggagaacccaaaggggagttgctggaagccatcaaacgtgactttggttcctttgacaagtttaaggagaagctgacggctgcatctgttggtgtccaaggctcaggttggggttggcttggtttcaataaggaacggggaca

SEQ ID NO: 187437 - DNA, 4302 bp, Homo sapiens
  Payload ID: 16903
  Gene Symbol: SOD2
  Gene Name: superoxide dismutase 2, mitochondrial
  ENST ID: ENST00000546260
  CDS Start-End: 75-500
actcgtggctgtggtggcttcggcagcggcttcagcagatcggcggcatcagcggtagcaccagcactagcagcatgttgagccgggcagtgtgcggcaccagcaggcagctggctccggttttggggtatctgggctccaggcagaagcacagcctccccgacctgccctacgactacggcgccctggaacctcacatcaacgcgcagatcatgcagctgcaccacagcaagcaccacgcggcctacgtgaacaacctgaacgtcaccgaggagaagtaccaggaggcgttggccaagggtaggttccaggctgagcggcgggaggcagtccccggcagaggcgaccccagggagccaggccccatacggacgggcctctccgtggaggagaactcgcttcgtatttgtaccggttccgagttttccaggagatgttacagcccagatagctcttcagcctgcactgaagttcaatggtggtggtcatatcaatcatagcattttctggacaaacctcagccctaacggtggtggagaacccaaaggggagttgctggaagccatcaaacgtgactttggttcctttgacaagtttaaggagaagctgacggctgcatctgttggtgtccaaggctcaggttggggttggcttggtttcaataaggaacggggacacttacaaattgctgcttgtccaaatcaggatccactgcaaggaacaacaggccttattccactgctggggattgatgtgtgggagcacgcttactaccttcagtataaaaatgtcaggcctgattatctaaaagctatttggaatgtaatcaactgggagaatgtaactgaaagatacatggcttgcaaaaagtaaaccacgatcgttatgctgagtatgttaagctctttatgactgtttttgtagtggtatagagtactgcagaatacagtaagctgctctattgtagcatttcttgatgttgcttagtcacttatttcataaacaacttaatgttctgaataatttcttactaaacattttgttattgggcaagtgattgaaaatagtaaatgctttgtgtgattgaatctgattggacattttcttcagagagctaaattacaattgtcatttataaaaccatcaaaaatattccatccatatactttggggacttgtagggatgcctttctagtcctattctattgcagttatagaaaatctagtcttttgccccagttacttaaaaataaaatattaacactttcccaagggaaacactcggctttctatagaaaattgcactttttgtcgagtaatcctctgcagtgatacttctggtagatgtcacccagtggtttttgttaggtcaaatgttcctgtatagtttttgcaaatagagctgtatactgtttaaatgtagcaggtgaactgaactggggtttgctcacctgcacagtaaaggcaaacttcaacagcaaaactgcaaaaaggtggtttttgcagtaggagaaaggaggatgtttatttgcagggcgccaagcaaggagaattgggcagctcatgcttgagacccaatctccatgatgacctacaagctagagtatttaaaggcagtggtaaatttcaggaaagcagaagttaaaggcaaaattgtaaatcagtcgagatcgggtgccttcagggtggtatggctgtataccaaaattgtaaatcactacatgaagcttatatattggtttggcctgaaaggtgaagtggggtaggcagggggcgggcttacaggttatggtggattcaaagactccctgatttgtgattggttaaggaagcaaagctttgtctaaaaacttggggtccgcagaaaggaacattaaggtctggccaggcccctcaggaagaaactgagagcaaagaatggaggtcagagtttagtccctggtgttcccccttatctgacgtctgtgtgaatccatttggtgggggtctgggtttctgaaaagtagctcaggggcacgtgttaaggatgtctctaggtgactctaacttccctggctattgtttgaaactgttatgaccttcttgcttatcagcttgctggtttccttctcggggcgagctgggtgcctggagttttcggtgaaggaaactcaagattctcctttatttctgtgcttgtgggaatccccctggcacaccccaaagaggggtccctgctccgtctcacagggatctttttgtatatttggcttagcatcatacatttgccatgttgtttcatcatctgcctaatttactgtttttgaatatttcatttgtttctaattgttactacagataatgctggggtgagcaactctgtgtacataggtttatctcctattggaatattttctttatataggcgttttttttttttctttttttttggagacagagtcttgctctgttgcccaggctggagtgcagtggcgcgaccggagctcactgcaacctccacttcccgggttcaagtgattgtcccacctcagcctcctgaatagctgggattacaggtgcatgctaccatgcctggctactttttgtatttttagcagagacagggtttcaccatgttggccagggtggtctcgaactcctgacctcaagtgatccgtctggctcagcctcccaaagtgctgggattacaggtgtgagccactgcacctggcctatataggcttttttcttaaacctatttagtaatgttttcccaagtttattttttatttttaattttttccccaagtttatttttctatttttttttcatggaaaaatggggtaacttagcagtttcaatattgaagactgaagtttaaaaaaaatttaaattcaaggtacttttaaaattcagttagaaaagtaggctttaaaaattattagagacaagagtaccaaagcggtgtgtgtatgtgtgtgtgtgtatgcatgcttgtggattggaaaaactttggagactgattacttttcattatatatgtgtcacagtgaaacagcttttatgtgtcatgtaagattactgcttgcctctctaaggaaggtcgtgactgtttaaatagacgggcaaggtggaaccttttgaaagatgagcttttgaatataagttgtctgctagatcatggtttgtattgaactaacaaggtttgcagatctgctgacttatataaagctttttgattcctactaagctttaagatttaaaaaatgttcaatgttgaaatttctgtggggctctatttttgctttggctttctggtgagagagtgaggaagcattctttccttcactaagtttgtctttcttgtcttctggatagattgattttaagagactaagggaatttacaaactaaagattttagtcatctggtggaaaaggagactttaagattgtttagggctgggcggggtgactcacatctgtaatcccagcactttgggaggccaaggcaggcagaacacttgaaggagttcaagaccagcgtggccaacgtggtgaaaccctgtctctactaaaaatacaaaaattgtttagctctgtttttcataatagaaatagaaaaggtaaaattgcttttcttctgaaaagaacaagtattgttcatccaagaagggtttttgtgactgaatcagcagtgcctgccctagtcatagctgtgcttcaaaaacctcagcatgattagtgttggagcaaaacaaggaagcaaagcaaatactgtttttgaaattctatctgttgcttgaactattttgtaataattaaactttgatgttgagaaatcacaactttattgtacacttcattgcaacttgaaattcatggtcttaaagtgagatttgaatttctattgagcgcctttaaaaaagtaataccaaaccataaagttaaaatctatgtatattgagtcatatctaaaaccacgtataaacataaattgtatttcctgttttaattccaggggaagtactgtttgggaaagctattattaggtaaatgttttacaaattactgtttctcactttcagtcataccctaatgatcccagcaagataatgtcctgtcttctaagatgtgcatcaagcctggtacatactgaaaaccctataaggtcctggataatttttgtttgattattcattgaagaaacatttattttccaattgtgtgaagtttttgactgttaataaaagaatctgtcaaccatcaaagaggtctgcattatgcttgcatgtcaaaaactttaaaaatcctataatcttc

SEQ ID NO: 187438 - DNA, 571 bp, Homo sapiens
  Payload ID: 16903
  Gene Symbol: SOD2
  Gene Name: superoxide dismutase 2, mitochondrial
  ENST ID: ENST00000545162
  CDS Start-End: 1-571
atgttcgccttctggcccactcacaggagagtcgcctttcaggcgtggccgcagtcactcgcccgccgccgaaccccgccaggagaggaaagcaccagcaggcagctggctccggttttggggtatctgggctccaggcagaagcacagcctccccgacctgccctacgactacggcgccctggaacctcacatcaacgcgcagatcatgcagctgcaccacagcaagcaccacgcggcctacgtgaacaacctgaacgtcaccgaggagaagtaccaggaggcgttggccaagggagatgttacagcccagatagctcttcagcctgcactgaagttcaatggtggtggtcatatcaatcatagcattttctggacaaacctcagccctaacggtggtggagaacccaaaggggagttgctggaagccatcaaacgtgactttggttcctttgacaagtttaaggagaagctgacggctgcatctgttggtgtccaaggctcaggttggggttggcttggtttcaataaggaacggggacacttacaaattgctgcttgtccaaatcagg

SEQ ID NO: 187439 - DNA, 2558 bp, Homo sapiens
  Payload ID: 16903
  Gene Symbol: SOD2
  Gene Name: superoxide dismutase 2, mitochondrial
  Uniprot ID: P04179
  ENST ID: ENST00000546087
  CDS Start-End: 1829-2359
aaagccgggctcagaccacctagcagttccgcccctgccgcaggcattaccgatggcgcctcccggagccggccaatcaggggccccggaggagaacacctccctacgccaaccaatgggagaggcaggccacgcgatggctctaccccgggagccaatccaagcacgagggacggagtgcgcacatcgggagaggagagggtggggctgtagcaccaggtcagggaacgcgggagccgcagggttccagggatcccgcggctcctcgcggcttggcctgaccggcttcctccacatacgcccctctcctacacaagtccggccctcggcgctcctgccgaagcagcaggcgcctcggactctgcgcggctcccgccggccactcacctatgatggtccgcgccgccgagacgatgaccacaggatctgagcctgcattcatcttgcttctcctgccgccgtctgccctgcgctgcctgcaagctaggcaaagctcctcctcgcagcccacaggcctgccgcgggcgggacctgaggtagccccgcccctcgccctccacctccccgcgcaccacctccccgcgcatcccactgtgcgcaggcgcaaggccggagcaggggcgggcggaggcgcgcggggcgcggggcgcggggcgcggggcggaagtgaggccggggcgcggggcgcggggcggaagtgaggccggggtctgggcttgcgggcagaaccgcggacctcggacgcatttacagagcgcctgaaaccccagtgtttctggacaccccaatgttggagttccccgacttgacgtcttgggcttttttttaaaaaatcttagggtttctcgaaacagtaaagactggggggtgacaaagacttatctctcgttcagctcaggactggaatcccacgggcgagaatctcgagtgcgagcccggcccgcggcgggtctcagcacagctctgatgggtccttttgctctcggcggcttcgggaggtcctatgcgtttctcctggcgccagtcattcgctcgcgtgaggggcttgctaggagcgtctcggtgcgagccccctgccttctaagatcaactctggctgtgaacgggtgaggacgccgggagcgtcttagcgtcacaaaagttcctttggttgacgtttggacagtgaaaggagcatgtaacaagtggggtcagttttgtttaaaaccctttctgacttcccagcctcttactgggcaaagttcataatttttctgagctttctagggtttccaggcaagcttatgaggggccaccgttacagcaacttgttgggaacacctggatagtggaacaagaaagctttgtcacaaagtcatgaaggggaaaactgttgacggacctggagaatcttcctgaagaactttaaagttgattgaaagaatcattaaatcctggaaacctacattaagactttgcagagatatgcggatgggtcagataaatcagagaagaaacatttctcaagtgtctacatgttctagaaggggaatttttcggaggtggccacttcttcggaatagtccgacgccatcaggcctctgaagcaaggggaaggggaaaagaaaaaagctgaaacacaaggttcatctgtagagacagcgtttcactatgttggccaggctggtctccaactcctgacattggcttatgttctttttaaaaagtttgatgcaccagcaggcagctggctccggttttggggtatctgggctccaggcagaagcacagcctccccgacctgccctacgactacggcgccctggaacctcacatcaacgcgcagatcatgcagctgcaccacagcaagcaccacgcggcctacgtgaacaacctgaacgtcaccgaggagaagtaccaggaggcgttggccaagggagatgttacagcccagatagctcttcagcctgcactgaagttcaatggtggtggtcatatcaatcatagcattttctggacaaacctcagccctaacggtggtggagaacccaaaggggagttgctggaagccatcaaacgtgactttggttcctttgacaagtttaaggagaagctgacggctgcatctgttggtgtccaaggctcaggttggggttggcttggtttcaataaggaacggggacacttacaaattgctgcttgtccaaatcaggatccactgcaaggaacaacaggccttattccactgctggggattgatgtgtgggagcacgcttactaccttcagtataaaaatgtcaggcctgattatctaaaagctatttggaatgtaatcaactgggagaatgtaactgaaagatacatggcttgcaaaaagtaaaccacgatcgttatgctgatcataccctaatgatcccagcaagataatgtcctgtcttctaagatgtgcatcaagcctggtacatactgaaaaccctataaggtcctggataatttttgtttgattattcattgaagaaacatttattttccaattgtgtgaagtttttgactgttaataaaagaatctgtcaaccatc

SEQ ID NO: 187440 - DNA, 551 bp, Homo sapiens
  Payload ID: 16903
  Gene Symbol: SOD2
  Gene Name: superoxide dismutase 2, mitochondrial
  ENST ID: ENST00000535561
  CDS Start-End: 2-551
gatgcttccgcgtgtcggaggaccaggtgccacctcaagagagaggccgtgggcggcgagccgcgggcgtttactcttagcagaagctcacctcaccagcaggcagctggctccggttttggggtatctgggctccaggcagaagcacagcctccccgacctgccctacgactacggcgccctggaacctcacatcaacgcgcagatcatgcagctgcaccacagcaagcaccacgcggcctacgtgaacaacctgaacgtcaccgaggagaagtaccaggaggcgttggccaagggagatgttacagcccagatagctcttcagcctgcactgaagttcaatggtggtggtcatatcaatcatagcattttctggacaaacctcagccctaacggtggtggagaacccaaaggggagttgctggaagccatcaaacgtgactttggttcctttgacaagtttaaggagaagctgacggctgcatctgttggtgtccaaggctcaggttggggttggcttggtttcaataaggaacggggacacttacaaa

SEQ ID NO: 187441 - DNA, 14266 bp, Homo sapiens
  Payload ID: 16903
  Gene Symbol: SOD2
  Gene Name: superoxide dismutase 2, mitochondrial
  ENST ID: ENST00000538183
  CDS Start-End: 162-830
cggggcggcggtgcccttgcggcgcagctggggtcgcggccctgctccccgcgctttcttaaggcccgcgggcggcgcaggagcggcactcgtggctgtggtggcttcggcagcggcttcagcagatcggcggcatcagcggtagcaccagcactagcagcatgttgagccgggcagtgtgcggcaccagcaggcagctggctccggttttggggtatctgggctccaggcagaagcacagcctccccgacctgccctacgactacggcgccctggaacctcacatcaacgcgcagatcatgcagctgcaccacagcaagcaccacgcggcctacgtgaacaacctgaacgtcaccgaggagaagtaccaggaggcgttggccaagggagatgttacagcccagatagctcttcagcctgcactgaagttcaatggtggtggtcatatcaatcatagcattttctggacaaacctcagccctaacggtggtggagaacccaaaggggagttgctggaagccatcaaacgtgactttggttcctttgacaagtttaaggagaagctgacggctgcatctgttggtgtccaaggctcaggttggggttggcttggtttcaataaggaacggggacacttacaaattgctgcttgtccaaatcaggatccactgcaaggaacaacaggccttattccactgctggggattgatgtgtgggagcacgcttactaccttcagtataaaaatgtcaggcctgattatctaaaagctatttggaatgtaatcaactgggagaatgtaactgaaagatacatggcttgcaaaaagtaaaccacgatcgttatgctgagtatgttaagctctttatgactgtttttgtagtggtatagagtactgcagaatacagtaagctgctctattgtagcatttcttgatgttgcttagtcacttatttcataaacaacttaatgttctgaataatttcttactaaacattttgttattgggcaagtgattgaaaatagtaaatgctttgtgtgattgaatctgattggacattttcttcagagagctaaattacaattgtcatttataaaaccatcaaaaatattccatccatatactttggggacttgtagggatgcctttctagtcctattctattgcagttatagaaaatctagtcttttgccccagttacttaaaaataaaatattaacactttcccaagggaaacactcggctttctatagaaaattgcactttttgtcgagtaatcctctgcagtgatacttctggtagatgtcacccagtggtttttgttaggtcaaatgttcctgtatagtttttgcaaatagagctgtatactgtttaaatgtagcaggtgaactgaactggggtttgctcacctgcacagtaaaggcaaacttcaacagcaaaactgcaaaaaggtggtttttgcagtaggagaaaggaggatgtttatttgcagggcgccaagcaaggagaattgggcagctcatgcttgagacccaatctccatgatgacctacaagctagagtatttaaaggcagtggtaaatttcaggaaagcagaagttaaaggcaaaattgtaaatcagtcgagatcgggtgccttcagggtggtatggctgtataccaaaattgtaaatcactacatgaagcttatatattggtttggcctgaaaggtgaagtggggtaggcagggggcgggcttacaggttatggtggattcaaagactccctgatttgtgattggttaaggaagcaaagctttgtctaaaaacttggggtccgcagaaaggaacattaaggtctggccaggcccctcaggaagaaactgagagcaaagaatggaggtcagagtttagtccctggtgttcccccttatctgacgtctgtgtgaatccatttggtgggggtctgggtttctgaaaagtagctcaggggcacgtgttaaggatgtctctaggtgactctaacttccctggctattgtttgaaactgttatgaccttcttgcttatcagcttgctggtttccttctcggggcgagctgggtgcctggagttttcggtgaaggaaactcaagattctcctttatttctgtgcttgtgggaatccccctggcacaccccaaagaggggtccctgctccgtctcacagggatctttttgtatatttggcttagcatcatacatttgccatgttgtttcatcatctgcctaatttactgtttttgaatatttcatttgtttctaattgttactacagataatgctggggtgagcaactctgtgtacataggtttatctcctattggaatattttctttatataggcgttttttttttttctttttttttggagacagagtcttgctctgttgcccaggctggagtgcagtggcgcgaccggagctcactgcaacctccacttcccgggttcaagtgattgtcccacctcagcctcctgaatagctgggattacaggtgcatgctaccatgcctggctactttttgtatttttagcagagacagggtttcaccatgttggccagggtggtctcgaactcctgacctcaagtgatccgtctggctcagcctcccaaagtgctgggattacaggtgtgagccactgcacctggcctatataggcttttttcttaaacctatttagtaatgttttcccaagtttattttttatttttaattttttccccaagtttatttttctatttttttttcatggaaaaatggggtaacttagcagtttcaatattgaagactgaagtttaaaaaaaatttaaattcaaggtacttttaaaattcagttagaaaagtaggctttaaaaattattagagacaagagtaccaaagcggtgtgtgtatgtgtgtgtgtgtatgcatgcttgtggattggaaaaactttggagactgattacttttcattatatatgtgtcacagtgaaacagcttttatgtgtcatgtaagattactgcttgcctctctaaggaaggtcgtgactgtttaaatagacgggcaaggtggaaccttttgaaagatgagcttttgaatataagttgtctgctagatcatggtttgtattgaactaacaaggtttgcagatctgctgacttatataaagctttttgattcctactaagctttaagatttaaaaaatgttcaatgttgaaatttctgtggggctctatttttgctttggctttctggtgagagagtgaggaagcattctttccttcactaagtttgtctttcttgtcttctggatagattgattttaagagactaagggaatttacaaactaaagattttagtcatctggtggaaaaggagactttaagattgtttagggctgggcggggtgactcacatctgtaatcccagcactttgggaggccaaggcaggcagaacacttgaaggagttcaagaccagcgtggccaacgtggtgaaaccctgtctctactaaaaatacaaaaattgtttagctctgtttttcataatagaaatagaaaaggtaaaattgcttttcttctgaaaagaacaagtattgttcatccaagaagggtttttgtgactgaatcagcagtgcctgccctagtcatagctgtgcttcaaaaacctcagcatgattagtgttggagcaaaacaaggaagcaaagcaaatactgtttttgaaattctatctgttgcttgaactattttgtaataattaaactttgatgttgagaaatcacaactttattgtacacttcattgcaacttgaaattcatggtcttaaagtgagatttgaatttctattgagcgcctttaaaaaagtaataccaaaccataaagttaaaatctatgtatattgagtcatatctaaaaccacgtataaacataaattgtatttcctgttttaattccaggggaagtactgtttgggaaagctattattaggtaaatgttttacaaattactgtttctcactttcagtcataccctaatgatcccagcaagataatgtcctgtcttctaagatgtgcatcaagcctggtacatactgaaaaccctataaggtcctggataatttttgtttgattattcattgaagaaacatttattttccaattgtgtgaagtttttgactgttaataaaagaatctgtcaaccatcaaagaggtctgcattatgcttgcatgtcaaaaactttaaaaatcctataatcttctgtcattttcactgagtttccatgggaaaggaatagtaaataatgggtagttgaaatattactcttaagaccaagacctgtatctccagtcatatctgtaataacatcatctgataacctaaaagcatagtattagggatatacgacaaaaccaaagtgtttttgctgttgtcacataccactcaatacttttacaccaggttgtccagtggacaccagctggatgtcctataattcaattctgacactgtctacctggaattggagtcagatcccacaggtggagggctcagcccacaagactgcccccactccagataccaatcgcaagtccctatacttctgactggctataaagtggggttcccgtgaccctttccttggttttgatttatttgctagagcagctcccagaacacagagaaacactctacttatgtttacccatttttaattttattactttattaaaactacatattggttacaatactaatttattgtaaaggatatttcatttatttatttttttatttagagatggagtctcactgtgtcacccaggctggagtgcggtggcacagtctcaactcactgcaacctccacctcctgagttcaagcgattctcatgcctcagcctcccaagtagctgggattacaagtgtgcaccaccatgcccagctaatttttgtatttttagtagagatggggtttcactctgttggccaggctggtctcaaactcctgacctcaagtcatccacccacctcagcctcccaaagtgctgagattacaggtgtgagccattgcctctggcttgtaaaggatatttcaaagaatacagatgaacagccagatggaagagatgcacagggcaaggcatgtgggaaggggtatggagctttcatgctctctccacgtcatcagctacccagaagctcatctggaccccgaccctttggggttttacggaggcttcattatgtcagcattaccattggcaattggcgattaactcaaccttcagcctctctcccctttctggaggttgggggttgaggctgggagtccaaaccctccaatcttgccttggtctttctggtaagcagccccccgtcctgaagctacctagaggctcccagccaccaatcatttcattggcaaaccaaagatacttcaaggggtttaggagccaagagaccaagcaaggattgagacaatatatatatttcttataaataacatgatcacaaatagtattttatatatttctcataatagctggttgtggttactcacacctatcatcccagctactaagaagctaaggcaggaggatcacaggcccaggagtttgcagctgtagtgagctatgattgtgctactgcactccagcctgggtgacagtgtgagaccctgtctcttaaagttcttgtaacatcttagaacattaaccaaccacagattattgccttaactctgaaaaataaagtaatcatacttttacaagatgtattttacataaagttctggtgatattttactctggtcattggaatataggagcttaccacctggtaccactcttcctaaagtggtatactatttggtatagtactggcatactatttggaaagggatgtgaagttggcatgacctgtctagggtgaagtcatgctgtctgctattcattgtgggctttacagtaatgagagtgcttctgttgtcaagatgcttctgggacacgttaaaaaaaatttaagatttctcagtttgtgaaaaggaaggagcacgaatgctttcaagttcctatgacatgctagtcatctttcagtgtgtcccattgttgcacccagtagtctcgatgcccagcgtcacggtgattccaagtttgcctctctgcccactataatttgtgctccatgaagtcccaggacatgaggttcttgttcatttgtgcgtctgggcccatatccaaatattaaacaatgtgacttaatgtatttatcatattgtaaatatgggtatccccaaggctcagaagttaacacagcatatccacagagaggtttgacagcatggctgtggtgactgggaaggccttatgcttgctcctccttctgctgcttgcctttgtgtgggcatggaaagaacattgaattaggtactggaagacctgggtcctggtcttggagattttaccagagcacctgtgggatattggtcaagatgcctggttttagtcctgctcctttgctgtgaaagaggatcttaaggtgccaactctggcattttattttttacttatttatttttaaattatactttaagttctagggtacatgtgtacaacatgcaggtttgttacatgtatacatgtgccatgttggtgtgctgcacctattaactcgtcatttacattaggtatatctcctaatgctatccctcccccttctccccacccctcgacaggccccggtgtgtgatgttccccttcctgtgtccaagtgttctcattgttcaattcccatctatgagtgagaacatgcggtgtttgtttttttgtccttggaatagtttgctgagaaggatggtttccagcttcatccatgtccctataaaggacatgaactcttccttttttatggctgcatagtattccatggtgtatatgtgccacatcttcttaaaccaatctatcattgatggacatttgggttggttccaagtctttgctattgtgaacagtgccacaataaatatacgtgtgcatgtgtctttatagcagcatgatttataatcctttgggtatatacccagtaatgggatggctgggtcaaatggtatttctagttctagatccctgaggaatcgccacactgtcttccacaatggttgaactagtttacagtcccaccaccagtgtaaaagtgttcctatttctccacatcctctccagcacctgttgtttcctgactttttaatgattgacattctaactggtgtgagatggtatctcattgtggttttgatttgcatttctctgatggcccatgatgatgagcatttttttcatgtgtctgttggatgcatggatgtcttcttttgagaagtgtctcttcatatccttcacctactttttgatggggtttgtttttttcttgtaagtttgtttgagttccttgtagattctggatattagccctttgtcagatgagtagattgcaaaaattttctcccattttgtaggttgcctgttcactctgatggtagtttcttttgctgtgcagaagctcttgagtttaatgagatcccatttgtcaattttggcttctgttgccattgcttttggtgttttagacatgaagtccttgcccatgcctgtgtcctgaatggtactgcataggttttcttctagggtttttatggttttaggtctaacatttaagtctttaatccatcttgaattaatttttgtataaggtgtaaggaagggatccagtttcagctttctacatgtggctagccagttttcccagcaccatttattaaatagggaatcctttccccatttcttgtttttgtcaggtttctcaaagatcagatagttgtagatgtgtggtattatttctgagggctctgttctgttccattggtctatatctctgttttggtactagtaccatgctgttttggttactgcagccttgtagtatagtttgaaatcaggtagcgtgatgcctccagctttgttcttttggcttaggatcgttttggcagtgcaggctcttttttggttccacatgaactttaaagtagttttttccaattctatgaagaaagtcatgggtagcttgatggggatggcattgaatctataaattaccttgggcagtatagccattttcacgatattgattcttcctatccatgagcatggaatgttcttccatttgtttgtgtcctcttttatttccttgagcagtggtttgtagttctccttgaagaggtccttcacatcccttgtaagttggattcctaggtattttattctctttgaggcagttgtgaatgggagttcactcatgatttggctctctgtttgtctgttgttggtgtataagaatgcttgtgatttttgcacattgattttgtatcctgagattttgctgaagttgcttatcaaattaaggagattttgggctgagatgatggggttttctaaatataaaatcatgtcatctgcaaacagggacaatttgacttcctcttttccttattgaataccctttatttctttctcctgcctgatggccctggccagaacttccaacactatgttgaataggagtggtgagagagggcatccctgtcttgtgccagttttcaaagggaatgcttccagtttttgcccattcagtctgatattggctgtgggtttgtcatagatagctcttattattttgagatatgtcccatcaatacctaattcattgagagtttttagcatgaagggctgttgaattttgtccaaggccttttctgcatctgttgagataatcatgtggtttttgtctttggttctgtttatatgctggattacttttattgatttgtgtatgttgaaccagccttgcatcccagggatgaagcccacttgatcatggtggataagctttttgatatgctgctggattcagtttgccagtattttattgaggatttttgcattgattttcatcagggatattggtctaaagttctctttttttgttatgtctctgccaggctttggtatcaggatgatgctggcttcataaaatgagttagggaggattccctctttttctattgattggaatagtttcagaaggaatggtaccagctcttccttgtacctctggtagaattcggctgtgaatccatcttgtcctggactttttttggttggtaggctattaattattgcctcaatttcagagcctgttattggtctattcagggattaaacttcttcctggtttagttttgagagggtgtatgtgtccaggaatttatctatttcttctagattttctagtttatttgcatagaggtgtttatagtattctctgtgtactctgtatttctgtgggattggtggtgatatccactttatcattttttattgcatttatttgattcttctctcttttcttgtttattagtcttgctagcggtctatcaattgtgtttatcttttcaaaaaaccagctcctggattcattcattttttgaaggtttttttgtgtctctgtctccttcagttctgctctgatcttagttatttcttgtcttctgctagctgttgaatgtgtttgctcttgcttctctaatatttttaattgtgatgttagagtgtcaattttagatctttcctgctttctcttgtgggcacttagtgctgtaaatttccctctacacactgctttaaatgtgtcccagagattctggtatgttgtgtctttgttctcgttggtttcaaagaacatctttatttctgccttcattttgttatgtacccagtagtcattcaggagcaggttgttcagtttccatgtagctgagtggttttgagtgagtttcttaatcctgagttctagtttgattgcactgtggtctgagacagtatgttataatttctgttcttttacatttgctgaggagtgctttacttccaactatgtggtcaattttggaataggtgcgatgtggtgctgagaagaatgtatattctgttgatttggggtggagagttctgtagatgtctattaggtctgcttggtgcagagctgaattcaattcctggatatccttgttaactttctgtctcgttgatctgtctaatattgacagtggggtgttagagtctcccattgttattgtgtgggagtctaaatctctttgtaggtctctaaggacttggtttatgaatctgggtgctcctgtattgggtgcatatatatttaagatagttagctcttcttgttgaattgatccctttactatcatgtaatggccttctttgtctcttttgatctttgttggtttaaagtctgttttatcagagactaggattgcaaccccggcctttttttttgttttccgtttgcttggtagatcttcctccatccttttattttgagcctatgtgtgtgtgtctctgtacgtgagatgggtttcctgaatacagcaccctgatgggtcttgactctttatccagtgtgccagtctgtgtcttttaattggagcatttagcccatttacatttaaggttaatattgttatgtgtgaatttgatcctgtcactaggatgttcactggttattttgctcgttagttgatgcagtttcttcctagcctcaatggtctttacaatttggcatgtttttgcagtggctgatactggttgttccattccatgtttagtgcttccttcaggagctcttgtaaggcaggcctggtggtgacaaaatctctcagcatttgcttgtttgtaaaggattttatttctccttcacttatgaagcttagtttggctggatatgaaattctgggttgaaaattcttttcttcaagaacgttgaatattgacccccactctcttctggcttgtagagtttctgctgagagatcagctgttagtctgatgggcttccctttgtgggtaacccgacctttctctctggctgcccttaacattttttccttcatttcaactttggtgaatctgacaattatgtgtcttggagttgctcttctcgaggagtatctttgtggcgttctctgtatttcctgaatttgaatgttgtcctcccttgctagattggggaagttctcctggataatatcctgcagagtgttttccagcttggttccattctccccgtcactttcaggtacaccaatcagacgtagatttggtcttttcacatagtcccatatttcttggaagctttgttcgtttctttttactcttttttctcttaacttctcttctcacttcatttcattcatctgatcttcaatcactgataacctttcttccagttgatcgaattggctactgaagcttgtgcattcgtcacgtagttctcatgccatggttttcagctccatcaggtcatttaaggacttctctatgctggttattctagttagccatttgtctaatcttttttcaaggtttttaggttctttgtgatgggttcgaacttcctcttttagcttggagaagtttgatcatctgaagccttcttctctcaactcgtcaaagtcattctccgtccagctttgttctgttgctggcaaggagctatgttcctttggagggggagaggcgctctgatttttagaattttcagcttttctgctctgttttttccccatctttgtggttttatctacctttggtctttggtgatggtgatgtgcagatggggttttggtgtggatgtcctttctgtttgttagttttccttctaacagtcaggaccgccagctgcaggtctgttggagtttgctggacgtccacgccagaccctgtttgcctgggtatcacagtggaggctgtagaacagcgaatattgctgaacagcaaatgttgctgcctgatcattcctctggaagcttcatctcagaggggtacccggccatgtggggtgtcagtctgcccctacttgggggtgcctcccagttaggctactcgggggtcagggactcacttgaggaggcagtctctccgttctcagatctcaaactctgtgctgggagaaccactggtctcttcaaagctgtcagacagggacattgaagtctgcagagatttctgctgccttttgttcggctatgccatgcccccagaggtggagtctacagaggcaggcaggcaggcctccttgagctgcagtgggctccacctagttcgagcttcccggctgctttatttacctactgaagcctcagcaatggtgggctcccctcccctagcctcactgccaccttgcagttcgatctcagactgctgtgctagcaatgagcaaggctccatgggcgtgggaccctccgagctaggcacaggatataatctcctggtgtgccgtttgctaagaccattggaaaaacgcagtattagggtgggagtgacccaattttccaggtgccgtctgtcacagcttcccttggctaggaaagggaattccctgaccccttgccttcccgggtgaggccatgccttgccctgcttcagctcatgctcagtgggctgcacccaccgtcctacacccactgtccaacaagccccagtgagatgaacctggtacctcagttggaagtgcagaaatcacctgtcttctgcgtcgctcacgctgggagctgtagactggagctgttcctattcggccatcttggaacccaacccaagtctggcattttttggttttctctgtgtattgactatgattatagaggataaatggatattgatattattaaatcgtcatttacagaaggcacacaacttatatcctttaaacaaagttctccaaccagtagggtatacttgctggtagtgcttacagctgccaccattcttcactggggctcagagtggatgcctggaggaaaaaaacaaatgaatcttttagctcctagttactgttagcatttttaccagaaaacaatttaaaaaatgacacaagtaagtcttcacctatcaaggctgagtgtggtggcctatacttgtaatctctgtgctttgggaggccaacgcaggaggatctcttgagtccaggagtttgagaccagcctgggcaacaaagcaagaccccatctctacagaaagttaaaatttagctgggcatgctggcacatccctatagtcccagctacttgagaggctgagttgggaggatcccttgaggtcatgagttggagtctacagtgagctgtgattacagtgtgagtctacactgcactccagtctgggtgaaagagatcctgtctctcaaaaaacaagtgattctcctgggaagagatttgtttaaaaagtctgcacctctattgatgataactttgaatgtaaatggattaaattctcccacttaaaagatatagattgactgaatggattaaaaaccaccatcatgactcgactgtatgctgcctacaagaaacctcacctgtaaagacaggccaaaagtgaaggtatggagaaagatattgcatacaaatggaagccaaaaaagagcagaaataactatacttacatgagataaaatagactttaagtcaaaaactgtaaaaagaaaagtcattatgtaatgaaacaaggatcaattcatgcaagatataatcatatttttttattaagaaaatttttttgtagagatggggttatgctatgttgcctggctagtctcaaactctgggtctcaaagcagtcctcctgctttggcctcctaaggtgctgggattataggcatgagccactgtgccaggcctgaggatattatcattataaatatatatgtaccccacactggatgacccagatataaagcaaatattattagatttaaagggagaaatagactctaatacaatagtagttgaggacttcactctactctcagcattggacagattttctagacataaaaccaataaatattggatttaaattgcactttacaccaaatggacctgacatttacagaacattctaataggtgcagaacactctaatagctgcagaacacacgttcttttcatcagcacatggaacattcaccagactagttctggaacccacttcctgccttagtgttctttccaccacagtgcatgataattccgacagaacgccttttatttgtaccttattagttgtagggggaaagctttttcatgtacaaaaatgctgtaattttctgatttaataaagtaattccactgatgtttttattta

SEQ ID NO: 187442 - DNA, 1526 bp, Homo sapiens
  Payload ID: 16904
  Gene Symbol: SOD3
  Gene Name: superoxide dismutase 3, extracellular
  Uniprot ID: P08294
  ENST ID: ENST00000382120
  CDS Start-End: 206-928
ggggaggtctggcctgcttttcctccctgaactggcccaatgactggctccctcacgctgaccactcctctgggctggcctcctgcactcgcgctaacagcccaggctccagggacagcctgcgttcctgggctggctgggtgcagctctcttttcaggagagaaagctctcttggaggagctggaaaggtgcccgactccagccatgctggcgctactgtgttcctgcctgctcctggcagccggtgcctcggacgcctggacgggcgaggactcggcggagcccaactctgactcggcggagtggatccgagacatgtacgccaaggtcacggagatctggcaggaggtcatgcagcggcgggacgacgacggcgcgctccacgccgcctgccaggtgcagccgtcggccacgctggacgccgcgcagccccgggtgaccggcgtcgtcctcttccggcagcttgcgccccgcgccaagctcgacgccttcttcgccctggagggcttcccgaccgagccgaacagctccagccgcgccatccacgtgcaccagttcggggacctgagccagggctgcgagtccaccgggccccactacaacccgctggccgtgccgcacccgcagcacccgggcgacttcggcaacttcgcggtccgcgacggcagcctctggaggtaccgcgccggcctggccgcctcgctcgcgggcccgcactccatcgtgggccgggccgtggtcgtccacgctggcgaggacgacctgggccgcggcggcaaccaggccagcgtggagaacgggaacgcgggccggcggctggcctgctgcgtggtgggcgtgtgcgggcccgggctctgggagcgccaggcgcgggagcactcagagcgcaagaagcggcggcgcgagagcgagtgcaaggccgcctgagcgcggcccccacccggcggcggccagggacccccgaggcccccctctgcctttgagcttctcctctgctccaacagacaccctccactctgaggtctcaccttcgcctttgctgaagtctccccgcagccctctccacccagaggtctccctataccgagacccaccatccttccatcctgaggaccgccccaaccctcggagccccccactcagtaggtctgaaggcctccatttgtaccgaaacaccccgctcacgctgacagcctcctaggctccctgaggtacctttccacccagaccctccttccccaccccataagccctgagactcccgcctttgacctgacgatcttcccccttcccgccttcaggttcctcctaggcgctcagaggccgctctggggggttgcctcgagtccccccacccctccccacccaccaccgctcccgcgggaagccagcccgtgcaacggaagccaggccaactgccccgcgtcttcagctgtttcgcatccaccgccaccccactgagagctgctcctttgggggaatgtttggcaacctttgtgttacagattaaaaattcagcaattca

SEQ ID NO: 187443 - DNA, 276 bp, Homo sapiens
  Payload ID: 16904
  Gene Symbol: SOD3
  Gene Name: superoxide dismutase 3, extracellular
  ENST ID: ENST00000598411
  CDS Start-End: 115-276
agaagggcaagatggagtctgcacagctgggccatgacccaggaacactatgaggagatgctggttctcctgtagctgctcctctttaggtgaccctggtgcccgactccagccatgctggcgctactgtgttcctgcctgctcctggcagccggtgcctcggacgcctggacgggcgaggactcggcggagcccaactctgactcggcggagtggatccgagacatgtacgccaaggtcacggagatctggcaggaggtcatgcagcggcgggac

SEQ ID NO: 187444 - DNA, 7586 bp, Homo sapiens
  Payload ID: 16905
  Gene Symbol: SVIL
  Gene Name: supervillin
  Uniprot ID: O95425
  ENST ID: ENST00000355867
  CDS Start-End: 754-7398
cactgctctgactgcgtcctccccaggctgaagtgtcctcaggtttcatgtggatttgcccagtaatggatggctccaccgaggccaggttggggaagttcagcctcgaggacactaggggacgaaaaacttcaaaaagaagactctttttattaatattttggcgttctttttggagaggaacttttgggatgtagcctttacctgtttcctgaatttgacatccaaaaagccttttggaaaacaccattctaaatttatcctgttctgaatcatcatcgcttctgatagatgcagttgcttgctgacatcgtgatctttgattttgtacaacgctatttgggctaacttttgggattttactttgtgcttagaatttgaaagtagtattcattggaaagagactccaagaaaatactcgaagacatcaaaagctggattcgagggtataacgtgttttgttttgttttttaaattagaaaaataaggaattgcagtgtgattttctttccccctttaacttagaggaacgaggattatacagaaatttgaaatttcaacaagaaaaacttaagcttccttggattcccacgtcaaaggaaagtttcaagctttcagaaggagttctcactcgaagataaagaacagctcgctaaccacgaaagaggaatcgatgctcagcttttagttgcacttcctaaagttgcagaattaagacaaatctttgaaccaaagaagaaagaattcttagaaatgaaaagaaaagaaagaattgccaggcgcctggaagggattgaaaatgacactcagcccatcctcttgcagagctgcacaggattggtgactcaccgcctgctggaggaagacacccctcgatacatgagagccagcgaccctgccagcccccacatcggccgatcaaatgaagaggaggaaacttctgattcttctctagaaaagcaaactcgatccaaatactgcacagaaacctccggtgtccacggtgactcaccctatggttcgggtaccatggacacccacagtctggagtccaaagccgaaagaattgcaaggtacaaagcagaaagaaggcgacagctggcagagaagtatgggctgactctggatcccgaggccgactccgagtatttatcccgctataccaagtccaggaaggagcctgatgctgtcgagaagcggggaggaaaaagtgacaaacaggaagagtcaagcagagatgctagttctctgtaccccgggaccgagacgatggggctcaggacctgtgccggtgaatccaaggactatgccctccatgtgggtgacggctcttccgacccggaggtgctgctgaacatagaaaaccaaagacgaggtcaagagctgagtgccacccggcaggcccatgacctgtccccagcagccgagagttcctcgaccttctctttctctgggcgagactcctccttcactgaagtgccacggtcccccaagcacgcccacagctcctccctgcagcaggcagcctcccggagcccctcctttggtgacccacagctatcccctgaggcccgacccagtacagggaaacccaaacatgagtggtttctccagaaagattccgaaggggacacaccttcacttatcaactggccttccagagttaaagttagagaaaaattggtgaaagaggaaagtgctcgaaacagccctgaactcgcctcagagtccgtaactcagaggagacaccagccagcgccagtccattacgtgtcatttcagtctgagcactcagcctttgatagggtccccagcaaggcagcaggctctacacgacagccaatccgtggctatgtccaacccgcagataccggtcacaccgccaagctagtgacgccagaaaccccagaaaatgcatctgagtgtagctgggtagcatcagccacccagaatgtccccaaacctcccagcttgacggttctagaaggtgacggaagggatagcccagttctccatgtctgcgagtcaaaagcagaagaagaagaaggggaaggagaaggagaagaaaaagaagaagatgtgtgcttcactgaagctctcgagcaaagcaagaaaaccctactggctttggagggtgatgggctagtgagaagcccagaagatccctctagaaatgaggactttggtaagcctgctgtgagcacagtcaccttagagcatcagaaggaactggaaaacgtggcacaaccccctcaagctccgcaccagcccactgagaggacaggcaggagcgagatggttctctacattcaaagtgagcctgtgtcccaagacgccaaaccaactggtcacaacagggaagcctcgaaaaagcgcaaggtccgtacccgctctctgtcagatttcacaggcccccctcagctccaggccttgaagtataaggacccagcttccaggagagagctggagctgcccagctccaagaccgaagggccttatggggagatcagcatgctggacacaaaagtctctgtcgcccagctccgaagtgcgttcctggcatctgccaacgcctgcaggagacctgaactcaaatcacgggtggagaggtcggctgaaggacctggcttgcccaccggtgtggaacgggagagagggtcccggaaaccaagacgctatttttctcctggtgaaagtagaaaaacttccgagagatttagaacccaacctataacttcagcagaacgaaaggaatcggataggtgcacttcacattcagaaacgccaactgtcgatgatgaagaaaaggtggatgaacgagccaagctgagcgtcgccgccaagaggttgcttttcagggagatggaaaaatcttttgatgaacaaaatgttccaaagcgacgctcaagaaacacagctgtggagcagaggctacgccgtctgcaggacaggtccctcacccagcccatcaccactgaagaggtggtcatcgcagccactgaacctatccccgcttcgtgttctgggggcacccaccctgtaatggcgagacttcctagccccactgtagctaggagcgctgtgcagcctgccagattgcaggcctctgctcaccaaaaggccttagccaaggaccagacaaatgagggcaaagagcttgctgagcaaggagaacctgattcctccactctaagcttggccgaaaagttggccttgtttaacaaattgtcccagccagtctcaaaagcgatttctacccggaacagaatagacacgagacagaggagaatgaacgctcgctatcaaactcagccagtcacactgggagaggtggagcaggtgcagagtggaaagctcattcctttctcacctgccgtgaacacatcagtgtctaccgtagcatccacggttgctccaatgtatgccggagatcttcgcacaaagccacctcttgaccacaatgcaagtgccactgactataagttttcttcttcaatagaaaattcggactctccagttagaagcattctgaaatcgcaagcttggcagcctttggtagagggtagcgagaacaagggaatgttgagagaatatggagagacagaaagcaagagagctttgacaggtcgagacagtgggatggagaagtatgggtcctttgaggaagcagaagcatcctaccccatcctgaaccgagccagggaaggagacagccataaggaatctaaatatgctgttcccagaagaggaagcctggaacgggcgaaccctcccatcacccacctcggggatgaaccgaaggaattttccatggctaaaatgaatgcacaaggaaacttggacttgagggacaggctgccctttgaagagaaggtggaggtggagaatgttatgaaaaggaagttttcactaagagcggcagagttcggggagcccacttccgagcagacggggacagctgctgggaaaactattgctcaaaccacagcccccgtgtcctggaagccccaggattcttcggaacagccacaggagaagctctgcaagaatccatgtgcgatgtttgctgctggagagatcaaaacgccgacaggggagggccttcttgactcacccagcaaaaccatgtctattaaagaaagattggcactgttgaagaaaagcggggaggaagattggagaaacagactcagcaggaggcaggagggcggcaaggcgccggccagcagcctgcacacccaggaagcagggcggtccctcatcaagaagcgggtcacagaaagtcgagagagccaaatgacgattgaggagaggaagcagctcatcactgtgagagaggaggcctggaagacgagaggcagaggagcggccaacgactcgacccagttcactgtggctggcaggatggtgaagaaaggtttggcgtcacctactgccataaccccagtagcctcacccatttgcggtaaaacaagaggcaccacacccgtttccaaacccctggaagatatcgaagccagaccagatatgcagttagaatcggacctgaagttggacaggctggaaacctttctaagaaggctgaataacaaagttggcgggatgcacgaaacggtgctcactgtcaccggcaaatctgtgaaggaggtgatgaagccagatgatgatgaaacctttgccaaattttaccgcagcgtggattataatatgccaagaagtcctgtggagatggatgaggacttcgatgtcattttcgatccttatgcacccaaattgacgtcttccgtggccgagcacaagcgggcagttaggcccaagcgccgggttcaggcctccaaaaaccccctgaaaatgctggcggcaagagaagatctccttcaggaatacactgagcagagattaaacgttgccttcatggagtcaaagcggatgaaagtagaaaagatgtcttccaactccaacttctcagaagtcaccctggcgggtttagccagtaaagaaaacttcagcaacgtcagcctgcggagcgtcaacctgacggaacagaactctaacaacagcgccgtgccctacaagaggctgatgctgttgcagattaaaggaagaagacatgtgcagaccaggctggtggaacctcgagcttcggcgctcaacagtggggactgcttcctcctgctctctccccactgctgcttcctgtgggtaggagagtttgcaaacgtcatagaaaaggcgaaggcctcagaacttgcaactttaattcagacaaagagggaacttggttgtagagctacttatatccaaaccattgaagaaggaattaatacacacactcatgcagccaaagacttctggaagcttctgggtggccaaaccagttaccaatctgctggagacccaaaagaagatgaactctatgaagcagccataatagaaactaactgcatttaccgtctcatggatgacaaacttgttcctgatgacgactactgggggaaaattccgaagtgctcccttctgcaacccaaagaggtactggtgtttgattttggtagtgaagtttacgtatggcatgggaaagaagtcacattagcacaacgaaaaatagcatttcagctggcaaagcacttatggaatggaacctttgactatgagaactgtgacatcaatcccctggatcctggagaatgcaatccgcttatccccagaaaaggacaggggcggcccgactgggcgatatttgggagacttactgaacacaatgagacgattttgttcaaagagaagtttctggattggacggaactgaagagatcgaatgagaagaaccccggggaacttgcccagcacaaggaagaccccaggactgatgtcaaggcatacgatgtgacacggatggtgtccatgccccagacgacagcaggcaccatcctggacggagtgaacgtcggccgtggctatggcctggtggaaggacacgacaggaggcagtttgagatcaccagcgtttccgtggatgtctggcacatcctggaattcgactatagcaggctccccaaacaaagcatcgggcagttccatgagggggatgcctatgtggtcaagtggaagttcatggtgagcacggcagtgggaagtcgccagaagggagagcactcggtgagggcagccggcaaagagaagtgcgtctacttcttctggcaaggccggcactccaccgtgagtgagaagggcacgtcggcgctgatgacggtggagctggacgaggaaaggggggcccaggtccaggttctccagggaaaggagcccccctgtttcctgcagtgtttccagggggggatggtggtgcactcggggaggcgggaagaggaagaagaaaatgtgcaaagtgagtggcggctgtactgcgtgcgtggagaggtgcccgtggaagggaatttgctggaagtggcctgtcactgtagcagcctgaggtccagaacttccatggtggtgcttaacgtcaacaaggccctcatctacctgtggcacggatgcaaagcccaggcccacacgaaggaggtcggaaggaccgctgcgaacaagatcaaggaacaatgtcccctggaagcaggactgcatagtagcagcaaagtcacaatacacgagtgtgatgaaggctccgagccactcggattctgggatgccttaggaaggagagacaggaaagcctacgattgcatgcttcaagatcctggaagttttaacttcgcgccccgcctgttcatcctcagcagctcctctggggattttgcagccacagagtttgtgtaccctgcccgagccccctctgtggtcagttccatgcccttcctgcaggaagatctgtacagcgcgccccagccagcacttttccttgttgacaatcaccacgaggtgtacctctggcaaggctggtggcccatcgagaacaagatcactggttccgcccgcatccgctgggcctccgaccggaagagtgcgatggagactgtgctccagtactgcaaaggaaaaaatctcaagaaaccagcccccaagtcttaccttatccacgctggtctggagcccctgacattcaccaatatgtttcccagctgggagcacagagaggacatcgctgagatcacagagatggacacggaagtttccaatcagatcaccctcgtggaagacgtcttagccaagctctgtaaaaccatttacccgctggccgacctcctggccaggccactcccggagggggtcgatcctctgaagcttgagatctatctcaccgacgaagacttcgagtttgcactagacatgacgagggatgaatacaacgccctgcccgcctggaagcaggtgaacctgaagaaagcaaaaggcctgttctgagtggggagacgccagaggagcctcacggtcacgtccaacaacaccactgcaccagggaaatggatatatatttttggactggtgtttttcacaaagtatttttcaatcagagttttcagaacctgacattgttaaagatactgcttgtcccggagttgtgtattttgtaaatgttcaagggaactgtt

SEQ ID NO: 187445 - DNA, 8201 bp, Homo sapiens
  Payload ID: 16905
  Gene Symbol: SVIL
  Gene Name: supervillin
  Uniprot ID: O95425
  ENST ID: ENST00000375398
  CDS Start-End: 754-7302
cactgctctgactgcgtcctccccaggctgaagtgtcctcaggtttcatgtggatttgcccagtaatggatggctccaccgaggccaggttggggaagttcagcctcgaggacactaggggacgaaaaacttcaaaaagaagactctttttattaatattttggcgttctttttggagaggaacttttgggatgtagcctttacctgtttcctgaatttgacatccaaaaagccttttggaaaacaccattctaaatttatcctgttctgaatcatcatcgcttctgatagatgcagttgcttgctgacatcgtgatctttgattttgtacaacgctatttgggctaacttttgggattttactttgtgcttagaatttgaaagtagtattcattggaaagagactccaagaaaatactcgaagacatcaaaagctggattcgagggtataacgtgttttgttttgttttttaaattagaaaaataaggaattgcagtgtgattttctttccccctttaacttagaggaacgaggattatacagaaatttgaaatttcaacaagaaaaacttaagcttccttggattcccacgtcaaaggaaagtttcaagctttcagaaggagttctcactcgaagataaagaacagctcgctaaccacgaaagaggaatcgatgctcagcttttagttgcacttcctaaagttgcagaattaagacaaatctttgaaccaaagaagaaagaattcttagaaatgaaaagaaaagaaagaattgccaggcgcctggaagggattgaaaatgacactcagcccatcctcttgcagagctgcacaggattggtgactcaccgcctgctggaggaagacacccctcgatacatgagagccagcgaccctgccagcccccacatcggccgatcaaatgaagaggaggaaacttctgattcttctctagaaaagcaaactcgatccaaatactgcacagaaacctccggtgtccacggtgactcaccctatggttcgggtaccatggacacccacagtctggagtccaaagccgaaagaattgcaaggtacaaagcagaaagaaggcgacagctggcagagaagtatgggctgactctggatcccgaggccgactccgagtatttatcccgctataccaagtccaggaaggagcctgatgctgtcgagaagcggggaggaaaaagtgacaaacaggaagagtcaagcagagatgctagttctctgtaccccgggaccgagacgatggggctcaggacctgtgccggtgaatccaaggactatgccctccatgtgggtgacggctcttccgacccggaggtgctgctgaacatagaaaaccaaagacgaggtcaagagctgagtgccacccggcaggcccatgacctgtccccagcagccgagagttcctcgaccttctctttctctgggcgagactcctccttcactgaagtgccacggtcccccaagcacgcccacagctcctccctgcagcaggcagcctcccggagcccctcctttggtgacccacagctatcccctgaggcccgacccagtacagggaaacccaaacatgagtggtttctccagaaagattccgaaggggacacaccttcacttatcaactggccttccagagttaaagttagagaaaaattggtgaaagaggaaagtgctcgaaacagccctgaactcgcctcagagtccgtaactcagaggagacaccagccagcgccagtccattacgtgtcatttcagtctgagcactcagcctttgatagggtccccagcaaggcagcaggctctacacgacagccaatccgtggctatgtccaacccgcagataccggtcacaccgccaagctagtgacgccagaaaccccagaaaatgcatctgagtgtagctgggtagcatcagccacccagaatgtccccaaacctcccagcttgacggttctagaaggtgacggaagggatagcccagttctccatgtctgcgagtcaaaagcagaagaagaagaaggggaaggagaaggagaagaaaaagaagaagatgtgtgcttcactgaagctctcgagcaaagcaagaaaaccctactggctttggagggtgatgggctagtgagaagcccagaagatccctctagaaatgaggactttggtaagcctgctgtgagcacagtcaccttagagcatcagaaggaactggaaaacgtggcacaaccccctcaagctccgcaccagcccactgagaggacaggcaggagcgagatggttctctacattcaaagtgagcctgtgtcccaagacgccaaaccaactggtcacaacagggaagcctcgaaaaagcgcaaggtccgtacccgctctctgtcagatttcacaggcccccctcagctccaggccttgaagtataaggacccagcttccaggagagagctggagctgcccagctccaagaccgaagggccttatggggagatcagcatgctggacacaaaagtctctgtcgcccagctccgaagtgcgttcctggcatctgccaacgcctgcaggagacctgaactcaaatcacgggtggagaggtcggctgaaggacctggcttgcccaccggtgtggaacgggagagagggtcccggaaaccaagacgctatttttctcctggtgaaagtagaaaaacttccgagagatttagaacccaacctataacttcagcagaacgaaaggaatcggataggtgcacttcacattcagaaacgccaactgtcgatgatgaagaaaaggtggatgaacgagccaagctgagcgtcgccgccaagaggttgcttttcagggagatggaaaaatcttttgatgaacaaaatgttccaaagcgacgctcaagaaacacagctgtggagcagaggctacgccgtctgcaggacaggtccctcacccagcccatcaccactgaagaggtggtcatcgcagccacattgcaggcctctgctcaccaaaaggccttagccaaggaccagacaaatgagggcaaagagcttgctgagcaaggagaacctgattcctccactctaagcttggccgaaaagttggccttgtttaacaaattgtcccagccagtctcaaaagcgatttctacccggaacagaatagacacgagacagaggagaatgaacgctcgctatcaaactcagccagtcacactgggagaggtggagcaggtgcagagtggaaagctcattcctttctcacctgccgtgaacacatcagtgtctaccgtagcatccacggttgctccaatgtatgccggagatcttcgcacaaagccacctcttgaccacaatgcaagtgccactgactataagttttcttcttcaatagaaaattcggactctccagttagaagcattctgaaatcgcaagcttggcagcctttggtagagggtagcgagaacaagggaatgttgagagaatatggagagacagaaagcaagagagctttgacaggtcgagacagtgggatggagaagtatgggtcctttgaggaagcagaagcatcctaccccatcctgaaccgagccagggaaggagacagccataaggaatctaaatatgctgttcccagaagaggaagcctggaacgggcgaaccctcccatcacccacctcggggatgaaccgaaggaattttccatggctaaaatgaatgcacaaggaaacttggacttgagggacaggctgccctttgaagagaaggtggaggtggagaatgttatgaaaaggaagttttcactaagagcggcagagttcggggagcccacttccgagcagacggggacagctgctgggaaaactattgctcaaaccacagcccccgtgtcctggaagccccaggattcttcggaacagccacaggagaagctctgcaagaatccatgtgcgatgtttgctgctggagagatcaaaacgccgacaggggagggccttcttgactcacccagcaaaaccatgtctattaaagaaagattggcactgttgaagaaaagcggggaggaagattggagaaacagactcagcaggaggcaggagggcggcaaggcgccggccagcagcctgcacacccaggaagcagggcggtccctcatcaagaagcgggtcacagaaagtcgagagagccaaatgacgattgaggagaggaagcagctcatcactgtgagagaggaggcctggaagacgagaggcagaggagcggccaacgactcgacccagttcactgtggctggcaggatggtgaagaaaggtttggcgtcacctactgccataaccccagtagcctcacccatttgcggtaaaacaagaggcaccacacccgtttccaaacccctggaagatatcgaagccagaccagatatgcagttagaatcggacctgaagttggacaggctggaaacctttctaagaaggctgaataacaaagttggcgggatgcacgaaacggtgctcactgtcaccggcaaatctgtgaaggaggtgatgaagccagatgatgatgaaacctttgccaaattttaccgcagcgtggattataatatgccaagaagtcctgtggagatggatgaggacttcgatgtcattttcgatccttatgcacccaaattgacgtcttccgtggccgagcacaagcgggcagttaggcccaagcgccgggttcaggcctccaaaaaccccctgaaaatgctggcggcaagagaagatctccttcaggaatacactgagcagagattaaacgttgccttcatggagtcaaagcggatgaaagtagaaaagatgtcttccaactccaacttctcagaagtcaccctggcgggtttagccagtaaagaaaacttcagcaacgtcagcctgcggagcgtcaacctgacggaacagaactctaacaacagcgccgtgccctacaagaggctgatgctgttgcagattaaaggaagaagacatgtgcagaccaggctggtggaacctcgagcttcggcgctcaacagtggggactgcttcctcctgctctctccccactgctgcttcctgtgggtaggagagtttgcaaacgtcatagaaaaggcgaaggcctcagaacttgcaactttaattcagacaaagagggaacttggttgtagagctacttatatccaaaccattgaagaaggaattaatacacacactcatgcagccaaagacttctggaagcttctgggtggccaaaccagttaccaatctgctggagacccaaaagaagatgaactctatgaagcagccataatagaaactaactgcatttaccgtctcatggatgacaaacttgttcctgatgacgactactgggggaaaattccgaagtgctcccttctgcaacccaaagaggtactggtgtttgattttggtagtgaagtttacgtatggcatgggaaagaagtcacattagcacaacgaaaaatagcatttcagctggcaaagcacttatggaatggaacctttgactatgagaactgtgacatcaatcccctggatcctggagaatgcaatccgcttatccccagaaaaggacaggggcggcccgactgggcgatatttgggagacttactgaacacaatgagacgattttgttcaaagagaagtttctggattggacggaactgaagagatcgaatgagaagaaccccggggaacttgcccagcacaaggaagaccccaggactgatgtcaaggcatacgatgtgacacggatggtgtccatgccccagacgacagcaggcaccatcctggacggagtgaacgtcggccgtggctatggcctggtggaaggacacgacaggaggcagtttgagatcaccagcgtttccgtggatgtctggcacatcctggaattcgactatagcaggctccccaaacaaagcatcgggcagttccatgagggggatgcctatgtggtcaagtggaagttcatggtgagcacggcagtgggaagtcgccagaagggagagcactcggtgagggcagccggcaaagagaagtgcgtctacttcttctggcaaggccggcactccaccgtgagtgagaagggcacgtcggcgctgatgacggtggagctggacgaggaaaggggggcccaggtccaggttctccagggaaaggagcccccctgtttcctgcagtgtttccagggggggatggtggtgcactcggggaggcgggaagaggaagaagaaaatgtgcaaagtgagtggcggctgtactgcgtgcgtggagaggtgcccgtggaagggaatttgctggaagtggcctgtcactgtagcagcctgaggtccagaacttccatggtggtgcttaacgtcaacaaggccctcatctacctgtggcacggatgcaaagcccaggcccacacgaaggaggtcggaaggaccgctgcgaacaagatcaaggaacaatgtcccctggaagcaggactgcatagtagcagcaaagtcacaatacacgagtgtgatgaaggctccgagccactcggattctgggatgccttaggaaggagagacaggaaagcctacgattgcatgcttcaagatcctggaagttttaacttcgcgccccgcctgttcatcctcagcagctcctctggggattttgcagccacagagtttgtgtaccctgcccgagccccctctgtggtcagttccatgcccttcctgcaggaagatctgtacagcgcgccccagccagcacttttccttgttgacaatcaccacgaggtgtacctctggcaaggctggtggcccatcgagaacaagatcactggttccgcccgcatccgctgggcctccgaccggaagagtgcgatggagactgtgctccagtactgcaaaggaaaaaatctcaagaaaccagcccccaagtcttaccttatccacgctggtctggagcccctgacattcaccaatatgtttcccagctgggagcacagagaggacatcgctgagatcacagagatggacacggaagtttccaatcagatcaccctcgtggaagacgtcttagccaagctctgtaaaaccatttacccgctggccgacctcctggccaggccactcccggagggggtcgatcctctgaagcttgagatctatctcaccgacgaagacttcgagtttgcactagacatgacgagggatgaatacaacgccctgcccgcctggaagcaggtgaacctgaagaaagcaaaaggcctgttctgagtggggagacgccagaggagcctcacggtcacgtccaacaacaccactgcaccagggaaatggatatatatttttggactggtgtttttcacaaagtatttttcaatcagagttttcagaacctgacattgttaaagatactgcttgtcccggagttgtgtattttgtaaatgttcaagggaactgtttggaaacttctttccaccattcaggaggttatcagaattaataaaagtatctgttatgtgcacttaagccgcagctgctatagatagcactgccttcttgttccagctaggcaatgccttttttttttttttttgaagcagttctctttataaagtgttattttgatagtttgtggattctaaaatatatatatatttatataaacaccatataagtcaaatatgtatttaacaaagcaatatgtattcattcactttcaagatttgttttggtgtcaaaataacatgaaaaggtagatggagttgcttctgttgaattagctctgccaccaatatgtatcttcatacacgtttggaaatgtttcctgcagcattaggtatgacttgttctgagtactgcttccggtgctaaaatgaacaaagaatttgtacttaatggcatggactctggagaatctatgcgaatcaacctttctaccttaatatctccccaaaaatgtatagtgccttgtttttatgtacagtttatatacagaaaagtttgctctgcatttttgatgatggtttggaacattatctacaattttactctcaaatagtcaaaataaaaacatctcaatttctaataccggttgtaaacagtacacatgtcattttgtgatataggactcccaaataaaagtatcagaataaacacaacaattaactggt

SEQ ID NO: 187446 - DNA, 6729 bp, Homo sapiens
  Payload ID: 16905
  Gene Symbol: SVIL
  Gene Name: supervillin
  Uniprot ID: O95425
  ENST ID: ENST00000375400
  CDS Start-End: 454-5820
ctgtcggcgggaagcggcgatcctgccaccgggaggtgtggaagagccgggtagattctggctacattggagattggttgctttctaaaactgaaggagaagcccatgaagagatggtggattctcactgagttttgactagcggaagaaaagagagagttcaagtggatggccttgaggacttgaaaagctgagatatgatgattttgaagtcatttcacatcgaagccatgatttaaatatcggcgttaagatttcaacaagaaaaacttaagcttccttggattcccacgtcaaaggaaagtttcaagctttcagaaggagttctcactcgaagataaagaacagctcgctaaccacgaaagaggaatcgatgctcagcttttagttgcacttcctaaagttgcagaattaagacaaatctttgaaccaaagaagaaagaattcttagaaatgaaaagaaaagaaagaattgccaggcgcctggaagggattgaaaatgacactcagcccatcctcttgcagagctgcacaggattggtgactcaccgcctgctggaggaagacacccctcgatacatgagagccagcgaccctgccagcccccacatcggccgatcaaatgaagaggaggaaacttctgattcttctctagaaaagcaaactcgatccaaatactgcacagaaacctccggtgtccacggtgactcaccctatggttcgggtaccatggacacccacagtctggagtccaaagccgaaagaattgcaaggtacaaagcagaaagaaggcgacagctggcagagaagtatgggctgactctggatcccgaggccgactccgagtatttatcccgctataccaagtccaggaaggagcctgatgctgtcgagaagcggggaggaaaaagtgacaaacaggaagagtcaagcagagatgctagttctctgtaccccgggaccgagacgatggggctcaggacctgtgccggtgaatccaaggactatgccctccatgtgggtgacggctcttccgacccggaggtgctgctgaacatagaaaaccaaagacgaggtcaagagctgagtgccacccggcaggcccatgacctgtccccagcagccgagagttcctcgaccttctctttctctgggcgagactcctccttcactgaagtgccacggtcccccaagcacgcccacagctcctccctgcagcaggcagcctcccggagcccctcctttggtgacccacagctatcccctgaggcccgacccaggtgcacttcacattcagaaacgccaactgtcgatgatgaagaaaaggtggatgaacgagccaagctgagcgtcgccgccaagaggttgcttttcagggagatggaaaaatcttttgatgaacaaaatgttccaaagcgacgctcaagaaacacagctgtggagcagaggctacgccgtctgcaggacaggtccctcacccagcccatcaccactgaagaggtggtcatcgcagccacattgcaggcctctgctcaccaaaaggccttagccaaggaccagacaaatgagggcaaagagcttgctgagcaaggagaacctgattcctccactctaagcttggccgaaaagttggccttgtttaacaaattgtcccagccagtctcaaaagcgatttctacccggaacagaatagacacgagacagaggagaatgaacgctcgctatcaaactcagccagtcacactgggagaggtggagcaggtgcagagtggaaagctcattcctttctcacctgccgtgaacacatcagtgtctaccgtagcatccacggttgctccaatgtatgccggagatcttcgcacaaagccacctcttgaccacaatgcaagtgccactgactataagttttcttcttcaatagaaaattcggactctccagttagaagcattctgaaatcgcaagcttggcagcctttggtagagggtagcgagaacaagggaatgttgagagaatatggagagacagaaagcaagagagctttgacaggtcgagacagtgggatggagaagtatgggtcctttgaggaagcagaagcatcctaccccatcctgaaccgagccagggaaggagacagccataaggaatctaaatatgctgttcccagaagaggaagcctggaacgggcgaaccctcccatcacccacctcggggatgaaccgaaggaattttccatggctaaaatgaatgcacaaggaaacttggacttgagggacaggctgccctttgaagagaaggtggaggtggagaatgttatgaaaaggaagttttcactaagagcggcagagttcggggagcccacttccgagcagacggggacagctgctgggaaaactattgctcaaaccacagcccccgtgtcctggaagccccaggattcttcggaacagccacaggagaagctctgcaagaatccatgtgcgatgtttgctgctggagagatcaaaacgccgacaggggagggccttcttgactcacccagcaaaaccatgtctattaaagaaagattggcactgttgaagaaaagcggggaggaagattggagaaacagactcagcaggaggcaggagggcggcaaggcgccggccagcagcctgcacacccaggaagcagggcggtccctcatcaagaagcgggtcacagaaagtcgagagagccaaatgacgattgaggagaggaagcagctcatcactgtgagagaggaggcctggaagacgagaggcagaggagcggccaacgactcgacccagttcactgtggctggcaggatggtgaagaaaggtttggcgtcacctactgccataaccccagtagcctcacccatttgcggtaaaacaagaggcaccacacccgtttccaaacccctggaagatatcgaagccagaccagatatgcagttagaatcggacctgaagttggacaggctggaaacctttctaagaaggctgaataacaaagttggcgggatgcacgaaacggtgctcactgtcaccggcaaatctgtgaaggaggtgatgaagccagatgatgatgaaacctttgccaaattttaccgcagcgtggattataatatgccaagaagtcctgtggagatggatgaggacttcgatgtcattttcgatccttatgcacccaaattgacgtcttccgtggccgagcacaagcgggcagttaggcccaagcgccgggttcaggcctccaaaaaccccctgaaaatgctggcggcaagagaagatctccttcaggaatacactgagcagagattaaacgttgccttcatggagtcaaagcggatgaaagtagaaaagatgtcttccaactccaacttctcagaagtcaccctggcgggtttagccagtaaagaaaacttcagcaacgtcagcctgcggagcgtcaacctgacggaacagaactctaacaacagcgccgtgccctacaagaggctgatgctgttgcagattaaaggaagaagacatgtgcagaccaggctggtggaacctcgagcttcggcgctcaacagtggggactgcttcctcctgctctctccccactgctgcttcctgtgggtaggagagtttgcaaacgtcatagaaaaggcgaaggcctcagaacttgcaactttaattcagacaaagagggaacttggttgtagagctacttatatccaaaccattgaagaaggaattaatacacacactcatgcagccaaagacttctggaagcttctgggtggccaaaccagttaccaatctgctggagacccaaaagaagatgaactctatgaagcagccataatagaaactaactgcatttaccgtctcatggatgacaaacttgttcctgatgacgactactgggggaaaattccgaagtgctcccttctgcaacccaaagaggtactggtgtttgattttggtagtgaagtttacgtatggcatgggaaagaagtcacattagcacaacgaaaaatagcatttcagctggcaaagcacttatggaatggaacctttgactatgagaactgtgacatcaatcccctggatcctggagaatgcaatccgcttatccccagaaaaggacaggggcggcccgactgggcgatatttgggagacttactgaacacaatgagacgattttgttcaaagagaagtttctggattggacggaactgaagagatcgaatgagaagaaccccggggaacttgcccagcacaaggaagaccccaggactgatgtcaaggcatacgatgtgacacggatggtgtccatgccccagacgacagcaggcaccatcctggacggagtgaacgtcggccgtggctatggcctggtggaaggacacgacaggaggcagtttgagatcaccagcgtttccgtggatgtctggcacatcctggaattcgactatagcaggctccccaaacaaagcatcgggcagttccatgagggggatgcctatgtggtcaagtggaagttcatggtgagcacggcagtgggaagtcgccagaagggagagcactcggtgagggcagccggcaaagagaagtgcgtctacttcttctggcaaggccggcactccaccgtgagtgagaagggcacgtcggcgctgatgacggtggagctggacgaggaaaggggggcccaggtccaggttctccagggaaaggagcccccctgtttcctgcagtgtttccagggggggatggtggtgcactcggggaggcgggaagaggaagaagaaaatgtgcaaagtgagtggcggctgtactgcgtgcgtggagaggtgcccgtggaagggaatttgctggaagtggcctgtcactgtagcagcctgaggtccagaacttccatggtggtgcttaacgtcaacaaggccctcatctacctgtggcacggatgcaaagcccaggcccacacgaaggaggtcggaaggaccgctgcgaacaagatcaaggaacaatgtcccctggaagcaggactgcatagtagcagcaaagtcacaatacacgagtgtgatgaaggctccgagccactcggattctgggatgccttaggaaggagagacaggaaagcctacgattgcatgcttcaagatcctggaagttttaacttcgcgccccgcctgttcatcctcagcagctcctctggggattttgcagccacagagtttgtgtaccctgcccgagccccctctgtggtcagttccatgcccttcctgcaggaagatctgtacagcgcgccccagccagcacttttccttgttgacaatcaccacgaggtgtacctctggcaaggctggtggcccatcgagaacaagatcactggttccgcccgcatccgctgggcctccgaccggaagagtgcgatggagactgtgctccagtactgcaaaggaaaaaatctcaagaaaccagcccccaagtcttaccttatccacgctggtctggagcccctgacattcaccaatatgtttcccagctgggagcacagagaggacatcgctgagatcacagagatggacacggaagtttccaatcagatcaccctcgtggaagacgtcttagccaagctctgtaaaaccatttacccgctggccgacctcctggccaggccactcccggagggggtcgatcctctgaagcttgagatctatctcaccgacgaagacttcgagtttgcactagacatgacgagggatgaatacaacgccctgcccgcctggaagcaggtgaacctgaagaaagcaaaaggcctgttctgagtggggagacgccagaggagcctcacggtcacgtccaacaacaccactgcaccagggaaatggatatatatttttggactggtgtttttcacaaagtatttttcaatcagagttttcagaacctgacattgttaaagatactgcttgtcccggagttgtgtattttgtaaatgttcaagggaactgtttggaaacttctttccaccattcaggaggttatcagaattaataaaagtatctgttatgtgcacttaagccgcagctgctatagatagcactgccttcttgttccagctaggcaatgccttttttttttttttttgaagcagttctctttataaagtgttattttgatagtttgtggattctaaaatatatatatatttatataaacaccatataagtcaaatatgtatttaacaaagcaatatgtattcattcactttcaagatttgttttggtgtcaaaataacatgaaaaggtagatggagttgcttctgttgaattagctctgccaccaatatgtatcttcatacacgtttggaaatgtttcctgcagcattaggtatgacttgttctgagtactgcttccggtgctaaaatgaacaaagaatttgtacttaatggcatggactctggagaatctatgcgaatcaacctttctaccttaatatctccccaaaaatgtatagtgccttgtttttatgtacagtttatatacagaaaagtttgctctgcatttttgatgatggtttggaacattatctacaattttactctcaaatagtcaaaataaaaacatctcaatttctaataccggttgtaaacagtacacatgtcattttgtgatataggactcccaaataaaagtatcagaataaacacaacaattaactggttcacattgaa

SEQ ID NO: 187447 - DNA, 2889 bp, Homo sapiens
  Payload ID: 16905
  Gene Symbol: SVIL
  Gene Name: supervillin
  ENST ID: ENST00000632315
  CDS Start-End: 1-2889
agccacaggagaagctctgcaagaatccatgtgcgatgtttgctgctggagagatcaaaacgccgacaggggagggccttcttgactcacccagcaaaaccatgtctattaaagaaagattggcactgttgaagaaaagcggggaggaagattggagaaacagactcagcaggaggcaggagggcggcaaggcgccggccagcagcctgcacacccaggaagcagggcggtccctcatcaagaaggaagaaggaggagttgcggatgatagtgccatttctaatctgctttggcgggtcacagaaagtcgagagagccaaatgacgattgaggagaggaagcagctcatcactgtgagagaggaggcctggaagacgagaggcagaggagcggccaacgactcgacccagttcactgtggctggcaggatggtgaagaaaggtttggcgtcacctactgccataaccccagtagcctcacccatttgcggtaaaacaagaggcaccacacccgtttccaaacccctggaagatatcgaagccagaccagatatgcagttagaatcggacctgaagttggacaggctggaaacctttctaagaaggctgaataacaaagttggcgggatgcacgaaacggtgctcactgtcaccggcaaatctgtgaaggaggtgatgaagccagatgatgatgaaacctttgccaaattttaccgcagcgtggattataatatgccaagaagtcctgtggagatggatgaggacttcgatgtcattttcgatccttatgcacccaaattgacgtcttccgtggccgagcacaagcgggcagttaggcccaagcgccgggttcaggcctccaaaaaccccctgaaaatgctggcggcaagagaagatctccttcaggaatacactgagcagagattaaacgttgccttcatggagtcaaagcggatgaaagtagaaaagatgtcttccaactccaacttctcagaagtcaccctggcgggtttagccagtaaagaaaacttcagcaacgtcagcctgcggagcgtcaacctgacggaacagaactctaacaacagcgccgtgccctacaagaggctgatgctgttgcagattaaaggaagaagacatgtgcagaccaggctggtggaacctcgagcttcggcgctcaacagtggggactgcttcctcctgctctctccccactgctgcttcctgtgggtaggagagtttgcaaacgtcatagaaaaggcgaaggcctcagaacttgcaactttaattcagacaaagagggaacttggttgtagagctacttatatccaaaccattgaagaaggaattaatacacacactcatgcagccaaagacttctggaagcttctgggtggccaaaccagttaccaatctgctggagacccaaaagaagatgaactctatgaagcagccataatagaaactaactgcatttaccgtctcatggatgacaaacttgttcctgatgacgactactgggggaaaattccgaagtgctcccttctgcaacccaaagaggtactggtgtttgattttggtagtgaagtttacgtatggcatgggaaagaagtcacattagcacaacgaaaaatagcatttcagctggcaaagcacttatggaatggaacctttgactatgagaactgtgacatcaatcccctggatcctggagaatgcaatccgcttatccccagaaaaggacaggggcggcccgactgggcgatatttgggagacttactgaacacaatgagacgattttgttcaaagagaagtttctggattggacggaactgaagagatcgaatgagaagaaccccggggaacttgcccagcacaaggaagaccccaggactgatgtcaaggcatacgatgtgacacggatggtgtccatgccccagacgacagcaggcaccatcctggacggagtgaacgtcggccgtggctatggcctggtggaaggacacgacaggaggcagtttgagatcaccagcgtttccgtggatgtctggcacatcctggaattcgactatagcaggctccccaaacaaagcatcgggcagttccatgagggggatgcctatgtggtcaagtggaagttcatggtgagcacggcagtgggaagtcgccagaagggagagcactcggtgagggcagccggcaaagagaagtgcgtctacttcttctggcaaggccggcactccaccgtgagtgagaagggcacgtcggcgctgatgacggtggagctggacgaggaaaggggggcccaggtccaggttctccagggaaaggagcccccctgtttcctgcagtgtttccagggggggatggtggtgcactcggggaggcgggaagaggaagaagaaaatgtgcaaagtgagtggcggctgtactgcgtgcgtggagaggtgcccgtggaagggaatttgctggaagtggcctgtcactgtagcagcctgaggtccagaacttccatggtggtgcttaacgtcaacaaggccctcatctacctgtggcacggatgcaaagcccaggcccacacgaaggaggtcggaaggaccgctgcgaacaagatcaaggaacaatgtcccctggaagcaggactgcatagtagcagcaaagtcacaatacacgagtgtgatgaaggctccgagccactcggattctgggatgccttaggaaggagagacaggaaagcctacgattgcatgcttcaagatcctggaagttttaacttcgcgccccgcctgttcatcctcagcagctcctctggggattttgcagccacagagtttgtgtaccctgcccgagccccctctgtggtcagttccatgcccttcctgcaggaagatc

SEQ ID NO: 187448 - DNA, 3595 bp, Homo sapiens
  Payload ID: 16906
  Gene Symbol: ST13
  Gene Name: suppression of tumorigenicity 13 (colon carcinoma) (Hsp70 interacting protein)
  Uniprot ID: P50502
  ENST ID: ENST00000216218
  CDS Start-End: 483-1592
atgccccgagctgggaccgaccctccggctccacgcccttttttttttttttttttaggtcccgggcgttgagctctactcagtgcacgcagccacacaatatgctcttggacgtcgccccctggaggggatgttatctcccgcctccttgaagtcgcccatttctggggttgccccatccagggagctggttcctagttaagaatatgagaatgtatgcgcagggaggcaggcaacagcacgaacagccacgcttctagaagattctagggagcgcgcaggagcagcgcagagggagtaggaatgagcaggcggaggacccgaggtcacgagaccgttgggtgggaggagccagcggccggggaggttctagtctgttctgtcttgcggcagccgcccccttctgcgcggtcacgccgagccagcgcctgggcctggaaccgggccgtagcccccccagtttcgcccaccacctccctaccatggacccccgcaaagtgaacgagcttcgggcctttgtgaaaatgtgtaagcaggatccgagcgttctgcacaccgaggaaatgcgcttcctgagggagtgggtggagagcatgggtggtaaagtaccacctgctactcagaaagctaaatcagaagaaaataccaaggaagaaaaacctgatagtaagaaggtggaggaagacttaaaggcagacgaaccatcaagtgaggaaagtgatctagaaattgataaagaaggtgtgattgaaccagacactgatgctcctcaagaaatgggagatgaaaatgcggagataacggaggagatgatggatcaggcaaatgataaaaaagtggctgctattgaagccctaaatgatggtgaactccagaaagccattgacttattcacagatgccatcaagctgaatcctcgcttggccattttgtatgccaagagggccagtgtcttcgtcaaattacagaagccaaatgctgccatccgagactgtgacagagccattgaaataaatcctgattcagctcagccttacaagtggcgggggaaagcacacagacttctaggccactgggaagaagcagcccatgatcttgcccttgcctgtaaattggattatgatgaagatgctagtgcaatgctgaaagaagttcaacctagggcacagaaaattgcagaacatcggagaaagtatgagcgaaaacgtgaagagcgagagatcaaagaaagaatagaacgagttaagaaggctcgagaagagcatgagagagcccagagggaggaagaagccagacgacagtcaggagctcagtatggctcttttccaggtggctttcctgggggaatgcctggtaattttcccggaggaatgcctggaatgggagggggcatgcctggaatggctggaatgcctggactcaatgaaattcttagtgatccagaggttcttgcagccatgcaggatccagaagttatggtggctttccaggatgtggctcagaacccagcaaatatgtcaaaataccagagcaacccaaaggttatgaatctcatcagtaaattgtcagccaaatttggaggtcaagcgtaatgtccttctgataaataaagcccttgctgaaggaaaagcaacctagatcaccttatggatgtcgcaataatacaaaccagtgtacctctgaccttctcatcaagagagctggggtgctttgaagataatccctacccctctcccccaaatgcagctgaagcattttacagtggtttgccattagggtattcattcagataatgttttcctactaggaattacaaactttaaacactttttaaatcttcaaaatatttaaaacaaatttaaagggcctgttaattcttatatttttctttactaatcattttggatttttttctttgaattattggcagggaatatacttatgtatggaagattactgctctgagtgaaataaaagttattagtgcgaggcaaacataactcatttgaggataaagtttgtgttggatatgtggttcctgatgcattttgacttgtctttttaaatgctttatctttttctttaaagatttatttcaataaaactaattgggaccacccgtatttcagtaggacctgggtagggattggaagtacttggcagggcagcagcaatcttgctgtgtttgatataacatgcatccttgggcaggttgcccttaaatcttacactgtggtgaagggatgttttttttgtaatgctgcagtagagttggagtacttagttctcttgttgtccagtatatctaataagtgtttttcatattatttccacgtaagggaaataaggtagtacttttctttttatatttctatgcttaaaattctctttcctagtcaaaaattgcccaaatctgtgtttgctttctgcttgctacatttgtctcccttacttttcttgagctaaagacaggctttttccaccggcatcatcactgctatcatcattaacagcgtaattatacaagcatatttaatgctgagtttaatttaatatgtaatacatatggtaattgtagggtaatacccacaacaactgtagtttcttacttggccaagagaatgcttatttaagtgttagacttccattctggcaaaatcttgccttatcagaagacattggaaagagggattccctttggtgtttggtcttctacttagaaaaacctattgcagttagtttatcttgtagtattcatctttgtattctgaagataaggtttgaattaaattgatacacacagaggggaaccgattttttttatccaatgtgaattataaatgagataatccacagttattcattgtggagttgttgagactatgaaagactcattgtctttgtattcagctcttaaatagtgtaactatatccccacctctgcttgctttctttccctcccctccaatgataaagaaaatgataaattttctgttgtgcattcaattcttattttaaataagactaagtataggcattgtacctgacattgctacgtttctaccagtgtttcaatttaaagtgctagtgtttaaaaacattttcaagggataaggccttctgtactttgcttatttgaagaatcagtggtaggagcagtgaagtaaattctatggagtacatttctaaaataccacatttctgaaatcataaataagtttattcaggttctaaccctttgctgtacacaagcagacagaaatgcatctgttacataaatgagaaaaagctattatgctgatggagcatgctttttaaatcctttaaaaacactcaccatataaacttgcatttgagcttgtgtgttcttttgttaatgtgtagagttctcctttctcgaaattgccagtgtgtacttggcttaactcaagaacagtttcttctggattccttatttgatttatttaacctaattatattctaatattgcaaatattaccataagtgggtaaaagtaaaattcctcttctgaaaatgtgtcctgtgcttttagatttttaaattccataatatacattcttaattttcaactcaa

SEQ ID NO: 187449 - DNA, 549 bp, Homo sapiens
  Payload ID: 16906
  Gene Symbol: ST13
  Gene Name: suppression of tumorigenicity 13 (colon carcinoma) (Hsp70 interacting protein)
  ENST ID: ENST00000411695
  CDS Start-End: 63-549
aacagtgtcctcctgacttgtgctggagtgattgtgcctatgtagagaattccactttaagcatgggtggtaaagtaccacctgctactcagaaagctaaatcagaagaaaataccaaggaagaaaaacctgatagtaagaaggtggaggaagacttaaaggcagacgaaccatcaagtgaggaaagtgatctagaaattgataaagaaggtgtgattgaaccagacactgatgctcctcaagaaatgggagatgaaaatgcggagataacggaggagatgatggatcaggcaaatgataaaaaagtggctgctattgaagccctaaatgatggtgaactccagaaagccattgacttattcacagatgccatcaagctgaatcctcgcttggccattttgtatgccaagagggccagtgtcttcgtcaaattacagaagccaaatgctgccatccgagactgtgacagagccattgaaataaatcctgattcagctcagccttacaagtggcgggggaaagcacacagacttctaggccactgggaag

SEQ ID NO: 187450 - DNA, 798 bp, Homo sapiens
  Payload ID: 16906
  Gene Symbol: ST13
  Gene Name: suppression of tumorigenicity 13 (colon carcinoma) (Hsp70 interacting protein)
  ENST ID: ENST00000455824
  CDS Start-End: 77-193
cgcggtcacgccgagccagcgcctgggcctggaaccgggccgtagcccccccagtttcgcccaccacctccctaccatggacccccgcaaagtgaacgagcttcgggcctttgtgaaaatgtgtaagcaggatccgagcgttctgcacaccgaggaaatgcgcttcctgagggagtgggtggagagaaattgataaagaaggtgtgattgaaccagacactgatgctcctcaagaaatgggagatgaaaatgcggagataacggaggagatgatggatcaggcaaatgataaaaaagtggctgctattgaagccctaaatgatggtgaactccagaaagccattgacttattcacagatgccatcaagctgaatcctcgcttggccattttgtatgccaagagggccagtgtcttcgtcaaattacagaagccaaatgctgccatccgagactgtgacagagccattgaaataaatcctgattcagctcagccttacaagtggcgggggaaagcacacagacttctaggccactgggaagaagcagcccatgatcttgcccttgcctgtaaattggattatgatgaagatgctagtgcaatgctgaaagaagttcaacctagggcacagaaaattgcagaacatcggagaaagtatgagcgaaaacgtgaagagcgagagatcaaagaaagaatagaacgagttaagaaggctcgagaagagcatgagagagcccagagggaggaagaagccagacgacagtcaggagctcagtatggctcttttccaggtggctttc

SEQ ID NO: 187451 - DNA, 630 bp, Homo sapiens
  Payload ID: 16906
  Gene Symbol: ST13
  Gene Name: suppression of tumorigenicity 13 (colon carcinoma) (Hsp70 interacting protein)
  ENST ID: ENST00000413424
  CDS Start-End: 1-439
gattgaaccagacactgatgctcctcaagaaatgggagatgaaaatgcggagataacggaggagatgatggatcaggcaaatgataaaaaagtggctgctattgaagccctaaatgatggtgaactccagaaagccattgacttattcacagatgccatcaagctgaatcctcgcttggccattttgtatgccaagagggccagtgtcttcgtcaaattacagaagccaaatgctgccatccgagactgtgacagagccattgaaataaatcctgattcagctcagccttacaagtggcgggggaaagcacacagacttctaggccactgggaagaagcagcccatgatcttgcccttgcctgtaaattggattatgatgaagatgctagtgcaatgctgaaagaagttcaacctagggtgtgtacaaccactttataaagcaagaagaccttgtggaagttaagaagtttcaggctttccggccaggcgcggtggctcatgcctgtaatcccagcactttgggaggccgaggcaggtggatcatgaggcacagaaaattgcagaacatcggagaaagtatgagcgaaaacgtgaagagcgagagatcaaagaaagaatagaacgagtta

SEQ ID NO: 187452 - DNA, 944 bp, Homo sapiens
  Payload ID: 16906
  Gene Symbol: ST13
  Gene Name: suppression of tumorigenicity 13 (colon carcinoma) (Hsp70 interacting protein)
  ENST ID: ENST00000620312
  CDS Start-End: 26-661
cagtttcgcccaccacctccctaccatggacccccgcaaagtgaacgagcttcgggcctttgtgaaaatgtgtaagcaggatccgagcgttctgcacaccgaggaaatgcgcttcctgagggagtgggtggagagcatgggtggtaaagtaccacctgctactcagaaagctaaatcagaagaaaataccaaggaagaaaaacctgatagtaagaaggtggaggaagacttaaaggcagacgaaccatcaagtgaggaaagtgatctagaaattgataaagaaggtgtgattgaaccagacactgatgctcctcaagaaatgggagatgaaaatgcggagataacggaggagatgatggatcaggcaaatgataaaaaagtggctgctattgaagccctaaatgatggtgaactccagaaagccattgacttattcacagatgccatcaagctgaatcctcgcttggccattttgtatgccaagagggccagtgtcttcgtcaaattacagaagccaaatgctgccatccgagactgtgacagagccattgaaataaatcctgattcagctcagccttacaagtggcgggggaaagcacacagacttctaggccactgggaagaagcagcccatgatcttgcccttgcctggactcaatgaaattcttagtgatccagaggttcttgcagccatgcaggatccagaagttatggtggctttccaggatgtggctcagaacccagcaaatatgtcaaaataccagagcaacccaaaggttatgaatctcatcagtaaattgtcagccaaatttggaggtcaagcgtaatgtccttctgataaataaagcccttgctgaaggaaaagcaacctagatcaccttatggatgtcgcaataatacaaaccagtgtacctctgaccttctcatcaagagagctggggtgc

SEQ ID NO: 187453 - DNA, 3123 bp, Homo sapiens
  Payload ID: 16906
  Gene Symbol: ST13
  Gene Name: suppression of tumorigenicity 13 (colon carcinoma) (Hsp70 interacting protein)
  ENST ID: ENST00000615506
  CDS Start-End: 420-1184
cgcggtcacgccgagccagcgcctgggcctggaaccgggccgtagcccccccagtttcgcccaccacctccctaccatggacccccgcaaagtgaacgagcttcgggcctttgtgaaaatgtgtaagcaggatccgagcgttctgcacaccgaggaaatgcgcttcctgagggagtgggtggagagcatgggtggtaaagtaccacctgctactcagaaagctaaatcagaagaaaataccaaggaagaaaaacctgatagtaagaaggtggaggaagacttaaaggcagacgaaccatcaagtgaggaaagtgatctagaaattgataaagaaggtgtgattgaaccagacactgatgctcctcaagaaatgggagatgaaaatgcggagataacggaggagatgatggatcaggcaaatgataaaagtggctgctattgaagccctaaatgatggtgaactccagaaagccattgacttattcacagatgccatcaagctgaatcctcgcttggccattttgtatgccaagagggccagtgtcttcgtcaaattacagaagccaaatgctgccatccgagactgtgacagagccattgaaataaatcctgattcagctcagccttacaagtggcgggggaaagcacacagacttctaggccactgggaagaagcagcccatgatcttgcccttgcctgtaaattggattatgatgaagatgctagtgcaatgctgaaagaagttcaacctagggcacagaaaattgcagaacatcggagaaagtatgagcgaaaacgtgaagagcgagagatcaaagaaagaatagaacgagttaagaaggctcgagaagagcatgagagagcccagagggaggaagaagccagacgacagtcaggagctcagtatggctcttttccaggtggctttcctgggggaatgcctggtaattttcccggaggaatgcctggaatgggagggggcatgcctggaatggctggaatgcctggactcaatgaaattcttagtgatccagaggttcttgcagccatgcaggatccagaagttatggtggctttccaggatgtggctcagaacccagcaaatatgtcaaaataccagagcaacccaaaggttatgaatctcatcagtaaattgtcagccaaatttggaggtcaagcgtaatgtccttctgataaataaagcccttgctgaaggaaaagcaacctagatcaccttatggatgtcgcaataatacaaaccagtgtacctctgaccttctcatcaagagagctggggtgctttgaagataatccctacccctctcccccaaatgcagctgaagcattttacagtggtttgccattagggtattcattcagataatgttttcctactaggaattacaaactttaaacactttttaaatcttcaaaatatttaaaacaaatttaaagggcctgttaattcttatatttttctttactaatcattttggatttttttctttgaattattggcagggaatatacttatgtatggaagattactgctctgagtgaaataaaagttattagtgcgaggcaaacataactcatttgaggataaagtttgtgttggatatgtggttcctgatgcattttgacttgtctttttaaatgctttatctttttctttaaagatttatttcaataaaactaattgggaccacccgtatttcagtaggacctgggtagggattggaagtacttggcagggcagcagcaatcttgctgtgtttgatataacatgcatccttgggcaggttgcccttaaatcttacactgtggtgaagggatgttttttttgtaatgctgcagtagagttggagtacttagttctcttgttgtccagtatatctaataagtgtttttcatattatttccacgtaagggaaataaggtagtacttttctttttatatttctatgcttaaaattctctttcctagtcaaaaattgcccaaatctgtgtttgctttctgcttgctacatttgtctcccttacttttcttgagctaaagacaggctttttccaccggcatcatcactgctatcatcattaacagcgtaattatacaagcatatttaatgctgagtttaatttaatatgtaatacatatggtaattgtagggtaatacccacaacaactgtagtttcttacttggccaagagaatgcttatttaagtgttagacttccattctggcaaaatcttgccttatcagaagacattggaaagagggattccctttggtgtttggtcttctacttagaaaaacctattgcagttagtttatcttgtagtattcatctttgtattctgaagataaggtttgaattaaattgatacacacagaggggaaccgattttttttatccaatgtgaattataaatgagataatccacagttattcattgtggagttgttgagactatgaaagactcattgtctttgtattcagctcttaaatagtgtaactatatccccacctctgcttgctttctttccctcccctccaatgataaagaaaatgataaattttctgttgtgcattcaattcttattttaaataagactaagtataggcattgtacctgacattgctacgtttctaccagtgtttcaatttaaagtgctagtgtttaaaaacattttcaagggataaggccttctgtactttgcttatttgaagaatcagtggtaggagcagtgaagtaaattctatggagtacatttctaaaataccacatttctgaaatcataaataagtttattcaggttctaaccctttgctgtacacaagcagacagaaatgcatctgttacataaatgagaaaaagctattatgctgatggagcatgctttttaaatcctttaaaaacactcaccatataaacttgcatttgagcttgtgtgttcttttgttaatgtgtagagttctcctttctcgaaattgccagtgtgtacttggcttaactcaagaacagtttcttctggattccttatttgatttatttaacctaattatattctaatattgcaaatattaccataagtgggtaaaagtaaaattcctcttctg

SEQ ID NO: 187454 - DNA, 3539 bp, Homo sapiens
  Payload ID: 16907
  Gene Symbol: ST14
  Gene Name: suppression of tumorigenicity 14 (colon carcinoma)
  Uniprot ID: Q9Y5Y6
  ENST ID: ENST00000278742
  CDS Start-End: 419-2986
ggccggaggggtggtgaacgccgtcgtggtgatggtgagggccttagcgaccaccacccgagtgaggccccctcaccttcaggcccagagccgaggggaggagcctcccccagggccggcgggggcgggcaggtgagccgggcaggtgcgcaggcgagcgcggcgggctgggcgggccgaggccacaccctgaaactacctgcgtgggccgggccggagtgtgagagcggagctgcagccggagaaagaggaagagggagagagagcgcgccagggcgagggcaccgccgccggtcgggcgcgctgggcctgcccggaatcccgccgcctgcgccccgcgccccgcgccctgcgggccatgggagccggccgccggcagggacgacgcctgtgagacccgcgagcggcctcggggaccatggggagcgatcgggcccgcaagggcggagggggcccgaaggacttcggcgcgggactcaagtacaactcccggcacgagaaagtgaatggcttggaggaaggcgtggagttcctgccagtcaacaacgtcaagaaggtggaaaagcatggcccggggcgctgggtggtgctggcagccgtgctgatcggcctcctcttggtcttgctggggatcggcttcctggtgtggcatttgcagtaccgggacgtgcgtgtccagaaggtcttcaatggctacatgaggatcacaaatgagaattttgtggatgcctacgagaactccaactccactgagtttgtaagcctggccagcaaggtgaaggacgcgctgaagctgctgtacagcggagtcccattcctgggcccctaccacaaggagtcggctgtgacggccttcagcgagggcagcgtcatcgcctactactggtctgagttcagcatcccgcagcacctggtggaggaggccgagcgcgtcatggccgaggagcgcgtagtcatgctgcccccgcgggcgcgctccctgaagtcctttgtggtcacctcagtggtggctttccccacggactccaaaacagtacagaggacccaggacaacagctgcagctttggcctgcacgcccgcggtgtggagctgatgcgcttcaccacgcccggcttccctgacagcccctaccccgctcatgcccgctgccagtgggccctgcggggggacgccgactcagtgctgagcctcaccttccgcagctttgaccttgcgtcctgcgacgagcgcggcagcgacctggtgacggtgtacaacaccctgagccccatggagccccacgccctggtgcagttgtgtggcacctaccctccctcctacaacctgaccttccactcctcccagaacgtcctgctcatcacactgataaccaacactgagcggcggcatcccggctttgaggccaccttcttccagctgcctaggatgagcagctgtggaggccgcttacgtaaagcccaggggacattcaacagcccctactacccaggccactacccacccaacattgactgcacatggaacattgaggtgcccaacaaccagcatgtgaaggtgcgcttcaaattcttctacctgctggagcccggcgtgcctgcgggcacctgccccaaggactacgtggagatcaacggggagaaatactgcggagagaggtcccagttcgtcgtcaccagcaacagcaacaagatcacagttcgcttccactcagatcagtcctacaccgacaccggcttcttagctgaatacctctcctacgactccagtgacccatgcccggggcagttcacgtgccgcacggggcggtgtatccggaaggagctgcgctgtgatggctgggccgactgcaccgaccacagcgatgagctcaactgcagttgcgacgccggccaccagttcacgtgcaagaacaagttctgcaagcccctcttctgggtctgcgacagtgtgaacgactgcggagacaacagcgacgagcaggggtgcagttgtccggcccagaccttcaggtgttccaatgggaagtgcctctcgaaaagccagcagtgcaatgggaaggacgactgtggggacgggtccgacgaggcctcctgccccaaggtgaacgtcgtcacttgtaccaaacacacctaccgctgcctcaatgggctctgcttgagcaagggcaaccctgagtgtgacgggaaggaggactgtagcgacggctcagatgagaaggactgcgactgtgggctgcggtcattcacgagacaggctcgtgttgttgggggcacggatgcggatgagggcgagtggccctggcaggtaagcctgcatgctctgggccagggccacatctgcggtgcttccctcatctctcccaactggctggtctctgccgcacactgctacatcgatgacagaggattcaggtactcagaccccacgcagtggacggccttcctgggcttgcacgaccagagccagcgcagcgcccctggggtgcaggagcgcaggctcaagcgcatcatctcccaccccttcttcaatgacttcaccttcgactatgacatcgcgctgctggagctggagaaaccggcagagtacagctccatggtgcggcccatctgcctgccggacgcctcccatgtcttccctgccggcaaggccatctgggtcacgggctggggacacacccagtatggaggcactggcgcgctgatcctgcaaaagggtgagatccgcgtcatcaaccagaccacctgcgagaacctcctgccgcagcagatcacgccgcgcatgatgtgcgtgggcttcctcagcggcggcgtggactcctgccagggtgattccgggggacccctgtccagcgtggaggcggatgggcggatcttccaggccggtgtggtgagctggggagacggctgcgctcagaggaacaagccaggcgtgtacacaaggctccctctgtttcgggactggatcaaagagaacactggggtataggggccggggccacccaaatgtgtacacctgcggggccacccatcgtccaccccagtgtgcacgcctgcaggctggagactggaccgctgactgcaccagcgcccccagaacatacactgtgaactcaatctccagggctccaaatctgcctagaaaacctctcgcttcctcagcctccaaagtggagctgggaggtagaaggggaggacactggtggttctactgacccaactgggggcaaaggtttgaagacacagcctcccccgccagccccaagctgggccgaggcgcgtttgtgcatatctgcctcccctgtctctaaggagcagcgggaacggagcttcggggcctcctcagtgaaggtggtggggctgccggatctgggctgtggggcccttgggccacgctcttgaggaagcccaggctcggaggaccctggaaaacagacgggtctgagactgaaattgttttaccagctcccagggtggacttcagtgtgtgtatttgtgtaaatgagtaaaacattttatttctttttaggtaagtttctttt

SEQ ID NO: 187455 - DNA, 6187 bp, Homo sapiens
  Payload ID: 16908
  Gene Symbol: ST18
  Gene Name: suppression of tumorigenicity 18, zinc finger
  Uniprot ID: O60284
  ENST ID: ENST00000276480
  CDS Start-End: 685-3828
ctttttgtagggagaagggcaggatgtttttaactgaatgtgacctcaggggaatactagagaaaataataaaatttctgaatggggcagcgtggagaaatcctaagagaaatagcataagagcattttggaacacatccaggaaaagataactttcgacacacctgtagacgttcgccaggtaaaggagtgatggaaactctccagttcagatccagtagcttttagggaaggaactacagttgctgacttaagttgaagaagcatctatttaatgtctggtcaaatcctacaagaaacacagaaatctatgattaaaaagctgagcactttgatatactgcaaagggtagagaaggcaggacggtagaaattttctgcaagaaagaatgaatttcaggatttatcactaaataagacaaagtcatttatttagtccccctgacacagcagggcaaactgagttgacatacaagttacctggagaaaaagagagcaattccaggacttcctcttcagcctaaaagaaggtaccagatctgtgcactggggcgatgtggaagagacctgcttattgcccctgatgtaagctccagtaagaaaagacgtcaagtacaagtactaggaaatcactttatacatctgtttataggaatgacctcaggactttgtgttcatgttatagatggatgcagaggctgaagataaaacgctgcgtactcgctctaaaggaaccgaggtgccaatggattcactaatccaggagctcagtgttgcctatgattgctccatggcaaagaagagaacagctgaagatcaggctttgggggttccagtcaacaaaaggaaatccctgctaatgaagccccgacactacagcccaaaagcagactgccaagaagaccgcagtgacaggacagaggacgatggccccttggaaacacatggtcactctaccgcagaggaaatcatgataaaacctatggatgaaagtcttctttcaactgcacaagaaaactccagtaggaaggaagacagatactcttgttatcaagagctcatggtcaagtctttaatgcacttggggaaatttgaaaaaaatgtatctgttcagactgtaagtgaaaatttaaatgacagtggcatccagtctttaaaagcagagagcgatgaagcagacgagtgctttctgattcattctgatgatggaagagacaagattgatgattctcagccacccttctgctcctctgatgacaatgaaagtaactctgaaagtgcagaaaatggctgggacagtggctccaacttctcagaagaaaccaaaccacctagagtcccaaagtatgttttaacagatcataaaaaagacctattggaagttcctgaaataaaaactgaaggtgacaaatttatcccttgtgagaacaggtgtgattctgaaacagaaaggaaagacccgcagaatgctctcgcagaacccctggatggcaatgcccagccctcattccctgacgttgaggaggaagatagcgagagcctggcagtaatgacggaagagggtagtgacctggaaaaggccaaggggaatttaagtttgctggagcaggcaattgctctgcaggctgagcgaggttgtgttttccataacacctacaaagagctggataggttcctgctggagcacctagcaggggaaaggaggcaaaccaaagttatcgacatgggtggaagacaaatctttaacaataaacattcaccaaggcctgaaaagagggagaccaagtgcccgatccctggatgtgatggcacgggacacgtgacagggctctacccgcaccaccgcagcctttcggggtgcccccacaaagtgcgggttcccctggaaattcttgccatgcatgaaaatgtgctcaagtgtcccacgccgggatgcacaggaaggggtcatgtgaacagcaaccgcaacacccacaggagtctttctggttgtccaattgctgcagctgaaaaattggcaatgtcccaggataaaaatcagcttgattctccccaaactgggcagtgtcctgaccaggcccacaggacaagtttggtgaagcaaattgaattcaatttcccgtcacaagccatcacctctcccagagccacagtgtcaaaagaacaagagaagtttggaaaagtaccatttgattatgccagttttgatgcccaagttttcggtaaacgccctctcatacaaacagtgcaaggacgaaaaacaccaccatttcctgaatcaaagcattttccaaatccagtgaaatttcctaatcgactgcctagtgcaggcgcccacacccagagccctggccgtgccagctcttatagctacggtcaatgtagtgaagacacccacatagcagcagctgctgccatcctgaacctttccacccgctgcagggaagccacagacatcctctccaacaagccacagagtctgcatgccaagggagccgaaatagaagtggatgaaaatggcacattggacttaagcatgaaaaaaaatcgaatcctggacaagtctgcacccctaacttcctctaacacttctattccaactccttcctcttccccattcaaaacaagcagcattctggtcaatgcagcattctatcaggctctttgtgaccaagagggctgggacactcctatcaactatagcaaaactcacgggaagacagaggaggagaaagagaaagacccagtgagctctctagaaaatttagaggaaaaaaagtttcctggagaggcctctataccaagccctaaacccaagcttcatgcaagagatctcaaaaaggaactaatcacctgtccaacaccaggatgtgatggaagtggccacgtgacaggaaactatgcatctcatcgcagtgtttctggatgtcctttagcagataagactctaaaatccctcatggctgccaactctcaggagcttaagtgtccaaccccaggctgcgatggctcggggcacgtgactggaaactatgcttcccacagaagcttgtccggatgccctcgtgcaaggaaaggtggtgtcaaaatgacccctaccaaggaagaaaaagaagaccctgaactgaaatgtcctgtgatagggtgtgatggccaaggtcacatatcaggtaaatacacatcacaccgcacagcttctggctgtcctctggctgccaagagacagaaggagaatcctctcaatggagcctccctctcctggaaactgaacaaacaagagctaccacattgtcccttgccaggctgcaatgggctgggccatgtaaataatgtttttgtcacccaccgaagcttatctggatgtcctctcaatgcacaagttatcaaaaagggcaaggtttctgaagaactcatgaccatcaagctcaaagcaactgggggaatagagagtgatgaagaaattaggcatttggatgaagaaataaaggaactgaatgaatccaaccttaaaattgaagcagatatgatgaaacttcagacccagatcacatctatggagagcaacttaaagacgatagaggaggagaacaaactcatagaacagaacaatgaaagtctgctgaaagagctggcaggtctaagccaagctctcatttcaagccttgctgacatccagcttccacagatgggacctatcagtgagcagaattttgaagcatatgtaaatacactcacagatatgtacagcaatctggaacgggactattccccggaatgcaaagctctactggaaagtatcaaacaggcagtgaagggtatccatgtgtaggatcacagcgctgccgggcaacagaagttaccaacagcagtaaactccagatggatctgttagaggttcatgtactgctaaggcgtggaggttgccgtactgcatttacaatttgcaacattgcactaattttattttccccagctgatataaaaaggaaagaaaaactatgatagacttcttggattaaaagcaatgcagtcaattattagatcttatttattttcatatgtttttcttttatttcttcattgtactctttttttttttgtaaagtatatgtaaaataaatgtgacatttttataatttatttattactaatcaaagagttttttatcttttaactgcattttgaagtctgccgtatttttacaagtgtgtttattaatttattttccaataggatttaaatagaaatgctattctcaagtcatctttcttgctgggttttaatgaggaaacaggaaagggtgaaggaaatccttgtctaaggactgcactatagttgagtttgatttttattgcacacttcttcccccacctttcactgatttttgtatttataaatgaatttgcggtaaggtgagctgcacggaaggaataagaagacaaatggcgcccactagtggggaatccgcactcacaaaagcacaggatgctggaaaacagcctgctcagaatttgttagcaataattaaatatagcaatcagcaaagtattcgacttggctggacggttttcgttaatatgaattatttatttgaaatgttttaaagaaacataagcctttttagtgatgcagatttgtctgtttgtttttcaagtcatatcagatcgttggcaactcgtatcccaagatgaaaaataagacttggtgtgaccagccaggctttcctgccatatgttggtacaatatacaagtgacaatattggtgtagatttgtacttagcaaatacaaacacatccaaatgaaaaattttgtagataccatatcccctgaaatagcatttatcttactgggttgactggaaaggaatggaaaatatagtaacacatgaaaaaatgctactccaatctgaatgattacttcaaacactggcaccttgggtctcacccaccataggaaacaagacaacattcaatttgatagaaatcttgccacaaaacttcaaatgctacaaaatatacacacacactcacacacacaggcatactcacacacagacacacacacacacacacacacagactcatccacacttcaaattgagcccacaatcttgaatttctgaacggatcagagtttcatagtttctatagtaaaggcaatgtctatttcagggattgtaaagtagttaagcattgtttcaaaagtttttttatatttattttttttaaggaaaaggtatagacaaccagctaaactgcctttttggtgtgcacacacatttcatgtgcagacgtgcctctgtgtaaatgtacacatgaacttcatgtgggcttaattttctgtgctataaacaaaagtgtttattttttattaacctcatggatatttagatggaaagtgatggcattcacaggcttgatgtattccactgttattactgttacctgcacaaatgaaaaacaatactcaacagtaattccactcccatgaaactttggtcattgttatgcattaagtggggcttatctttggtttggagttcatttgaactcttgaaccttagtttagtgaagatgaactgtctgttcttaggtagaaacggtgtttatttaaaaatcagttttaaaaaatgagctaccatatgtgctgtctattataaatgggacaccaaacaaaattttctattacagttgtgtacttgcaaacattttgctatacagtacttcatagatgcatacaaatgagctcacttattacaaagacaaacgtttaatttgctaaatattttaacaagtttgttatatattttatttaatttaaaagaaatctcttaccaacctacatatttattactataatttgctatgacttcaggttaatttatttgtgtttgcatagtttgagcaggatgttttgtgaagtatgtttgtatttatttgcctactttgtacttgatgtgttttgtaatgtgcactgaatttgttttcttttcaactatgttaatgatcaatactgtaaattgggtcttttgtaaacaaaaaggcaatgatgtatgcattttttttaatttgaggtagtttgtttgtatactgtttctccaaacacttaatatttcttacatcaaagcaacaaaattgtgttcagtgctgtacatttggtgtatggtaggaaataaaaattgataacg

SEQ ID NO: 187456 - DNA, 629 bp, Homo sapiens
  Payload ID: 16908
  Gene Symbol: ST18
  Gene Name: suppression of tumorigenicity 18, zinc finger
  ENST ID: ENST00000519118
  CDS Start-End: 592-629
agaggatgtttagttcaagagaggatgatattgttacaagacattcagagcccccaattttgtgagtgtccctgaagcattgtgacaattccattttatgtgtctgcgtgctcatatcaagactaaggagtgatggaaactctccagttcagatccagtagcttttagggaaggaactacagttgctgacttaagttgaagaagcatctatttaatgtctggtcaaatcctacaagaaacacagaaatctatgattaaaaagctgagcactttgatatactgcaaagggtagagaaggcaggacggtagaaattttctgcaagaaagaatgaatttcaggatttatcactaaataagacaaagtcatttatttagtccccctgacacagcagggcaaactgagttgacatacaagttacctggagaaaaagagagcaattccaggacttcctcttcagcctaaaagaaggtaccagatctgtgcactggggcgatgtggaagagacctgcttattgcccctgatgtaagctccagtaagaaaagacgtcaagtacaagtactaggaaatcactttatacatctgtttatagatggatgcagaggctgaagataaaacgctgcgtactcg

SEQ ID NO: 187457 - DNA, 2579 bp, Homo sapiens
  Payload ID: 16908
  Gene Symbol: ST18
  Gene Name: suppression of tumorigenicity 18, zinc finger
  ENST ID: ENST00000517580
  CDS Start-End: 718-2579
ggtaaataacacagagcaaagttagcaagttgcagcgcctctgcgttctgattctatggaacctttttgtagggagaagggcaggatgtttttaactgaatgtgacctcaggggaatactagagaaaataataaaatttctgaatggggcagcgtggagaaatcctaagagaaatagcataagagcattttggaacacatccaggaaaagataactttcgacacacctgtagacgttcgccaggtaaaggagtgatggaaactctccagttcagatccagtagcttttagggaaggaactacagttgctgacttaagttgaagaagcatctatttaatgtctggtcaaatcctacaagaaacacagaaatctatgattaaaaagctgagcactttgatatactgcaaagggtagagaaggcaggacggtagaaattttctgcaagaaagaatgaatttcaggatttatcactaaataagacaaagtcatttatttagtccccctgacacagcagggcaaactgagttgacatacaagttacctggagaaaaagagagcaattccaggacttcctcttcagcctaaaagaaggtaccagatctgtgcactggggcgatgtggaagagacctgcttattgcccctgatgtaagctccagtaagaaaagacgtcaagtacaagtactaggaaatcactttatacatctgtttataggtttatggatgcagaggctgaagataaaacgctgcgtactcgctctaaaggaaccgaggtgccaatggattcactaatccaggagctcagtgttgcctatgattgctccatggcaaagaagagaacagctgaagatcaggctttgggggttccagtcaacaaaaggaaatccctgctaatgaagccccgacactacagcccaaaagcagactgccaagaagaccgcagtgacaggacagaggacgatggccccttggaaacacatggtcactctaccgcagaggaaatcatgataaaacctatggatgaaagtcttctttcaactgcacaagaaaactccagtaggaaggaagacagatactcttgttatcaagagctcatggtcaagtctttaatgcacttggggaaatttgaaaaaaatgtatctgttcagactgtaagtgaaaatttaaatgacagtggcatccagtctttaaaagcagagagcgatgaagcagacgagtgctttctgattcattctgatgatggaagagacaagattgatgattctcagccacccttctgctcctctgatgacaatgaaagtaactctgaaagtgcagaaaatggctgggacagtggctccaacttctcagaagaaaccaaaccacctagagtcccaaagtatgttttaacagatcataaaaaagacctattggaagttcctgaaataaaaactgaaggtgacaaatttatcccttgtgagaacaggtgtgattctgaaacagaaaggaaagacccgcagaatgctctcgcagaacccctggatggcaatgcccagccctcattccctgacgttgaggaggaagatagcgagagcctggcagtaatgacggaagagggtagtgacctggaaaaggccaaggggaatttaagtttgctggagcaggcaattgctctgcaggctgagcgaggttgtgttttccataacacctacaaagagctggataggttcctgctggagcacctagcaggggaaaggaggcaaaccaaagttatcgacatgggtggaagacaaatctttaacaataaacattcaccaaggcctgaaaagagggagaccaagtgcccgatccctggatgtgatggcacgggacacgtgacagggctctacccgcaccaccgcagcctttcggggtgcccccacaaagtgcgggttcccctggaaattcttgccatgcatgaaaatgtgctcaagtgtcccacgccgggatgcacaggaaggggtcatgtgaacagcaaccgcaacacccacaggagtctttctggttgtccaattgctgcagctgaaaaattggcaatgtcccaggataaaaatcagcttgattctccccaaactgggcagtgtcctgaccaggcccacaggacaagtttggtgaagcaaattgaattcaatttcccgtcacaagccatcacctctcccagagccacagtgtcaaaagaacaagagaagtttggaaaagtaccatttgattatgccagttttgatgcccaagttttcggtaaacgccctctcatacaaacagtgcaaggacgaaaaacaccaccatttcctgaatcaaagcattttccaaatccagtgaaatttcctaatcgactgcctagtgcaggcgcccacacccagagccctggccgtgccagctcttatagctacggtcaatgtagtgaagacacccacatagcagcagctgctgccatcctgaacctttccacccgctgcagggaagccacagacatcctctccaacaagccacagagtctgcatgccaagggagccgaaatagaagtggatgaaaatggcacattggacttaagcatgaaaaaaaa

SEQ ID NO: 187458 - DNA, 3963 bp, Homo sapiens
  Payload ID: 16908
  Gene Symbol: ST18
  Gene Name: suppression of tumorigenicity 18, zinc finger
  ENST ID: ENST00000522251
  CDS Start-End: 78-203
tgcccctgatgtaagctccagtaagaaaagacgtcaagtacaagtactaggaaatcactttatacatctgtttatagatggatgcagaggctgaagataaaacgctgcgtactcgctctaaaggaaccgaggtgccaatggattcactaatccaggagctcagaatcagtgtgcccgtggacatgaggccacttacctggtgagggacaccagagtcctttaaaggaaccaagtcattcagagaaaaaaagtgttgcctatgattgctccatggcaaagaagagaacagctgaagatcaggctttgggggttccagtcaacaaaaggaaatccctgctaatgaagccccgacactacagcccaaaagcagactgccaagaagaccgcagtgacaggacagaggacgatggccccttggaaacacatggtcactctaccgcagaggaaatcatgataaaacctatggatgaaagtcttctttcaactgcacaagaaaactccagtaggaaggaagacagatactcttgttatcaagagctcatggtcaagtctttaatgcacttggggaaatttgaaaaaaatgtatctgttcagactgtaagtgaaaatttaaatgacagtggcatccagtctttaaaagcagagagcgatgaagcagacgagtgctttctgattcattctgatgatggaagagacaagattgatgattctcagccacccttctgctcctctgatgacaatgaaagtaactctgaaagtgcagaaaatggctgggacagtggctccaacttctcagaagaaaccaaaccacctagagtcccaaagtatgttttaacagatcataaaaaagacctattggaagttcctgaaataaaaactgaaggtgacaaatttatcccttgtgagaacaggtgtgattctgaaacagaaaggaaagacccgcagaatgctctcgcagaacccctggatggcaatgcccagccctcattccctgacgttgaggaggaagatagcgagagcctggcagtaatgacggaagagggtagtgacctggaaaaggccaaggggaatttaagtttgctggagcaggcaattgctctgcaggctgagcgaggttgtgttttccataacacctacaaagagctggataggttcctgctggagcacctagcaggggaaaggaggcaaaccaaagttatcgacatgggtggaagacaaatctttaacaataaacattcaccaaggcctgaaaagagggagaccaagtgcccgatccctggatgtgatggcacgggacacgtgacagggctctacccgcaccaccgcagcctttcggggtgcccccacaaagtgcgggttcccctggaaattcttgccatgcatgaaaatgtgctcaagtgtcccacgccgggatgcacaggaaggggtcatgtgaacagcaaccgcaacacccacaggagtctttctggttgtccaattgctgcagctgaaaaattggcaatgtcccaggataaaaatcagcttgattctccccaaactgggcagtgtcctgaccaggcccacaggacaagtttggtgaagcaaattgaattcaatttcccgtcacaagccatcacctctcccagagccacagtgtcaaaagaacaagagaagtttggaaaagtaccatttgattatgccagttttgatgcccaagttttcggtaaacgccctctcatacaaacagtgcaaggacgaaaaacaccaccatttcctgaatcaaagcattttccaaatccagtgaaatttcctaatcgactgcctagtgcaggcgcccacacccagagccctggccgtgccagctcttatagctacggtcaatgtagtgaagacacccacatagcagcagctgctgccatcctgaacctttccacccgctgcagggaagccacagacatcctctccaacaagccacagagtctgcatgccaagggagccgaaatagaagtggatgaaaatggcacattggacttaagcatgaaaaaaaatcgaatcctggacaagtctgcacccctaacttcctctaacacttctattccaactccttcctcttccccattcaaaacaagcagcattctggtcaatgcagcattctatcaggctctttgtgaccaagagggctgggacactcctatcaactatagcaaaactcacgggaagacagaggaggagaaagagaaagacccagtgagctctctagaaaatttagaggaaaaaaagtttcctggagaggcctctataccaagccctaaacccaagcttcatgcaagagatctcaaaaaggaactaatcacctgtccaacaccaggatgtgatggaagtggccacgtgacaggaaactatgcatctcatcgcagtgtttctggatgtcctttagcagataagactctaaaatccctcatggctgccaactctcaggagcttaagtgtccaaccccaggctgcgatggctcggggcacgtgactggaaactatgcttcccacagaagcttgtccggatgccctcgtgcaaggaaaggtggtgtcaaaatgacccctaccaaggaagaaaaagaagaccctgaactgaaatgtcctgtgatagggtgtgatggccaaggtcacatatcaggtaaatacacatcacaccgcacagcttctggctgtcctctggctgccaagagacagaaggagaatcctctcaatggagcctccctctcctggaaactgaacaaacaagagctaccacattgtcccttgccaggctgcaatgggctgggccatgtaaataatgtttttgtcacccaccgaagcttatctggatgtcctctcaatgcacaagttatcaaaaagggcaaggtttctgaagaactcatgaccatcaagctcaaagcaactgggggaatagagagtgatgaagaaattaggcatttggatgaagaaataaaggaactgaatgaatccaaccttaaaattgaagcagatatgatgaaacttcagacccagatcacatctatggagagcaacttaaagacgatagaggaggagaacaaactcatagaacagaacaatgaaagtctgctgaaagagctggcaggtctaagccaagctctcatttcaagccttgctgacatccagcttccacagatgggacctatcagtgagcagaattttgaagcatatgtaaatacactcacagatatgtacagcaatctggaacgggactattccccggaatgcaaagctctactggaaagtatcaaacaggcagtgaagggtatccatgtgtaggatcacagcgctgccgggcaacagaagttaccaacagcagtaaactccagatggatctgttagaggttcatgtactgctaaggcgtggaggttgccgtactgcatttacaatttgcaacattgcactaattttattttccccagctgatataaaaaggaaagaaaaactatgatagacttcttggattaaaagcaatgcagtcaattattagatcttatttattttcatatgtttttcttttatttcttcattgtactctttttttttttgtaaagtatatgtaaaataaatgtgacatttttataatttatttattactaatcaaagagttttttatcttttaactgcattttgaagtctgccgtatttttacaagtgtgtttattaatttattttccaataggatttaaatagaaatgctattctcaagtcatctttcttgctgggttttaatgaggaaacaggaaagggtgaaggaaatccttgtctaaggactgcactatagttgagtttgatttttattgcacacttcttcccccacctttcactgatttttgtatttataaatgaatttgcggtaaggtgagctgcacggaaggaataagaagacaaatggcgcccactagtggggaatccgcactcacaaaagcaca

SEQ ID NO: 187459 - DNA, 3870 bp, Homo sapiens
  Payload ID: 16908
  Gene Symbol: ST18
  Gene Name: suppression of tumorigenicity 18, zinc finger
  ENST ID: ENST00000521824
  CDS Start-End: 77-361
gcccctgatgtaagctccagtaagaaaagacgtcaagtacaagtactaggaaatcactttatacatctgtttatagatggatgcagaggctgaagataaaacgctgcgtactcgctctaaaggaaccgaggtgccaatggattcactaatccaggagctcagtgttgcctatgattgctccatggcaaagaagagaacagctgaagatcaggctttgggggttccagtcaacaaaaggaaatccctgctaatgaagccccgacactacagcccaaaagcagactgccaagaagaccgcagtgacaggacagaggacgatggccccttggaaacacatggtcactctaccaggaaatcatgataaaacctatggatgaaagtcttctttcaactgcacaagaaaactccagtaggaaggaagacagatactcttgttatcaagagctcatggtcaagtctttaatgcacttggggaaatttgaaaaaaatgtatctgttcagactgtaagtgaaaatttaaatgacagtggcatccagtctttaaaagcagagagcgatgaagcagacgagtgctttctgattcattctgatgatggaagagacaagattgatgattctcagccacccttctgctcctctgatgacaatgaaagtaactctgaaagtgcagaaaatggctgggacagtggctccaacttctcagaagaaaccaaaccacctagagtcccaaagtatgttttaacagatcataaaaaagacctattggaagttcctgaaataaaaactgaaggtgacaaatttatcccttgtgagaacaggtgtgattctgaaacagaaaggaaagacccgcagaatgctctcgcagaacccctggatggcaatgcccagccctcattccctgacgttgaggaggaagatagcgagagcctggcagtaatgacggaagagggtagtgacctggaaaaggccaaggggaatttaagtttgctggagcaggcaattgctctgcaggctgagcgaggttgtgttttccataacacctacaaagagctggataggttcctgctggagcacctagcaggggaaaggaggcaaaccaaagttatcgacatgggtggaagacaaatctttaacaataaacattcaccaaggcctgaaaagagggagaccaagtgcccgatccctggatgtgatggcacgggacacgtgacagggctctacccgcaccaccgcagcctttcggggtgcccccacaaagtgcgggttcccctggaaattcttgccatgcatgaaaatgtgctcaagtgtcccacgccgggatgcacaggaaggggtcatgtgaacagcaaccgcaacacccacaggagtctttctggttgtccaattgctgcagctgaaaaattggcaatgtcccaggataaaaatcagcttgattctccccaaactgggcagtgtcctgaccaggcccacaggacaagtttggtgaagcaaattgaattcaatttcccgtcacaagccatcacctctcccagagccacagtgtcaaaagaacaagagaagtttggaaaagtaccatttgattatgccagttttgatgcccaagttttcggtaaacgccctctcatacaaacagtgcaaggacgaaaaacaccaccatttcctgaatcaaagcattttccaaatccagtgaaatttcctaatcgactgcctagtgcaggcgcccacacccagagccctggccgtgccagctcttatagctacggtcaatgtagtgaagacacccacatagcagcagctgctgccatcctgaacctttccacccgctgcagggaagccacagacatcctctccaacaagccacagagtctgcatgccaagggagccgaaatagaagtggatgaaaatggcacattggacttaagcatgaaaaaaaatcgaatcctggacaagtctgcacccctaacttcctctaacacttctattccaactccttcctcttccccattcaaaacaagcagcattctggtcaatgcagcattctatcaggctctttgtgaccaagagggctgggacactcctatcaactatagcaaaactcacgggaagacagaggaggagaaagagaaagacccagtgagctctctagaaaatttagaggaaaaaaagtttcctggagaggcctctataccaagccctaaacccaagcttcatgcaagagatctcaaaaaggaactaatcacctgtccaacaccaggatgtgatggaagtggccacgtgacaggaaactatgcatctcatcgcagtgtttctggatgtcctttagcagataagactctaaaatccctcatggctgccaactctcaggagcttaagtgtccaaccccaggctgcgatggctcggggcacgtgactggaaactatgcttcccacagaagcttgtccggatgccctcgtgcaaggaaaggtggtgtcaaaatgacccctaccaaggaagaaaaagaagaccctgaactgaaatgtcctgtgatagggtgtgatggccaaggtcacatatcaggtaaatacacatcacaccgcacagcttctggctgtcctctggctgccaagagacagaaggagaatcctctcaatggagcctccctctcctggaaactgaacaaacaagagctaccacattgtcccttgccaggctgcaatgggctgggccatgtaaataatgtttttgtcacccaccgaagcttatctggatgtcctctcaatgcacaagttatcaaaaagggcaaggtttctgaagaactcatgaccatcaagctcaaagcaactgggggaatagagagtgatgaagaaattaggcatttggatgaagaaataaaggaactgaatgaatccaaccttaaaattgaagcagatatgatgaaacttcagacccagatcacatctatggagagcaacttaaagacgatagaggaggagaacaaactcatagaacagaacaatgaaagtctgctgaaagagctggcaggtctaagccaagctctcatttcaagccttgctgacatccagcttccacagatgggacctatcagtgagcagaattttgaagcatatgtaaatacactcacagatatgtacagcaatctggaacgggactattccccggaatgcaaagctctactggaaagtatcaaacaggcagtgaagggtatccatgtgtaggatcacagcgctgccgggcaacagaagttaccaacagcagtaaactccagatggatctgttagaggttcatgtactgctaaggcgtggaggttgccgtactgcatttacaatttgcaacattgcactaattttattttccccagctgatataaaaaggaaagaaaaactatgatagacttcttggattaaaagcaatgcagtcaattattagatcttatttattttcatatgtttttcttttatttcttcattgtactctttttttttttgtaaagtatatgtaaaataaatgtgacatttttataatttatttattactaatcaaagagttttttatcttttaactgcattttgaagtctgccgtatttttacaagtgtgtttattaatttattttccaataggatttaaatagaaatgctattctcaagtcatctttcttgctgggttttaatgaggaaacaggaaagggtgaaggaaatccttgtctaaggactgcactatagttgagtttgatttttattgcacacttcttcccccacctttcactgatttttgtatttataaatgaatttgcggtaaggtgagctgcacggaaggaataagaagacaaatggcgcccactagtggggaatccgcactcacaaaagcaca

SEQ ID NO: 187460 - DNA, 3928 bp, Homo sapiens
  Payload ID: 16908
  Gene Symbol: ST18
  Gene Name: suppression of tumorigenicity 18, zinc finger
  ENST ID: ENST00000521582
  CDS Start-End: 78-1172
tgcccctgatgtaagctccagtaagaaaagacgtcaagtacaagtactaggaaatcactttatacatctgtttatagatggatgcagaggctgaagataaaacgctgcgtactcgctctaaaggaaccgaggtgccaatggattcactaatccaggagctcagtgttgcctatgattgctccatggcaaagaagagaacagctgaagatcaggctttgggggttccagtcaacaaaaggaaatccctgctaatgaagccccgacactacagcccaaaagcagactgccaagaagaccgcagtgacaggacagaggacgatggccccttggaaacacatggtcactctaccgcagaggaaatcatgataaaacctatggatgaaagtcttctttcaactgcacaagaaaactccagtaggaaggaagacagatactcttgttatcaagagctcatggtcaagtctttaatgcacttggggaaatttgaaaaaaatgtatctgttcagactgtaagtgaaaatttaaatgacagtggcatccagtctttaaaagcagagagcgatgaagcagacgagtgctttctgattcattctgatgatggaagagacaagattgatgattctcagccacccttctgctcctctgatgacaatgaaagtaactctgaaagtgcagaaaatggctgggacagtggctccaacttctcagaagaaaccaaaccacctagagtcccaaagtatgttttaacagatcataaaaaagacctattggaagttcctgaaataaaaactgaaggtgacaaatttatcccttgtgagaacaggtgtgattctgaaacagaaaggaaagacccgcagaatgctctcgcagaacccctggatggcaatgcccagccctcattccctgacgttgaggaggaagatagcgagagcctggcagtaatgacggaagagggtagtgacctggaaaaggccaaggggaatttaagtttgctggagcaggcaattgctctgcaggctgagcgaggttgtgttttccataacacctacaaagagctggataggttcctgctggagcacctagcaggggaaaggaggcaaaccaaagttatcgacatgggtggaagacaaatctttaacaataaacattatcctccaatcaagctgtgttaattttggactattttcacacatgaaaaaagattcaccaaggcctgaaaagagggagaccaagtgcccgatccctggatgtgatggcacgggacacgtgacagggctctacccgcaccaccgcagcctttcggggtgcccccacaaagtgcgggttcccctggaaattcttgccatgcatgaaaatgtgctcaagtgtcccacgccgggatgcacaggaaggggtcatgtgaacagcaaccgcaacacccacaggagtctttctggttgtccaattgctgcagctgaaaaattggcaatgtcccaggataaaaatcagcttgattctccccaaactgggcagtgtcctgaccaggcccacaggacaagtttggtgaagcaaattgaattcaatttcccgtcacaagccatcacctctcccagagccacagtgtcaaaagaacaagagaagtttggaaaagtaccatttgattatgccagttttgatgcccaagttttcggtaaacgccctctcatacaaacagtgcaaggacgaaaaacaccaccatttcctgaatcaaagcattttccaaatccagtgaaatttcctaatcgactgcctagtgcaggcgcccacacccagagccctggccgtgccagctcttatagctacggtcaatgtagtgaagacacccacatagcagcagctgctgccatcctgaacctttccacccgctgcagggaagccacagacatcctctccaacaagccacagagtctgcatgccaagggagccgaaatagaagtggatgaaaatggcacattggacttaagcatgaaaaaaaatcgaatcctggacaagtctgcacccctaacttcctctaacacttctattccaactccttcctcttccccattcaaaacaagcagcattctggtcaatgcagcattctatcaggctctttgtgaccaagagggctgggacactcctatcaactatagcaaaactcacgggaagacagaggaggagaaagagaaagacccagtgagctctctagaaaatttagaggaaaaaaagtttcctggagaggcctctataccaagccctaaacccaagcttcatgcaagagatctcaaaaaggaactaatcacctgtccaacaccaggatgtgatggaagtggccacgtgacaggaaactatgcatctcatcgcagtgtttctggatgtcctttagcagataagactctaaaatccctcatggctgccaactctcaggagcttaagtgtccaaccccaggctgcgatggctcggggcacgtgactggaaactatgcttcccacagaagcttgtccggatgccctcgtgcaaggaaaggtggtgtcaaaatgacccctaccaaggaagaaaaagaagaccctgaactgaaatgtcctgtgatagggtgtgatggccaaggtcacatatcaggtaaatacacatcacaccgcacagcttctggctgtcctctggctgccaagagacagaaggagaatcctctcaatggagcctccctctcctggaaactgaacaaacaagagctaccacattgtcccttgccaggctgcaatgggctgggccatgtaaataatgtttttgtcacccaccgaagcttatctggatgtcctctcaatgcacaagttatcaaaaagggcaaggtttctgaagaactcatgaccatcaagctcaaagcaactgggggaatagagagtgatgaagaaattaggcatttggatgaagaaataaaggaactgaatgaatccaaccttaaaattgaagcagatatgatgaaacttcagacccagatcacatctatggagagcaacttaaagacgatagaggaggagaacaaactcatagaacagaacaatgaaagtctgctgaaagagctggcaggtctaagccaagctctcatttcaagccttgctgacatccagcttccacagatgggacctatcagtgagcagaattttgaagcatatgtaaatacactcacagatatgtacagcaatctggaacgggactattccccggaatgcaaagctctactggaaagtatcaaacaggcagtgaagggtatccatgtgtaggatcacagcgctgccgggcaacagaagttaccaacagcagtaaactccagatggatctgttagaggttcatgtactgctaaggcgtggaggttgccgtactgcatttacaatttgcaacattgcactaattttattttccccagctgatataaaaaggaaagaaaaactatgatagacttcttggattaaaagcaatgcagtcaattattagatcttatttattttcatatgtttttcttttatttcttcattgtactctttttttttttgtaaagtatatgtaaaataaatgtgacatttttataatttatttattactaatcaaagagttttttatcttttaactgcattttgaagtctgccgtatttttacaagtgtgtttattaatttattttccaataggatttaaatagaaatgctattctcaagtcatctttcttgctgggttttaatgaggaaacaggaaagggtgaaggaaatccttgtctaaggactgcactatagttgagtttgatttttattgcacacttcttcccccacctttcactgatttttgtatttataaatgaatttgcggtaaggtgagctgcacggaaggaataagaagacaaatggcgcccactagtggggaatccgcactcacaaaagca

SEQ ID NO: 187461 - DNA, 4507 bp, Homo sapiens
  Payload ID: 16909
  Gene Symbol: ST5
  Gene Name: suppression of tumorigenicity 5
  Uniprot ID: P78524
  ENST ID: ENST00000313726
  CDS Start-End: 350-3763
gagagagagagagagagagagagagagagagagacagtgagaaagaaagaaaaagagagcgcccttgtgcacgcgctaggccaagagcgcgccgctgtgcgcgcgcccgcctagcgaggacagggtctccatgacaaccggcctggccggctagcagtgctctgctcacttggctgcgaggagcgccacgaaaggtcagaggaaggagctgtgggaagctcgcagcaggtatcggagcttaagccagtggatttgggggccctgggctccctagccggctgcggtgtgagaatggagtgggcaggaaagcagcgggactttcagggctctgggtttgcagagagccgaaatgaccatgactgccaacaagaattccagcatcacccacggagctggtggcactaaagcccctcgggggactctgagcaggtctcagtcagtctctccacctccagttctctccccaccaaggagtcccatctacccgctcagtgatagtgaaacctcagcctgcaggtaccccagccactccagctcccgggtgctcctcaaggaccggcaccccccagctccttcaccccagaatcctcaagatccctccccagatacttccccacccacctgtcccttcaagaccgccagcttcggttatttggacagaagcccttcggcgtgcaagagagacgcccaaaaggaaagtgtccaaggcgcagcccaggatgtagcaggggtcgctgcctgcctcccccttgcccagagcacgccattcccggggccagcagctggcccccggggcgtcttgctgacccgtaccggtacccgcgcccacagcctgggcatccgggagaagatatcagcatgggaaggtcgccgagaggcgtcgcccaggatgagcatgtgtggagagaagcgggagggctctgggagcgagtgggcggccagtgagggctgccccagcctgggctgtcccagcgtggtgccgtccccctgcagctctgaaaagacctttgatttcaagggcctccggaggatgagcaggaccttctccgagtgttcctacccagagactgaggaggagggagaggcgctccctgtccgggactctttctaccggctggagaaacggctgggccggagtgagcccagcgccttcctcagggggcatggcagcaggaaggagagctcagcagtgctgagccggatccagaaaattgaacaggtcctgaaggagcagccgggccgggggctcccccagctccccagcagctgctacagcgtggaccgggggaaaaggaagactggaaccttgggctccttggaggagccggcagggggcgcgagtgtgagcgctggcagccgggcagtcggagtggctggtgttgcgggggaggcgggcccacccccagagagggaaggcagtggttccactaagcccgggacccctggaaatagccctagctcccagcggctgccatcgaagagttccctcgatcccgctgtgaaccctgtccccaaacccaagcgcacctttgaatacgaggctgacaagaaccccaagagtaagcccagtaatggtctacctccttcacccacacctgctgctccacctcccttgccctccaccccagccccgccagtcacccggagacccaagaaggacatgcgtggtcaccgcaagtcccagagcagaaaatcctttgagtttgaggatgcatccagtctccagtccctgtacccctcttctcccactgagaatggtactgagaaccaacccaagtttggatccaaaagcactttagaagaaaatgcctatgaagatattgtgggagatctgcccaaggagaatccatatgaggatgtggacttaaagagccgaagagcaggacgaaaatcccagcaactgtctgagaactccttggactctttgcacaggatgtggagtcctcaggacaggaagtacaacagcccgcccacacagctttccctgaaacccaacagccagtccctgcgcagtgggaactggtcagaaaggaagagccaccggctgccacgattacccaagaggcacagccatgacgacatgctgctgctggctcagctgagtctgccgtcctcaccctccagcctcaatgaagacagcctcagcaccaccagcgagctgctgtccagccgccgggcccgccgcattcccaagcttgtccaaagaattaactccatctacaatgccaagagaggaaagaagagattaaaaaagttgtctatgtccagcattgaaacagcatcactgagagatgaaaacagtgagagcgagagcgactctgatgacaggttcaaagcccacacacagcgcctggtccacatccagtcgatgctgaagcgcgcccccagctatcgcacgctggagctggagctgctggagtggcaggagcgggagctttttgagtactttgtggtggtgtccctcaagaagaagccatcgcgaaacacctacctccccgaagtctcctaccagtttcccaagctggaccgacccaccaagcagatgcgagaggcagaggaaaggctcaaagccattccccagttttgcttccctgatgccaaggactggcttcctgtgtcagagtatagcagtgagaccttttctttcatgctgactggggaagatggcagcagacgctttggctactgcaggcgcttactgccaagtgggaaagggccccggttgccagaggtgtactgtgtcatcagccgccttggctgcttcggcttgttttccaaggtcctagatgaggtggagcgccggcgtgggatctccgctgcattggtctatcctttcatgagaagtctcatggagtcgcccttcccagccccagggaagaccatcaaagtgaagacattcctgccaggtgctggcaatgaggtgttagagctgcggcggcccatggactcaaggctggagcacgtggactttgagtgcctttttacctgcctcagtgtgcgccagctcatccgaatctttgcctcactgctgctggagcgccgggtcatttttgtggcagataagctcagtaccctctccagctgctcccacgcggtggtggccttgctctaccccttctcctggcagcacaccttcattcctgtcctcccggcctccatgattgacatcgtctgctgtcccacccccttcctggttggcctgctctccagctccctccccaaactgaaggagctgcctgtggaggaggcgctgatggtgaatctgggatctgaccgattcatccgacagatggacgacgaagacacgttgttacctaggaagttacaggcagctctggagcaggctctggagaggaagaatgagctgatctcccaggactctgacagcgactccgacgatgaatgtaataccctcaatgggctggtgtcggaggtgtttatccggttctttgtggagaccgttgggcactactccctctttctgacacagagtgagaagggagagagggcctttcagcgagaggccttccgcaaatctgtggcctccaaaagcatccgccgctttcttgaggtttttatggagtctcagatgtttgctggcttcatccaagacagggagctaagaaagtgtcgggcaaagggcctttttgagcagcgagtggagcagtacttagaagaactcccagacactgagcagagtggaatgaataagtttctccgaggtttgggcaacaaaatgaagtttctccacaagaagaattaagcctccttctcagtagcagagtccagtgccttgcagagcctgaagcctggggagaaggcccagcctgggaccctctgggctgctgtggctcctctgcccccacagatcctatcctccaagccagcccacctctgccttcatcatatcccaggatactgtttgtaaataatctgctgtaagctttcttaactgttttttgtaacaagcaaagagaatatggcaaatatttgtatattcccaaggggccgggtgctttcctgtcctgccagagcatggatgaagtttcgctgggtgctcgtgactggccagttttgtgcagctgactgtctcagccaaaccactgatcttccctggaggccttcggcctgcctgcctgcctgaggtccccgctgccagtcccgggccctggagagcagatgctgtcttgttatgtacaggaggaccttttaaaaaaatcaagtttctattttttgctggtagtccgcatacccataccctctgtttttgaaaggcaaaggccaatcagtccccatttgtagcatggcaccagggtcttaggcctagtcctctcattcctcccaccctccgagatggtcagtgtgtcatgggaagcccacccccagctctgccagtgctctctgggcctggctcccagtcagtggtggccacgatgcggtacagggcatccctccttcccatctacgggtgttctcaataaacaatgtacagttgtttgggcccaga

SEQ ID NO: 187462 - DNA, 4315 bp, Homo sapiens
  Payload ID: 16909
  Gene Symbol: ST5
  Gene Name: suppression of tumorigenicity 5
  Uniprot ID: P78524
  ENST ID: ENST00000357665
  CDS Start-End: 161-3574
cacagatttcacaccctttggagagtttctttcttggataattcaggaagatgagagactgcttaggcgccaccactagtaccatgagtccctgcactggttaaagccatcgccacaacctggacaggcagcaagggctctgggtttgcagagagccgaaatgaccatgactgccaacaagaattccagcatcacccacggagctggtggcactaaagcccctcgggggactctgagcaggtctcagtcagtctctccacctccagttctctccccaccaaggagtcccatctacccgctcagtgatagtgaaacctcagcctgcaggtaccccagccactccagctcccgggtgctcctcaaggaccggcaccccccagctccttcaccccagaatcctcaagatccctccccagatacttccccacccacctgtcccttcaagaccgccagcttcggttatttggacagaagcccttcggcgtgcaagagagacgcccaaaaggaaagtgtccaaggcgcagcccaggatgtagcaggggtcgctgcctgcctcccccttgcccagagcacgccattcccggggccagcagctggcccccggggcgtcttgctgacccgtaccggtacccgcgcccacagcctgggcatccgggagaagatatcagcatgggaaggtcgccgagaggcgtcgcccaggatgagcatgtgtggagagaagcgggagggctctgggagcgagtgggcggccagtgagggctgccccagcctgggctgtcccagcgtggtgccgtccccctgcagctctgaaaagacctttgatttcaagggcctccggaggatgagcaggaccttctccgagtgttcctacccagagactgaggaggagggagaggcgctccctgtccgggactctttctaccggctggagaaacggctgggccggagtgagcccagcgccttcctcagggggcatggcagcaggaaggagagctcagcagtgctgagccggatccagaaaattgaacaggtcctgaaggagcagccgggccgggggctcccccagctccccagcagctgctacagcgtggaccgggggaaaaggaagactggaaccttgggctccttggaggagccggcagggggcgcgagtgtgagcgctggcagccgggcagtcggagtggctggtgttgcgggggaggcgggcccacccccagagagggaaggcagtggttccactaagcccgggacccctggaaatagccctagctcccagcggctgccatcgaagagttccctcgatcccgctgtgaaccctgtccccaaacccaagcgcacctttgaatacgaggctgacaagaaccccaagagtaagcccagtaatggtctacctccttcacccacacctgctgctccacctcccttgccctccaccccagccccgccagtcacccggagacccaagaaggacatgcgtggtcaccgcaagtcccagagcagaaaatcctttgagtttgaggatgcatccagtctccagtccctgtacccctcttctcccactgagaatggtactgagaaccaacccaagtttggatccaaaagcactttagaagaaaatgcctatgaagatattgtgggagatctgcccaaggagaatccatatgaggatgtggacttaaagagccgaagagcaggacgaaaatcccagcaactgtctgagaactccttggactctttgcacaggatgtggagtcctcaggacaggaagtacaacagcccgcccacacagctttccctgaaacccaacagccagtccctgcgcagtgggaactggtcagaaaggaagagccaccggctgccacgattacccaagaggcacagccatgacgacatgctgctgctggctcagctgagtctgccgtcctcaccctccagcctcaatgaagacagcctcagcaccaccagcgagctgctgtccagccgccgggcccgccgcattcccaagcttgtccaaagaattaactccatctacaatgccaagagaggaaagaagagattaaaaaagttgtctatgtccagcattgaaacagcatcactgagagatgaaaacagtgagagcgagagcgactctgatgacaggttcaaagcccacacacagcgcctggtccacatccagtcgatgctgaagcgcgcccccagctatcgcacgctggagctggagctgctggagtggcaggagcgggagctttttgagtactttgtggtggtgtccctcaagaagaagccatcgcgaaacacctacctccccgaagtctcctaccagtttcccaagctggaccgacccaccaagcagatgcgagaggcagaggaaaggctcaaagccattccccagttttgcttccctgatgccaaggactggcttcctgtgtcagagtatagcagtgagaccttttctttcatgctgactggggaagatggcagcagacgctttggctactgcaggcgcttactgccaagtgggaaagggccccggttgccagaggtgtactgtgtcatcagccgccttggctgcttcggcttgttttccaaggtcctagatgaggtggagcgccggcgtgggatctccgctgcattggtctatcctttcatgagaagtctcatggagtcgcccttcccagccccagggaagaccatcaaagtgaagacattcctgccaggtgctggcaatgaggtgttagagctgcggcggcccatggactcaaggctggagcacgtggactttgagtgcctttttacctgcctcagtgtgcgccagctcatccgaatctttgcctcactgctgctggagcgccgggtcatttttgtggcagataagctcagtaccctctccagctgctcccacgcggtggtggccttgctctaccccttctcctggcagcacaccttcattcctgtcctcccggcctccatgattgacatcgtctgctgtcccacccccttcctggttggcctgctctccagctccctccccaaactgaaggagctgcctgtggaggaggcgctgatggtgaatctgggatctgaccgattcatccgacagatggacgacgaagacacgttgttacctaggaagttacaggcagctctggagcaggctctggagaggaagaatgagctgatctcccaggactctgacagcgactccgacgatgaatgtaataccctcaatgggctggtgtcggaggtgtttatccggttctttgtggagaccgttgggcactactccctctttctgacacagagtgagaagggagagagggcctttcagcgagaggccttccgcaaatctgtggcctccaaaagcatccgccgctttcttgaggtttttatggagtctcagatgtttgctggcttcatccaagacagggagctaagaaagtgtcgggcaaagggcctttttgagcagcgagtggagcagtacttagaagaactcccagacactgagcagagtggaatgaataagtttctccgaggtttgggcaacaaaatgaagtttctccacaagaagaattaagcctccttctcagtagcagagtccagtgccttgcagagcctgaagcctggggagaaggcccagcctgggaccctctgggctgctgtggctcctctgcccccacagatcctatcctccaagccagcccacctctgccttcatcatatcccaggatactgtttgtaaataatctgctgtaagctttcttaactgttttttgtaacaagcaaagagaatatggcaaatatttgtatattcccaaggggccgggtgctttcctgtcctgccagagcatggatgaagtttcgctgggtgctcgtgactggccagttttgtgcagctgactgtctcagccaaaccactgatcttccctggaggccttcggcctgcctgcctgcctgaggtccccgctgccagtcccgggccctggagagcagatgctgtcttgttatgtacaggaggaccttttaaaaaaatcaagtttctattttttgctggtagtccgcatacccataccctctgtttttgaaaggcaaaggccaatcagtccccatttgtagcatggcaccagggtcttaggcctagtcctctcattcctcccaccctccgagatggtcagtgtgtcatgggaagcccacccccagctctgccagtgctctctgggcctggctcccagtcagtggtggccacgatgcggtacagggcatccctccttcccatctacgggtgttctcaataaacaatgtacagttgtttgggccc

SEQ ID NO: 187463 - DNA, 887 bp, Homo sapiens
  Payload ID: 16909
  Gene Symbol: ST5
  Gene Name: suppression of tumorigenicity 5
  ENST ID: ENST00000526155
  CDS Start-End: 515-887
cttggtcggatggtgaggaggtgagggccgtccagtttgggggccaacttctcctccctgctgcccccggcccccgcctccctcacccctgtcccccaccctccctcgcacactctcggcgcggctttctcgctgcctccggcgcctccgagcgctcccctccgccgggctccagcagcccaccctctctgtcttgggtggaggcgcacatcctccacgccccctccactcaaatctgcgctccctcccctctctctccctgcagcccggccgcagcccggggcgcggatgcctgcccgccgcccgccctctctgcaggagcggctcctcctccgggccgcgcggctcccggcgagaccccatccaggcgccgcgcccggcccggctggggaacgcagaggaagatgagagactgcttaggcgccaccactagtaccatgagtccctgcactggttaaagccatcgccacaacctggacaggcagcaagggctctgggtttgcagagagccgaaatgaccatgactgccaacaagaattccagcatcacccacggagctggtggcactaaagcccctcgggggactctgagcaggtctcagtcagtctctccacctccagttctctccccaccaaggagtcccatctacccgctcagtgatagtgaaacctcagcctgcaggtaccccagccactccagctcccgggtgctcctcaaggaccggcaccccccagctccttcaccccagaatcctcaagatccctccccagatacttccccacccacctgtcccttcaagaccgccagcttcggttatttggacagaagcccttcggcgtgcaagagagacgcccaaaaggaaagtgtccaaggcgcagcccaggatg

SEQ ID NO: 187464 - DNA, 560 bp, Homo sapiens
  Payload ID: 16909
  Gene Symbol: ST5
  Gene Name: suppression of tumorigenicity 5
  ENST ID: ENST00000527930
  CDS Start-End: 12-560
aacagaggattatgacttcaaggaagaatggaggtggggcgcatagctggcaagaaaccccgtgggaacaaagaagggctctgggtttgcagagagccgaaatgaccatgactgccaacaagaattccagcatcacccacggagctggtggcactaaagcccctcgggggactctgagcaggtctcagtcagtctctccacctccagttctctccccaccaaggagtcccatctacccgctcagtgatagtgaaacctcagcctgcaggtaccccagccactccagctcccgggtgctcctcaaggaccggcaccccccagctccttcaccccagaatcctcaagatccctccccagatacttccccacccacctgtcccttcaagaccgccagcttcggttatttggacagaagcccttcggcgtgcaagagagacgcccaaaaggaaagtgtccaaggcgcagcccaggatgtagcaggggtcgctgcctgcctcccccttgcccagagcacgccattcccggggccagcagctggcccccggggcgtcttgctgacc

SEQ ID NO: 187465 - DNA, 547 bp, Homo sapiens
  Payload ID: 16909
  Gene Symbol: ST5
  Gene Name: suppression of tumorigenicity 5
  ENST ID: ENST00000533580
  CDS Start-End: 82-547
agttgtcagaggcagggctggactcaaggcaggtgtttttccactgcccctcggggcctgcgactgtgcctgtttgtctggatgcagtttgtagaaaagttccagagggctctgggtttgcagagagccgaaatgaccatgactgccaacaagaattccagcatcacccacggagctggtggcactaaagcccctcgggggactctgagcaggtctcagtcagtctctccacctccagttctctccccaccaaggagtcccatctacccgctcagtgatagtgaaacctcagcctgcaggtaccccagccactccagctcccgggtgctcctcaaggaccggcaccccccagctccttcaccccagaatcctcaagatccctccccagatacttccccacccacctgtcccttcaagaccgccagcttcggttatttggacagaagcccttcggcgtgcaagagagacgcccaaaaggaaagtgtccaaggcgcagcccaggatgtagcaggggtcgctgcctgcctcccccttgcccagagcacgc

SEQ ID NO: 187466 - DNA, 595 bp, Homo sapiens
  Payload ID: 16909
  Gene Symbol: ST5
  Gene Name: suppression of tumorigenicity 5
  ENST ID: ENST00000528196
  CDS Start-End: 150-595
ataaagacaggtagggctgaagggtggaggtagggtctccagctgcagttgtcaagaacccaacgtgaaggctgactgagcagagaaactgctgctgcccagaaagaaagcacttttagcagtgggctctgggtttgcagagagccgaaatgaccatgactgccaacaagaattccagcatcacccacggagctggtggcactaaagcccctcgggggactctgagcagaaaatcctttgagtttgaggatgcatccagtctccagtccctgtacccctcttctcccactgagaatggtactgagaaccaacccaagtttggatccaaaagcactttagaagaaaatgcctatgaagatattgtgggagatctgcccaaggagaatccatatgaggatgtggacttaaagagccgaagagcaggacgaaaatcccagcaactgtctgagaactccttggactctttgcacaggatgtggagtcctcaggacaggaagtacaacagcccgcccacacagctttccctgaaacccaacagccagtccctgcgcagtgggaactggtcagaaaggaagagccaccggctgccacgatt

SEQ ID NO: 187467 - DNA, 940 bp, Homo sapiens
  Payload ID: 16909
  Gene Symbol: ST5
  Gene Name: suppression of tumorigenicity 5
  ENST ID: ENST00000528527
  CDS Start-End: 402-940
acttggctgcgaggagcgccacgaaaggtcagaggaaggagctgtgggaagctcgcagcaggtatcggagcttaagccagtggatttgggggccctgggctccctagccggctgcggtgtgagaatggagtgggcaggaaagcagcgggactttcagaaaatcctttgagtttgaggatgcatccagtctccagtccctgtacccctcttctcccactgagaatggtactgagaaccaacccaagtttggatccaaaagcactttagaagaaaatgcctatgaagatattgtgggagatctgcccaaggagaatccatatgaggatgtggacttaaagagccgaagagcaggacgaaaatcccagcaactgtctgagaactccttggactctttgcacaggatgtggagtcctcaggacaggaagtacaacagcccgcccacacagctttccctgaaacccaacagccagtccctgcgcagtgggaactggtcagaaaggaagagccaccggctgccacgattacccaagaggcacagccatgacgacatgctgctgctggctcagctgagtctgccgtcctcaccctccagcctcaatgaagacagcctcagcaccaccagcgagctgctgtccagccgccgggcccgccgcattcccaagcttgtccaaagaattaactccatctacaatgccaagagaggaaagaagagattaaaaaagttgtctatgtccagcattgaaacagcatcactgagagatgaaaacagtgagagcgagagcgactctgatgacaggttcaaagcccacacacagcgcctggtccacatccagtcgatgctgaagcgcgcccccagctatcgcacgctggagctggagctgctggagtggcaggagcgggagctttttgagtactttgtggtggtgtccctcaagaagaa

SEQ ID NO: 187468 - DNA, 573 bp, Homo sapiens
  Payload ID: 16909
  Gene Symbol: ST5
  Gene Name: suppression of tumorigenicity 5
  ENST ID: ENST00000527347
  CDS Start-End: 239-573
gtgcgcgcccggtcccgcccctgccctcccagcccttttccctctgctcccgactcccggccccggcagcggtgtccagctccatttcacaccctttggagagtttctttcttggataattcaggaagatgagagactgcttaggcgccaccactagtaccatgagtccctgcactggttaaagccatcgccacaacctggacaggcagcaagggctctgggtttgcagagagccgaaatgaccatgactgccaacaagaattccagcatcacccacggagctggtggcactaaagcccctcgggggactctgagcaggtctcagtcagtctctccacctccagttctctccccaccaaggagtcccatctacccgctcagtgatagtgaaacctcagcctgcaggtaccccagccactccagctcccgggtgctcctcaaggaccggcaccccccagctccttcaccccagaatcctcaagatccctccccagatacttccccacccacctgtcccttcaagaccgccagcttcggttatttggacagaagcccttcggcgtgcaagagaga

SEQ ID NO: 187469 - DNA, 631 bp, Homo sapiens
  Payload ID: 16909
  Gene Symbol: ST5
  Gene Name: suppression of tumorigenicity 5
  ENST ID: ENST00000527516
  CDS Start-End: 347-631
agaccccgttgtgctttgctccagacccagacaactcttggtcggatggtgaggagcccggccgcagcccggggcgcggatgcctgcccgccgcccgccctctctgcaggagcggctcctcctccgggccgcgcggctcccggcgagaccccatccaggcgccgcgcccggcccggctggggaacgcagagatttcacaccctttggagagtttctttcttggataattcaggaagatgagagactgcttaggcgccaccactagtaccatgagtccctgcactggttaaagccatcgccacaacctggacaggcagcaagggctctgggtttgcagagagccgaaatgaccatgactgccaacaagaattccagcatcacccacggagctggtggcactaaagcccctcgggggactctgagcaggtctcagtcagtctctccacctccagttctctccccaccaaggagtcccatctacccgctcagtgatagtgaaacctcagcctgcaggtaccccagccactccagctcccgggtgctcctcaaggaccggcaccccccagctccttcaccccagaatcctcaagatccctccccagatacttccccacccacctgtcccttcaag

SEQ ID NO: 187470 - DNA, 588 bp, Homo sapiens
  Payload ID: 16909
  Gene Symbol: ST5
  Gene Name: suppression of tumorigenicity 5
  ENST ID: ENST00000530580
  CDS Start-End: 182-588
ttgactttcacttccccaggcctcagtgcctcttcccacagaggctgggttttctccttgttgctgcctgagcaggtgaccttgggatggttcccacagagcagtgtggctccaggcactgccctttgctgtctacttcagcacctgtggcttcagggctctgggtttgcagagagccgaaatgaccatgactgccaacaagaattccagcatcacccacggagctggtggcactaaagcccctcgggggactctgagcagaaaatcctttgagtttgaggatgcatccagtctccagtccctgtacccctcttctcccactgagaatggtactgagaaccaacccaagtttggatccaaaagcactttagaagaaaatgcctatgaagatattgtgggagatctgcccaaggagaatccatatgaggatgtggacttaaagagccgaagagcaggacgaaaatcccagcaactgtctgagaactccttggactctttgcacaggatgtggagtcctcaggacaggaagtacaacagcccgcccacacagctttccctgaaacccaacagccagtccctgcgcagtgg

SEQ ID NO: 187471 - DNA, 564 bp, Homo sapiens
  Payload ID: 16909
  Gene Symbol: ST5
  Gene Name: suppression of tumorigenicity 5
  ENST ID: ENST00000534248
  CDS Start-End: 197-564
taatatccagtgcgtcctccctggcactccgattctcagtagtcatgaaccagctggcttctatatctctcaccaatcacaggaagatgagagactgcttaggcgccaccactagtaccatgagtccctgcactggttaaagccatcgccacaacctggacaggcagcaagggctctgggtttgcagagagccgaaatgaccatgactgccaacaagaattccagcatcacccacggagctggtggcactaaagcccctcgggggactctgagcaggtctcagtcagtctctccacctccagttctctccccaccaaggagtcccatctacccgctcagtgatagtgaaacctcagcctgcaggtaccccagccactccagctcccgggtgctcctcaaggaccggcaccccccagctccttcaccccagaatcctcaagatccctccccagatacttccccacccacctgtcccttcaagaccgccagcttcggttatttggacagaagcccttcggcgtgcaagagagacgcccaaaaggaaagtgtccaaggcgcagccca

SEQ ID NO: 187472 - DNA, 3396 bp, Homo sapiens
  Payload ID: 16909
  Gene Symbol: ST5
  Gene Name: suppression of tumorigenicity 5
  Uniprot ID: P78524
  ENST ID: ENST00000530991
  CDS Start-End: 824-2653
ttctgcctgcttcctgaggagtggggtctgagttcctctggggcgtaaggcacattcagacatctgtagaacaagtgtgggactcagtggcacccaggctcaatcctgctgctgagcagaggtgctggagtgagtcctgctctgcagcaggaaaatagggaaaggggtgcagagagggctgtgttctgagttccccagggacctgttcaccccacggattctgccaccaggattgagctaggactgacccggcccatggtgttactctattttagaaaatgtgtgtgttggaggggtgggggcaggagatacagcttgtggaaaggagtgccactcaacatcttcaagggcagggattctgttttggacttttctgagattttctggtaatgccaatacaatgcccgctgccagagattttagaactagtcctgagaagcaagaactcccctcacccccaccctttggcccagactccttccaagcctttcacacctcccctgtgtcacagcaggagagtttgttccaaaaggggagtgttgatggttctctttttgctgagatcagcggtagagggaatagacactacagtaggagagtcatcgaacagatcattactgaacacttcctccttgctaatcactgttccgttccgaggttgcctcagtgaacaacacaaaaccctgccctaaaagacttgttgaacggcatcgtaggagatctgcccaaggagaatccatatgaggatgtggacttaaagagccgaagagcaggacgaaaatcccagcaactgtctgagaactccttggactctttgcacaggatgtggagtcctcaggacaggaagtacaacagcccgcccacacagctttccctgaaacccaacagccagtccctgcgcagtgggaactggtcagaaaggaagagccaccggctgccacgattacccaagaggcacagccatgacgacatgctgctgctggctcagctgagtctgccgtcctcaccctccagcctcaatgaagacagcctcagcaccaccagcgagctgctgtccagccgccgggcccgccgcattcccaagcttgtccaaagaattaactccatctacaatgccaagagaggaaagaagagattaaaaaagttgtctatgtccagcattgaaacagcatcactgagagatgaaaacagtgagagcgagagcgactctgatgacaggttcaaagcccacacacagcgcctggtccacatccagtcgatgctgaagcgcgcccccagctatcgcacgctggagctggagctgctggagtggcaggagcgggagctttttgagtactttgtggtggtgtccctcaagaagaagccatcgcgaaacacctacctccccgaagtctcctaccagtttcccaagctggaccgacccaccaagcagatgcgagaggcagaggaaaggctcaaagccattccccagttttgcttccctgatgccaaggactggcttcctgtgtcagagtatagcagtgagaccttttctttcatgctgactggggaagatggcagcagacgctttggctactgcaggcgcttactgccaagtgggaaagggccccggttgccagaggtgtactgtgtcatcagccgccttggctgcttcggcttgttttccaaggtcctagatgaggtggagcgccggcgtgggatctccgctgcattggtctatcctttcatgagaagtctcatggagtcgcccttcccagccccagggaagaccatcaaagtgaagacattcctgccaggtgctggcaatgaggtgttagagctgcggcggcccatggactcaaggctggagcacgtggactttgagtgcctttttacctgcctcagtgtgcgccagctcatccgaatctttgcctcactgctgctggagcgccgggtcatttttgtggcagataagctcagtaccctctccagctgctcccacgcggtggtggccttgctctaccccttctcctggcagcacaccttcattcctgtcctcccggcctccatgattgacatcgtctgctgtcccacccccttcctggttggcctgctctccagctccctccccaaactgaaggagctgcctgtggaggaggcgctgatggtgaatctgggatctgaccgattcatccgacagatggacgacgaagacacgttgttacctaggaagttacaggcagctctggagcaggctctggagaggaagaatgagctgatctcccaggactctgacagcgactccgacgatgaatgtaataccctcaatgggctggtgtcggaggtgtttatccggttctttgtggagaccgttgggcactactccctctttctgacacagagtgagaagggagagagggcctttcagcgagaggccttccgcaaatctgtggcctccaaaagcatccgccgctttcttgaggtttttatggagtctcagatgtttgctggcttcatccaagacagggagctaagaaagtgtcgggcaaagggcctttttgagcagcgagtggagcagtacttagaagaactcccagacactgagcagagtggaatgaataagtttctccgaggtttgggcaacaaaatgaagtttctccacaagaagaattaagcctccttctcagtagcagagtccagtgccttgcagagcctgaagcctggggagaaggcccagcctgggaccctctgggctgctgtggctcctctgcccccacagatcctatcctccaagccagcccacctctgccttcatcatatcccaggatactgtttgtaaataatctgctgtaagctttcttaactgttttttgtaacaagcaaagagaatatggcaaatatttgtatattcccaaggggccgggtgctttcctgtcctgccagagcatggatgaagtttcgctgggtgctcgtgactggccagttttgtgcagctgactgtctcagccaaaccactgatcttccctggaggccttcggcctgcctgcctgcctgaggtccccgctgccagtcccgggccctggagagcagatgctgtcttgttatgtacaggaggaccttttaaaaaaatcaagtttctattttttgctggtagtccgcatacccataccctctgtttttgaaaggcaaaggccaatcagtccccatttgtagcatggcaccagggtcttaggcctagtcctctcattcctcccaccctccgagatggtcagtgtgtcatgggaagcccacccccagctctgccagtgctctctgggcctggctcccagtcagtggtggccacgatgcggtacagggcatccctccttcccatctacgggtgttctcaataaacaatgtacagttgtttgggcccag

SEQ ID NO: 187473 - DNA, 751 bp, Homo sapiens
  Payload ID: 16909
  Gene Symbol: ST5
  Gene Name: suppression of tumorigenicity 5
  ENST ID: ENST00000530959
  CDS Start-End: 333-751
acataatatccagtgcgtcctccctggcactccgattctcagtagtcatgaaccagctggcttctatatctctcaccaatcacagggtcttgctgtgttgctcgggctgctcttgaactcctgggctcaaacagtcctcttgcctcagcctcccaacgtgctgggattacgggagcaagccaccccactgtgtgcagcccagaagttgagcctgagaggaagatgagagactgcttaggcgccaccactagtaccatgagtccctgcactggttaaagccatcgccacaacctggacaggcagcaagggctctgggtttgcagagagccgaaatgaccatgactgccaacaagaattccagcatcacccacggagctggtggcactaaagcccctcgggggactctgagcaggtctcagtcagtctctccacctccagttctctccccaccaaggagtcccatctacccgctcagtgatagtgaaacctcagcctgcaggtaccccagccactccagctcccgggtgctcctcaaggaccggcaccccccagctccttcaccccagaatcctcaagatccctccccagatacttccccacccacctgtcccttcaagaccgccagcttcggttatttggacagaagcccttcggcgtgcaagagagacgcccaaaaggaaagtgtccaaggcgcagcccaggatgtagcaggggtcgctgcctgcctcccccttgcccagagcacgccatt

SEQ ID NO: 187474 - DNA, 776 bp, Homo sapiens
  Payload ID: 16909
  Gene Symbol: ST5
  Gene Name: suppression of tumorigenicity 5
  ENST ID: ENST00000526062
  CDS Start-End: 1-334
acctgcctcagtgtgcgccagctcatccgaatctttgcctcactgctgctggagcgccgggtcatttttgtggcagataagctcagctgcctctgagcacattccaggaccattctgggagggacgatcccaaggtcttgttcttggcctggccgggtattcaagttctgccaatctggggtcttggaaaagatgtccttcctgttctgcctggggtctgcctctggctggagaggggagggtaccctctccagctgctcccacgcggtggtggccttgctctaccccttctcctggcagcacaccttcattcctgtcctcccggcctccatgattgacatcgtctgctgtcccacccccttcctggttggcctgctctccagctccctccccaaactgaaggagctgcctgtggaggaggcgctgatggtgaatctgggatctgaccgattcatccgacagatggacgacgaagacacgttgttacctaggaagttacaggcagctctggagcaggctctggagaggaagaatgagctgatctcccaggactctgacagcgactccgacgatgaatgtaataccctcaatgggctggtgtcggaggtgtttatccggttctttgtggagaccgttgggcactactccctctttctgacacagagtgagaagggagagagggcctttcagcgagaggccttccgcaaatctgtggcctccaaaagcatccgccgctttcttgaggtttttatggagtctcagatgtttgctggctt

SEQ ID NO: 187475 - DNA, 580 bp, Homo sapiens
  Payload ID: 16909
  Gene Symbol: ST5
  Gene Name: suppression of tumorigenicity 5
  ENST ID: ENST00000525169
  CDS Start-End: 461-580
tccagacccagacaactcttggtcggatggtgaggagcccggccgcagcccggggcgcggatgcctgcccgccgcccgccctctctgcaggagcggctcctcctccgggccgcgcggctcccggcgagaccccatccaggcgccgcgcccggcccggctggggaacgcagagatttcacaccctttggagagtttctttcttggataattcagggtcttgctgtgttgctcgggctgctcttgaactcctgggctcaaacagtcctcttgcctcagcctcccaacgtgctgggattacgggagcaagccaccccactgtgtgcagcccagaagttgagcctgagaggaagatgagagactgcttaggcgccaccactagtaccatgagtccctgcactggttaaagccatcgccacaacctggacaggcagcaagggctctgggtttgcagagagccgaaatgaccatgactgccaacaagaattccagcatcacccacggagctggtggcactaaagcccctcgggggactctgagcaggtctcagtcagtctctccacctccagttctctccccacca

SEQ ID NO: 187476 - DNA, 523 bp, Homo sapiens
  Payload ID: 16909
  Gene Symbol: ST5
  Gene Name: suppression of tumorigenicity 5
  ENST ID: ENST00000526241
  CDS Start-End: 98-523
gccgcgcccggcccggctggggaacgcagagatttcacaccctttggagagtttctttcttggataattcagggctctgggtttgcagagagccgaaatgaccatgactgccaacaagaattccagcatcacccacggagctggtggcactaaagcccctcgggggactctgagcaggtctcagtcagtctctccacctccagttctctccccaccaaggagtcccatctacccgctcagtgatagtgaaacctcagcctgcaggtaccccagccactccagctcccgggtgctcctcaaggaccggcaccccccagctccttcaccccagaatcctcaagatccctccccagatacttccccacccacctgtcccttcaagaccgccagcttcggttatttggacagaagcccttcggcgtgcaagagagacgcccaaaaggaaagtgtccaaggcgcagcccaggatgtagcaggggtcgctgcctgcctcccccttgcccagagcacgccattcccgggg

SEQ ID NO: 187477 - DNA, 1352 bp, Homo sapiens
  Payload ID: 16909
  Gene Symbol: ST5
  Gene Name: suppression of tumorigenicity 5
  ENST ID: ENST00000534278
  CDS Start-End: 169-1155
gagcctggtacctggtgctgggagaccctgcagagctgaggcctgtcctgagagtggtggctgttccttcagggctctggttgcagagaggtttagaggaggcttaaagtcttcctccactagaagggcagtccttactcctccgttcccaaggaaaaggagccagaaatggtcctagatgaggtggagcgccggcgtgggatctccgctgcattggtctatcctttcatgagaagtctcatggagtcgcccttcccagccccagggaagaccatcaaagtgaagacattcctgccaggtgctggcaatgaggtgttagagctgcggcggcccatggactcaaggctggagcacgtggactttgagtgcctttttacctgcctcagtgtgcgccagctcatccgaatctttgcctcactgctgctggagcgccgggtcatttttgtggcagataagctcagtaccctctccagctgctcccacgcggtggtggccttgctctaccccttctcctggcagcacaccttcattcctgtcctcccggcctccatgattgacatcgtctgctgtcccacccccttcctggttggcctgctctccagctccctccccaaactgaaggagctgcctgtggaggaggcgctgatggtgaatctgggatctgaccgattcatccgacagatggacgacgaagacacgttgttacctaggaagttacaggcagctctggagcaggctctggagaggaagaatgagctgatctcccaggactctgacagcgactccgacgatgaatgtaataccctcaatgggctggtgtcggaggtgtttatccggttctttgtggagaccgttgggcactactccctctttctgacacagagtgagaagggagagagggcctttcagcgagaggccttccgcaaatctgtggcctccaaaagcatccgccgctttcttgaggtttttatggagtctcagatgtttgctggcttcatccaagacagggagctaagaaagtgtcgggcaaagggcctttttgagcagcgagtggagcagtacttagaagaactcccagacactgagcagagtggaatgaataagtttctccgaggtttgggcaacaaaatgaagtttctccacaagaagaattaagcctccttctcagtagcagagtccagtgccttgcagagcctgaagcctggggagaaggcccagcctgggaccctctgggctgctgtggctcctctgcccccacagatcctatcctccaagccagcccacctctgccttcatcatatcccaggatactgtttgtaaataatctgctgtaagctttcttaactgttttt

SEQ ID NO: 187478 - DNA, 4545 bp, Homo sapiens
  Payload ID: 16909
  Gene Symbol: ST5
  Gene Name: suppression of tumorigenicity 5
  Uniprot ID: P78524
  ENST ID: ENST00000534127
  CDS Start-End: 387-3800
gggggtcgggggtcgggggctgggggctgaggactgagtcgagccagcagcccagggcatctgtccacgctgtcagaggagcctctgggcgtggggctggcccttagagggctactgcgctgcttaacttgcctttcacagaaaaccactggaggagatactcacaaaaatgaaggggaagaacaggaaacaggaagacatgagatgaaggaaacaggagattcaacatggatttcacaccctttggagagtttctttcttggataattcaggaagatgagagactgcttaggcgccaccactagtaccatgagtccctgcactggttaaagccatcgccacaacctggacaggcagcaagggctctgggtttgcagagagccgaaatgaccatgactgccaacaagaattccagcatcacccacggagctggtggcactaaagcccctcgggggactctgagcaggtctcagtcagtctctccacctccagttctctccccaccaaggagtcccatctacccgctcagtgatagtgaaacctcagcctgcaggtaccccagccactccagctcccgggtgctcctcaaggaccggcaccccccagctccttcaccccagaatcctcaagatccctccccagatacttccccacccacctgtcccttcaagaccgccagcttcggttatttggacagaagcccttcggcgtgcaagagagacgcccaaaaggaaagtgtccaaggcgcagcccaggatgtagcaggggtcgctgcctgcctcccccttgcccagagcacgccattcccggggccagcagctggcccccggggcgtcttgctgacccgtaccggtacccgcgcccacagcctgggcatccgggagaagatatcagcatgggaaggtcgccgagaggcgtcgcccaggatgagcatgtgtggagagaagcgggagggctctgggagcgagtgggcggccagtgagggctgccccagcctgggctgtcccagcgtggtgccgtccccctgcagctctgaaaagacctttgatttcaagggcctccggaggatgagcaggaccttctccgagtgttcctacccagagactgaggaggagggagaggcgctccctgtccgggactctttctaccggctggagaaacggctgggccggagtgagcccagcgccttcctcagggggcatggcagcaggaaggagagctcagcagtgctgagccggatccagaaaattgaacaggtcctgaaggagcagccgggccgggggctcccccagctccccagcagctgctacagcgtggaccgggggaaaaggaagactggaaccttgggctccttggaggagccggcagggggcgcgagtgtgagcgctggcagccgggcagtcggagtggctggtgttgcgggggaggcgggcccacccccagagagggaaggcagtggttccactaagcccgggacccctggaaatagccctagctcccagcggctgccatcgaagagttccctcgatcccgctgtgaaccctgtccccaaacccaagcgcacctttgaatacgaggctgacaagaaccccaagagtaagcccagtaatggtctacctccttcacccacacctgctgctccacctcccttgccctccaccccagccccgccagtcacccggagacccaagaaggacatgcgtggtcaccgcaagtcccagagcagaaaatcctttgagtttgaggatgcatccagtctccagtccctgtacccctcttctcccactgagaatggtactgagaaccaacccaagtttggatccaaaagcactttagaagaaaatgcctatgaagatattgtgggagatctgcccaaggagaatccatatgaggatgtggacttaaagagccgaagagcaggacgaaaatcccagcaactgtctgagaactccttggactctttgcacaggatgtggagtcctcaggacaggaagtacaacagcccgcccacacagctttccctgaaacccaacagccagtccctgcgcagtgggaactggtcagaaaggaagagccaccggctgccacgattacccaagaggcacagccatgacgacatgctgctgctggctcagctgagtctgccgtcctcaccctccagcctcaatgaagacagcctcagcaccaccagcgagctgctgtccagccgccgggcccgccgcattcccaagcttgtccaaagaattaactccatctacaatgccaagagaggaaagaagagattaaaaaagttgtctatgtccagcattgaaacagcatcactgagagatgaaaacagtgagagcgagagcgactctgatgacaggttcaaagcccacacacagcgcctggtccacatccagtcgatgctgaagcgcgcccccagctatcgcacgctggagctggagctgctggagtggcaggagcgggagctttttgagtactttgtggtggtgtccctcaagaagaagccatcgcgaaacacctacctccccgaagtctcctaccagtttcccaagctggaccgacccaccaagcagatgcgagaggcagaggaaaggctcaaagccattccccagttttgcttccctgatgccaaggactggcttcctgtgtcagagtatagcagtgagaccttttctttcatgctgactggggaagatggcagcagacgctttggctactgcaggcgcttactgccaagtgggaaagggccccggttgccagaggtgtactgtgtcatcagccgccttggctgcttcggcttgttttccaaggtcctagatgaggtggagcgccggcgtgggatctccgctgcattggtctatcctttcatgagaagtctcatggagtcgcccttcccagccccagggaagaccatcaaagtgaagacattcctgccaggtgctggcaatgaggtgttagagctgcggcggcccatggactcaaggctggagcacgtggactttgagtgcctttttacctgcctcagtgtgcgccagctcatccgaatctttgcctcactgctgctggagcgccgggtcatttttgtggcagataagctcagtaccctctccagctgctcccacgcggtggtggccttgctctaccccttctcctggcagcacaccttcattcctgtcctcccggcctccatgattgacatcgtctgctgtcccacccccttcctggttggcctgctctccagctccctccccaaactgaaggagctgcctgtggaggaggcgctgatggtgaatctgggatctgaccgattcatccgacagatggacgacgaagacacgttgttacctaggaagttacaggcagctctggagcaggctctggagaggaagaatgagctgatctcccaggactctgacagcgactccgacgatgaatgtaataccctcaatgggctggtgtcggaggtgtttatccggttctttgtggagaccgttgggcactactccctctttctgacacagagtgagaagggagagagggcctttcagcgagaggccttccgcaaatctgtggcctccaaaagcatccgccgctttcttgaggtttttatggagtctcagatgtttgctggcttcatccaagacagggagctaagaaagtgtcgggcaaagggcctttttgagcagcgagtggagcagtacttagaagaactcccagacactgagcagagtggaatgaataagtttctccgaggtttgggcaacaaaatgaagtttctccacaagaagaattaagcctccttctcagtagcagagtccagtgccttgcagagcctgaagcctggggagaaggcccagcctgggaccctctgggctgctgtggctcctctgcccccacagatcctatcctccaagccagcccacctctgccttcatcatatcccaggatactgtttgtaaataatctgctgtaagctttcttaactgttttttgtaacaagcaaagagaatatggcaaatatttgtatattcccaaggggccgggtgctttcctgtcctgccagagcatggatgaagtttcgctgggtgctcgtgactggccagttttgtgcagctgactgtctcagccaaaccactgatcttccctggaggccttcggcctgcctgcctgcctgaggtccccgctgccagtcccgggccctggagagcagatgctgtcttgttatgtacaggaggaccttttaaaaaaatcaagtttctattttttgctggtagtccgcatacccataccctctgtttttgaaaggcaaaggccaatcagtccccatttgtagcatggcaccagggtcttaggcctagtcctctcattcctcccaccctccgagatggtcagtgtgtcatgggaagcccacccccagctctgccagtgctctctgggcctggctcccagtcagtggtggccacgatgcggtacagggcatccctccttcccatctacgggtgttctcaataaacaatgtacagttgtttgggcccagag

SEQ ID NO: 187479 - DNA, 1309 bp, Homo sapiens
  Payload ID: 16909
  Gene Symbol: ST5
  Gene Name: suppression of tumorigenicity 5
  ENST ID: ENST00000533020
  CDS Start-End: 276-1309
gtagcctccccactgcagacgggcagctgcatgactcatgagctgaggggccaggcagaagccattctctttggttcacaggaattctgcttgtttatttgtgtgtgtgtgagttcgtgtgtttccttcttcccttctcccccttctctaactcttcctcctctgcaggagatctgcccaaggagaatccatatgaggatgtggacttaaagagccgaagagcaggacgaaaatcccagcaactgtctgagaactccttggactctttgcacaggatgtggagtcctcaggacaggaagtacaacagcccgcccacacagctttccctgaaacccaacagccagtccctgcgcagtgggaactggtcagaaaggaagagccaccggctgccacgattacccaagaggcacagccatgacgacatgctgctgctggctcagctgagtctgccgtcctcaccctccagcctcaatgaagacagcctcagcaccaccagcgagctgctgtccagccgccgggcccgccgcattcccaagcttgtccaaagaattaactccatctacaatgccaagagaggaaagaagagattaaaaaagttgtctatgtccagcattgaaacagcatcactgagagatgaaaacagtgagagcgagagcgactctgatgacaggttcaaagcccacacacagcgcctggtccacatccagtcgatgctgaagcgcgcccccagctatcgcacgctggagctggagctgctggagtggcaggagcgggagctttttgagtactttgtggtggtgtccctcaagaagaagccatcgcgaaacacctacctccccgaagtctcctaccagtttcccaagctggaccgacccaccaagcagatgcgagaggcagaggaaaggctcaaagccattccccagttttgcttccctgatgccaaggactggcttcctgtgtcagagtatagcagtgagaccttttctttcatgctgactggggaagatggcagcagacgctttggctactgcaggcgcttactgccaagtgggaaagggccccggttgccagaggtgtactgtgtcatcagccgccttggctgcttcggcttgttttccaaggtcctagatgaggtggagcgccggcgtgggatctccgctgcattggtctatcctttcatgagaagtctcatggagtcgcccttcccagccccagggaagaccatcaaagtgaagacattcctgccaggtgctggcaatgaggtgttagagctgcggcggcccatggactcaaggctggagcacgtgga

SEQ ID NO: 187480 - DNA, 560 bp, Homo sapiens
  Payload ID: 16909
  Gene Symbol: ST5
  Gene Name: suppression of tumorigenicity 5
  ENST ID: ENST00000528523
  CDS Start-End: 99-560
agtgctctgctcacttggctgcgaggagcgccacgaaaggtcagaggaaggagctgtgggaagctcgcagcagggctctgggtttgcagagagccgaaatgaccatgactgccaacaagaattccagcatcacccacggagctggtggcactaaagcccctcgggggactctgagcaggtctcagtcagtctctccacctccagttctctccccaccaaggagtcccatctacccgctcagtgatagtgaaacctcagcctgcaggtaccccagccactccagctcccgggtgctcctcaaggaccggcaccccccagctccttcaccccagaatcctcaagatccctccccagatacttccccacccacctgtcccttcaagaccgccagcttcggttatttggacagaagcccttcggcgtgcaagagagacgcccaaaaggaaagtgtccaaggcgcagcccaggatgtagcaggggtcgctgcctgcctcccccttgcccagagcacgccattcccggggccagcagctggcccccggggcgtcttgctgacccgt

SEQ ID NO: 187481 - DNA, 1412 bp, Homo sapiens
  Payload ID: 16909
  Gene Symbol: ST5
  Gene Name: suppression of tumorigenicity 5
  ENST ID: ENST00000532734
  CDS Start-End: 4-1074
attatgacttcaaggaagaatggaggtggggcgcatagctggcaagaaaccccgtgggaacaaagaagggctctgggtttgcagagagccgaaatgaccatgactgccaacaagaattccagcatcacccacggagctggtggcactaaagcccctcgggggactctgagcagaaaatcctttgagtttgaggatgcatccagtctccagtccctgtacccctcttctcccactgagaatggtactgagaaccaacccaagtttggatccaaaagcactttagaagaaaatgcctatgaagatattgtgggagatctgcccaaggagaatccatatgaggatgtggacttaaagagccgaagagcaggacgaaaatcccagcaactgtctgagaactccttggactctttgcacaggatgtggagtcctcaggacaggaagtacaacagcccgcccacacagctttccctgaaacccaacagccagtccctgcgcagtgggaactggtcagaaaggaagagccaccggctgccacgattacccaagaggcacagccatgacgacatgctgctgctggctcagctgagtctgccgtcctcaccctccagcctcaatgaagacagcctcagcaccaccagcgagctgctgtccagccgccgggcccgccgcattcccaagcttgtccaaagaattaactccatctacaatgccaagagaggaaagaagagattaaaaaagttgtctatgtccagcattgaaacagcatcactgagagatgaaaacagtgagagcgagagcgactctgatgacaggttcaaagcccacacacagcgcctggtccacatccagtcgatgctgaagcgcgcccccagctatcgcacgctggagctggagctgctggagtggcaggagcgggagctttttgagtactttgtggtggtgtccctcaagaagaagccatcgcgaaacacctacctccccgaagtctcctaccagtttcccaaggaatgtgctttctccagctcttcacgtggctgctggctccttctcatttctcaggctctgctcaagtaggacctctttcaggaggtctgtccagacacctgcatggagcccctcccctgcccagcttgctctgctggaccgacccaccaagcagatgcgagaggcagaggaaaggctcaaagccattccccagttttgcttccctgatgccaaggactggcttcctgtgtcagagtatagcagaccttttctttcatgctgactggggaagatggcagcagacgctttggctactgcaggcgcttactgccaagtgggaaagggccccggttgccagaggtgtactgtgtcatcagccgccttggctgcttcggcttgttttccaaggtcctagatgaggtggagcg

SEQ ID NO: 187482 - DNA, 452 bp, Homo sapiens
  Payload ID: 16909
  Gene Symbol: ST5
  Gene Name: suppression of tumorigenicity 5
  ENST ID: ENST00000531060
  CDS Start-End: 1-438
ggacgaaaatcccagcaactgtctgagaactccttggactctttgcacaggatgtggagtcctcaggacaggaagtacaacagcccgcccacacagctttccctgaaacccaacagccagtccctgcgcagtgggaactggtcagaaaggaagagccaccggctgccacgattacccaagaggcacagccatgacgacatgctgctgctggctcagctgagtctgccgtcctcaccctccagcctcaatgaagacagcctcagcaccaccagcgagctgctgtccagccgccgggcccgccgcattcccaaggtaccctccccagaggcagcccactggagccgggcaggtgggcgggcaggcagccagcctttctctctctttcctggcttccttccttccctaatctggactgcttcctcgattccctttgaataaattctgggtccgtg

SEQ ID NO: 187483 - DNA, 822 bp, Homo sapiens
  Payload ID: 16909
  Gene Symbol: ST5
  Gene Name: suppression of tumorigenicity 5
  ENST ID: ENST00000533016
  CDS Start-End: 454-822
tattctaagccactaggccgtggtggcttctttgaaaggttgaagtcttgaaaggtaagaagaccccatctagctgggtttcatgtgctgccctcaccttacccctacaagtggcacagcaagctgcctgcgatgtctggtggttgactctgctgcctgcatggttcaggtgagcagagcagttcatgttgaagcccctcccaccggtcaggagcctgtaggactgtgttgttttccttcctgtgtcctcagtgactgggctagtgtcttgcacaaggcaggtgcttggtcattgtttgtggattgaatggcttctcagcctgagcttcaggggaccttggcctgggccttggagcatactaggagttggataagcagagaggaagaaggagagcactccaggctgccagtgatttgagcccagaaacatggggcagaaatggacacgtggacatgtttggagcagaaggtgtcctgcctggagagagggctctgggtttgcagagagccgaaatgaccatgactgccaacaagaattccagcatcacccacggagctggtggcactaaagcccctcgggggactctgagcaggtctcagtcagtctctccacctccagttctctccccaccaaggagtcccatctacccgctcagtgatagtgaaacctcagcctgcaggtaccccagccactccagctcccgggtgctcctcaaggaccggcaccccccagctccttcaccccagaatcctcaagatccctccccagatacttccccacccacctgtcccttcaagaccgccagcttcggttatttggac

SEQ ID NO: 187484 - DNA, 571 bp, Homo sapiens
  Payload ID: 16909
  Gene Symbol: ST5
  Gene Name: suppression of tumorigenicity 5
  ENST ID: ENST00000527510
  CDS Start-End: 159-571
aaggtcagaggaaggagctgtgggaagctcgcagcaggtatcggagcttaagccagtggatttgggggccctgggctccctagccggctgcggtgtgagaatggagtgggcaggaaagcagcgggactttcagggctctgggtttgcagagagccgaaatgaccatgactgccaacaagaattccagcatcacccacggagctggtggcactaaagcccctcgggggactctgagcagaaaatcctttgagtttgaggatgcatccagtctccagtccctgtacccctcttctcccactgagaatggtactgagaaccaacccaagtttggatccaaaagcactttagaagaaaatgcctatgaagatattgtgggagatctgcccaaggagaatccatatgaggatgtggacttaaagagccgaagagcaggacgaaaatcccagcaactgtctgagaactccttggactctttgcacaggatgtggagtcctcaggacaggaagtacaacagcccgcccacacagccagtccctgcgcagtgggaactggtcagaaaggaagagccacc

SEQ ID NO: 187485 - DNA, 556 bp, Homo sapiens
  Payload ID: 16909
  Gene Symbol: ST5
  Gene Name: suppression of tumorigenicity 5
  ENST ID: ENST00000533471
  CDS Start-End: 335-556
gtgtgtatgagaaaatgacataaagtttcagaccccgttgtgctttgctccagacccagacaactcttggtcggatggtgaggagcccggccgcagcccggggcgcggatgcctgcccgccgcccgccctctctgcaggagcggctcctcctccgggccgcgcggctcccggcgagaccccatccaggcgccgcgcccggcccggctggggaacgcagaggaagatgagagactgcttaggcgccaccactagtaccatgagtccctgcactggttaaagccatcgccacaacctggacaggcagcaagggctctgggtttgcagagagccgaaatgaccatgactgccaacaagaattccagcatcacccacggagctggtggcactaaagcccctcgggggactctgagcaggtctcagtcagtctctccacctccagttctctccccaccaaggagtcccatctacccgctcagtgatagtgaaacctcagcctgcaggtaccccagccactccagctcccgggtgctcctcaaggaccggcaccccccagct

SEQ ID NO: 187486 - DNA, 638 bp, Homo sapiens
  Payload ID: 16909
  Gene Symbol: ST5
  Gene Name: suppression of tumorigenicity 5
  ENST ID: ENST00000533681
  CDS Start-End: 206-638
gattactgtgctttgggattaaagtgtcctgccgtttctggaagagactgctagtcataaagacaggtagggctgaagggtggaggtagggtctccagctgcagttgtcaagaacccaacgtgaaggctgactgagcagagaaactgctgctgcccagaaagaaagcacttttagcagtgggctctgggtttgcagagagccgaaatgaccatgactgccaacaagaattccagcatcacccacggagctggtggcactaaagcccctcgggggactctgagcaggtctcagtcagtctctccacctccagttctctccccaccaaggagtcccatctacccgctcagtgatagtgaaacctcagcctgcaggtaccccagccactccagctcccgggtgctcctcaaggaccggcaccccccagctccttcaccccagaatcctcaagatccctccccagatacttccccacccacctgtcccttcaagaccgccagcttcggttatttggacagaagcccttcggcgtgcaagagagacgcccaaaaggaaagtgtccaaggcgcagcccaggatgtagcaggggtcgctgcctgcctcccccttgcccagagcacgccattcccggggccagcag

SEQ ID NO: 187487 - DNA, 590 bp, Homo sapiens
  Payload ID: 16909
  Gene Symbol: ST5
  Gene Name: suppression of tumorigenicity 5
  ENST ID: ENST00000530338
  CDS Start-End: 1-296
tggtccacatccagtcgatgctgaagcgcgcccccagctatcgcacgctggagctggagctgctggagtggcaggagcgggagctttttgagtactttgtggtggtgtccctcaagaagaagccatcgcgaaacacctacctccccgaagtctcctaccagtttcccaagctggaccgacccaccaagcagatgcgagaggcagaggaaaggctcaaagccattccccagttttgcttccctgatgccaaggactggcttcctgtgtcagagtatagtcctctcacacctccctgatgccagacctctctttgttccagtgagaccttttctttcatgctgactggggaagatggcagcagacgctttggctactgcaggcgcttactgccaagtgggaaagggccccggttgccagaggtgtactgtgtcatcagccgccttggctgcttcggcttgttttccaaggtcctagatgaggtggagcgccggcgtgggatctccgctgcattggtctatcctttcatgagaagtctcatggagtcgcccttcccagccccagggaagaccatcaaagtgaagacattcctg

SEQ ID NO: 187488 - DNA, 3019 bp, Homo sapiens
  Payload ID: 16909
  Gene Symbol: ST5
  Gene Name: suppression of tumorigenicity 5
  Uniprot ID: P78524
  ENST ID: ENST00000526757
  CDS Start-End: 121-2274
tttcaggaagatgagagactgcttaggcgccaccactagtaccatgagtccctgcactggttaaagccatcgccacaacctggacaggcagcaagggctctgggtttgcagagagccgaaatgaccatgactgccaacaagaattccagcatcacccacggagctggtggcactaaagcccctcgggggactctgagcagaaaatcctttgagtttgaggatgcatccagtctccagtccctgtacccctcttctcccactgagaatggtactgagaaccaacccaagtttggatccaaaagcactttagaagaaaatgcctatgaagatattgtgggagatctgcccaaggagaatccatatgaggatgtggacttaaagagccgaagagcaggacgaaaatcccagcaactgtctgagaactccttggactctttgcacaggatgtggagtcctcaggacaggaagtacaacagcccgcccacacagctttccctgaaacccaacagccagtccctgcgcagtgggaactggtcagaaaggaagagccaccggctgccacgattacccaagaggcacagccatgacgacatgctgctgctggctcagctgagtctgccgtcctcaccctccagcctcaatgaagacagcctcagcaccaccagcgagctgctgtccagccgccgggcccgccgcattcccaagcttgtccaaagaattaactccatctacaatgccaagagaggaaagaagagattaaaaaagttgtctatgtccagcattgaaacagcatcactgagagatgaaaacagtgagagcgagagcgactctgatgacaggttcaaagcccacacacagcgcctggtccacatccagtcgatgctgaagcgcgcccccagctatcgcacgctggagctggagctgctggagtggcaggagcgggagctttttgagtactttgtggtggtgtccctcaagaagaagccatcgcgaaacacctacctccccgaagtctcctaccagtttcccaagctggaccgacccaccaagcagatgcgagaggcagaggaaaggctcaaagccattccccagttttgcttccctgatgccaaggactggcttcctgtgtcagagtatagcagtgagaccttttctttcatgctgactggggaagatggcagcagacgctttggctactgcaggcgcttactgccaagtgggaaagggccccggttgccagaggtgtactgtgtcatcagccgccttggctgcttcggcttgttttccaaggtcctagatgaggtggagcgccggcgtgggatctccgctgcattggtctatcctttcatgagaagtctcatggagtcgcccttcccagccccagggaagaccatcaaagtgaagacattcctgccaggtgctggcaatgaggtgttagagctgcggcggcccatggactcaaggctggagcacgtggactttgagtgcctttttacctgcctcagtgtgcgccagctcatccgaatctttgcctcactgctgctggagcgccgggtcatttttgtggcagataagctcagtaccctctccagctgctcccacgcggtggtggccttgctctaccccttctcctggcagcacaccttcattcctgtcctcccggcctccatgattgacatcgtctgctgtcccacccccttcctggttggcctgctctccagctccctccccaaactgaaggagctgcctgtggaggaggcgctgatggtgaatctgggatctgaccgattcatccgacagatggacgacgaagacacgttgttacctaggaagttacaggcagctctggagcaggctctggagaggaagaatgagctgatctcccaggactctgacagcgactccgacgatgaatgtaataccctcaatgggctggtgtcggaggtgtttatccggttctttgtggagaccgttgggcactactccctctttctgacacagagtgagaagggagagagggcctttcagcgagaggccttccgcaaatctgtggcctccaaaagcatccgccgctttcttgaggtttttatggagtctcagatgtttgctggcttcatccaagacagggagctaagaaagtgtcgggcaaagggcctttttgagcagcgagtggagcagtacttagaagaactcccagacactgagcagagtggaatgaataagtttctccgaggtttgggcaacaaaatgaagtttctccacaagaagaattaagcctccttctcagtagcagagtccagtgccttgcagagcctgaagcctggggagaaggcccagcctgggaccctctgggctgctgtggctcctctgcccccacagatcctatcctccaagccagcccacctctgccttcatcatatcccaggatactgtttgtaaataatctgctgtaagctttcttaactgttttttgtaacaagcaaagagaatatggcaaatatttgtatattcccaaggggccgggtgctttcctgtcctgccagagcatggatgaagtttcgctgggtgctcgtgactggccagttttgtgcagctgactgtctcagccaaaccactgatcttccctggaggccttcggcctgcctgcctgcctgaggtccccgctgccagtcccgggccctggagagcagatgctgtcttgttatgtacaggaggaccttttaaaaaaatcaagtttctattttttgctggtagtccgcatacccataccctctgtttttgaaaggcaaaggccaatcagtccccatttgtagcatggcaccagggtcttaggcctagtcctctcattcctcccaccctccgagatggtcagtgtgtcatgggaagcccacccccagctctgccagtgctctctgggcctggctcccagtcagtggtggccacgatgcggtacagggcatccctccttcccatctacgggtgttctcaataaacaatgtacagttgtttgggcccagag

SEQ ID NO: 187489 - DNA, 576 bp, Homo sapiens
  Payload ID: 16909
  Gene Symbol: ST5
  Gene Name: suppression of tumorigenicity 5
  ENST ID: ENST00000527392
  CDS Start-End: 417-576
agacccagacaactcttggtcggatggtgaggagcccggccgcagcccggggcgcggatgcctgcccgccgcccgccctctctgcaggagcggctcctcctccgggccgcgcggctcccggcgagaccccatccaggcgccgcgcccggcccggctggggaacgcagagggtcttgctgtgttgctcgggctgctcttgaactcctgggctcaaacagtcctcttgcctcagcctcccaacgtgctgggattacgggagcaagccaccccactgtgtgcagcccagaagttgagcctgagaggaagatgagagactgcttaggcgccaccactagtaccatgagtccctgcactggttaaagccatcgccacaacctggacaggcagcaagggctctgggtttgcagagagccgaaatgaccatgactgccaacaagaattccagcatcacccacggagctggtggcactaaagcccctcgggggactctgagcaggtctcagtcagtctctccacctccagttctctccccaccaaggagtcccatctacccgctcagtgatagtgaaacctcag

SEQ ID NO: 187490 - DNA, 514 bp, Homo sapiens
  Payload ID: 16909
  Gene Symbol: ST5
  Gene Name: suppression of tumorigenicity 5
  ENST ID: ENST00000527473
  CDS Start-End: 265-514
aaacttagggggtctgccgtgtcccagggactgtgctcattttctgacaggagcaatattattaccgactgtgacagcagctcccactaagcctgcaccttagctgcagatccttagcagggcagagagacaaggctgtatttgtatcaggaagatgagagactgcttaggcgccaccactagtaccatgagtccctgcactggttaaagccatcgccacaacctggacaggcagcaagggctctgggtttgcagagagccgaaatgaccatgactgccaacaagaattccagcatcacccacggagctggtggcactaaagcccctcgggggactctgagcaggtctcagtcagtctctccacctccagttctctccccaccaaggagtcccatctacccgctcagtgatagtgaaacctcagcctgcaggtaccccagccactccagctcccgggtgctcctcaaggaccggcaccccccagctccttcaccccagaatcctcaagatccct

SEQ ID NO: 187491 - DNA, 583 bp, Homo sapiens
  Payload ID: 16909
  Gene Symbol: ST5
  Gene Name: suppression of tumorigenicity 5
  ENST ID: ENST00000533225
  CDS Start-End: 356-583
gtcacataatatccagtgcgtcctccctggcactccgattctcagtagtcatgaaccagctggcttctatatctctcaccaatcacaggtaatttaggtctccctcagggtcttgctgtgttgctcgggctgctcttgaactcctgggctcaaacagtcctcttgcctcagcctcccaacgtgctgggattacgggagcaagccaccccactgtgtgcagcccagaagttgagcctgagaggaagatgagagactgcttaggcgccaccactagtaccatgagtccctgcactggttaaagccatcgccacaacctggacaggcagcaagggctctgggtttgcagagagccgaaatgaccatgactgccaacaagaattccagcatcacccacggagctggtggcactaaagcccctcgggggactctgagcagaaaatcctttgagtttgaggatgcatccagtctccagtccctgtacccctcttctcccactgagaatggtactgagaaccaacccaagtttggatccaaaagcactttagaagaaaatgcctatgaagatattgtgggagatctgccc

SEQ ID NO: 187492 - DNA, 550 bp, Homo sapiens
  Payload ID: 16909
  Gene Symbol: ST5
  Gene Name: suppression of tumorigenicity 5
  ENST ID: ENST00000526828
  CDS Start-End: 394-550
gttgacactctgaatggtttgtgaaggcatcctctggcccctgaaggcattaccatccttaccaggtttaaaatctttcagagtgcacccagcatcatcagctcctgcaagcagaaagggcccaagggagcatgaacacacactggggtcttgctgtgttgctcgggctgctcttgaactcctgggctcaaacagtcctcttgcctcagcctcccaacgtgctgggattacgggagcaagccaccccactgtgtgcagcccagaagttgagcctgagaggaagatgagagactgcttaggcgccaccactagtaccatgagtccctgcactggttaaagccatcgccacaacctggacaggcagcaagggctctgggtttgcagagagccgaaatgaccatgactgccaacaagaattccagcatcacccacggagctggtggcactaaagcccctcgggggactctgagcaggtctcagtcagtctctccacctccagttctctccccaccaaggagtcccatctacccgctcagtgatagtgaaacct

SEQ ID NO: 187493 - DNA, 590 bp, Homo sapiens
  Payload ID: 16909
  Gene Symbol: ST5
  Gene Name: suppression of tumorigenicity 5
  ENST ID: ENST00000524757
  CDS Start-End: 419-590
agacccagacaactcttggtcggatggtgaggagcccggccgcagcccggggcgcggatgcctgcccgccgcccgccctctctgcaggagcggctcctcctccgggccgcgcggctcccggcgagaccccatccaggcgccgcgcccggcccggctggggaacgcagagggatggtgacagaatggatagtatagaaaatggattggaattgaggaggaaactagaagctaagaggagttaggaggcccttgtaacaatccagatttcacaccctttggagagtttctttcttggataattcaggaagatgagagactgcttaggcgccaccactagtaccatgagtccctgcactggttaaagccatcgccacaacctggacaggcagcaagggctctgggtttgcagagagccgaaatgaccatgactgccaacaagaattccagcatcacccacggagctggtggcactaaagcccctcgggggactctgagcaggtctcagtcagtctctccacctccagttctctccccaccaaggagtcccatctacccgctcagtgatagtgaaacctcagcctgcaggtacc

SEQ ID NO: 187494 - DNA, 299 bp, Homo sapiens
  Payload ID: 16909
  Gene Symbol: ST5
  Gene Name: suppression of tumorigenicity 5
  ENST ID: ENST00000531578
  CDS Start-End: 220-299
acataatatccagtgcgtcctccctggcactccgattctcagtagtcatgaaccagctggcttctatatctctcaccaatcacaggtaatttaggtctccctcaggaagatgagagactgcttaggcgccaccactagtaccatgagtccctgcactggttaaagccatcgccacaacctggacaggcagcaagggctctgggtttgcagagagccgaaatgaccatgactgccaacaagaattccagcatcacccacggagctggtggcactaaagcccctcgggggactctgagcag

SEQ ID NO: 187495 - DNA, 659 bp, Homo sapiens
  Payload ID: 16909
  Gene Symbol: ST5
  Gene Name: suppression of tumorigenicity 5
  ENST ID: ENST00000534665
  CDS Start-End: 570-659
agacccagacaactcttggtcggatggtgaggaggtgagggccgtccagtttgggggccaacttctcctccctgctgcccccggcccccgcctccctcacccctgtcccccaccctccctcgcacactctcggcgcggctttctcgctgcctccggcgcctccgagcgctcccctccgccgggctccagcagcccaccctctctgtcttgggtggaggcgcacatcctccacgccccctccactcaaatctgcgctccctcccctctctctccctgcagcccggccgcagcccggggcgcggatgcctgcccgccgcccgccctctctgcaggagcggctcctcctccgggccgcgcggctcccggcgagaccccatccaggcgccgcgcccggcccggctggggaacgcagagatttcacaccctttggagagtttctttcttggataattcaggaagatgagagactgcttaggcgccaccactagtaccatgagtccctgcactggttaaagccatcgccacaacctggacaggcagcaagggctctgggtttgcagagagccgaaatgaccatgactgccaacaagaattccagcatcacccacggagctggtggcactaaagcccctcgggggactctgagcaggtctcagtca

SEQ ID NO: 187496 - DNA, 502 bp, Homo sapiens
  Payload ID: 16909
  Gene Symbol: ST5
  Gene Name: suppression of tumorigenicity 5
  ENST ID: ENST00000531093
  CDS Start-End: 272-502
gggccatgagggctccaccctcatgaatggattaatgctgtcattgctagagtttgtttctgataaaaacaagtccggccccctcctgccctctctctcttttgtgtgtactgttgtgcccttctgcctttctgctatgggatgatgcaggaagaaggcccgcaccagattcagccatcaatcttaagacttccaagcctctggaaccgtaagaaataaatcctcacttcattagcataaattcagggctctgggtttgcagagagccgaaatgaccatgactgccaacaagaattccagcatcacccacggagctggtggcactaaagcccctcgggggactctgagcagaaaatcctttgagtttgaggatgcatccagtctccagtccctgtacccctcttctcccactgagaatggtactgagaaccaacccaagtttggatccaaaagcactttagaagaaaatgcctatgaagatattgtgggagatctgcccaag

SEQ ID NO: 187497 - DNA, 534 bp, Homo sapiens
  Payload ID: 16909
  Gene Symbol: ST5
  Gene Name: suppression of tumorigenicity 5
  ENST ID: ENST00000530938
  CDS Start-End: 313-534
gatgcctgcccgccgcccgccctctctgcaggagcggctcctcctccgggccgcgcggctcccggcgagaccccatccaggcgccgcgcccggcccggctggggaacgcagagatttcacaccctttggagagtttctttcttggataattcagggtcttgctgtgttgctcgggctgctcttgaactcctgggctcaaacagtcctcttgcctcagcctcccaacgtgctgggattacgggagcaagccaccccactgtgtgcagcccagaagttgagcctgagagggctctgggtttgcagagagccgaaatgaccatgactgccaacaagaattccagcatcacccacggagctggtggcactaaagcccctcgggggactctgagcaggtctcagtcagtctctccacctccagttctctccccaccaaggagtcccatctacccgctcagtgatagtgaaacctcagcctgcaggtaccccagccactccagctcccgggtgctcctcaaggaccggcaccccccagct

SEQ ID NO: 187498 - DNA, 559 bp, Homo sapiens
  Payload ID: 16909
  Gene Symbol: ST5
  Gene Name: suppression of tumorigenicity 5
  ENST ID: ENST00000526126
  CDS Start-End: 343-559
tcccggcgagaccccatccaggcgccgcgcccggcccggctggggaacgcagagatttcacaccctttggagagtttctttcttggataattcagggtcttgctgtgttgctcgggctgctcttgaactcctgggctcaaacagtcctcttgcctcagcctcccaacgtgctgggattacgggagcaagccaccccactgtgtgcagcccagaagttgagcctgagaggaagatgagagactgcttaggcgccaccactagtaccatgagtccctgcactggttaaagccatcgccacaacctggacaggcagcaagggctctgggtttgcagagagccgaaatgaccatgactgccaacaagaattccagcatcacccacggagctggtggcactaaagcccctcgggggactctgagcagaaaatcctttgagtttgaggatgcatccagtctccagtccctgtacccctcttctcccactgagaatggtactgagaaccaacccaagtttggatccaaaagcactttagaagaaaatgcctatgaagatattgtgg

SEQ ID NO: 187499 - DNA, 2679 bp, Homo sapiens
  Payload ID: 16909
  Gene Symbol: ST5
  Gene Name: suppression of tumorigenicity 5
  Uniprot ID: P78524
  ENST ID: ENST00000530438
  CDS Start-End: 526-2679
gaagaaaacaagtccactcactgtcttctcccttctcccctctgagctgttcaagcaagttcccaggagcagttcagagcccctgttggactggaagggaggtaggaggagtggaatgcatgcaaaaaccgagctgatcaaaagacagtgctgtttcatggaagcctcccagaactgagagagagagagagagagagagagagagagagacagtgagaaagaaagaaaaagagagcgcccttgtgcacgcgctaggccaagagcgcgccgctgtgcgcgcgcccgcctagcgaggacagggtctccatgacaaccggcctggccggctagcagtgctctgctcacttggctgcgaggagcgccacgaaaggtcagaggaaggagctgtgggaagctcgcagcaggtatcggagcttaagccagtggatttgggggccctgggctccctagccggctgcggtgtgagaatggagtgggcaggaaagcagcgggactttcagggctctgggtttgcagagagccgaaatgaccatgactgccaacaagaattccagcatcacccacggagctggtggcactaaagcccctcgggggactctgagcagaaaatcctttgagtttgaggatgcatccagtctccagtccctgtacccctcttctcccactgagaatggtactgagaaccaacccaagtttggatccaaaagcactttagaagaaaatgcctatgaagatattgtgggagatctgcccaaggagaatccatatgaggatgtggacttaaagagccgaagagcaggacgaaaatcccagcaactgtctgagaactccttggactctttgcacaggatgtggagtcctcaggacaggaagtacaacagcccgcccacacagctttccctgaaacccaacagccagtccctgcgcagtgggaactggtcagaaaggaagagccaccggctgccacgattacccaagaggcacagccatgacgacatgctgctgctggctcagctgagtctgccgtcctcaccctccagcctcaatgaagacagcctcagcaccaccagcgagctgctgtccagccgccgggcccgccgcattcccaagcttgtccaaagaattaactccatctacaatgccaagagaggaaagaagagattaaaaaagttgtctatgtccagcattgaaacagcatcactgagagatgaaaacagtgagagcgagagcgactctgatgacaggttcaaagcccacacacagcgcctggtccacatccagtcgatgctgaagcgcgcccccagctatcgcacgctggagctggagctgctggagtggcaggagcgggagctttttgagtactttgtggtggtgtccctcaagaagaagccatcgcgaaacacctacctccccgaagtctcctaccagtttcccaagctggaccgacccaccaagcagatgcgagaggcagaggaaaggctcaaagccattccccagttttgcttccctgatgccaaggactggcttcctgtgtcagagtatagcagtgagaccttttctttcatgctgactggggaagatggcagcagacgctttggctactgcaggcgcttactgccaagtgggaaagggccccggttgccagaggtgtactgtgtcatcagccgccttggctgcttcggcttgttttccaaggtcctagatgaggtggagcgccggcgtgggatctccgctgcattggtctatcctttcatgagaagtctcatggagtcgcccttcccagccccagggaagaccatcaaagtgaagacattcctgccaggtgctggcaatgaggtgttagagctgcggcggcccatggactcaaggctggagcacgtggactttgagtgcctttttacctgcctcagtgtgcgccagctcatccgaatctttgcctcactgctgctggagcgccgggtcatttttgtggcagataagctcagtaccctctccagctgctcccacgcggtggtggccttgctctaccccttctcctggcagcacaccttcattcctgtcctcccggcctccatgattgacatcgtctgctgtcccacccccttcctggttggcctgctctccagctccctccccaaactgaaggagctgcctgtggaggaggcgctgatggtgaatctgggatctgaccgattcatccgacagatggacgacgaagacacgttgttacctaggaagttacaggcagctctggagcaggctctggagaggaagaatgagctgatctcccaggactctgacagcgactccgacgatgaatgtaataccctcaatgggctggtgtcggaggtgtttatccggttctttgtggagaccgttgggcactactccctctttctgacacagagtgagaagggagagagggcctttcagcgagaggccttccgcaaatctgtggcctccaaaagcatccgccgctttcttgaggtttttatggagtctcagatgtttgctggcttcatccaagacagggagctaagaaagtgtcgggcaaagggcctttttgagcagcgagtggagcagtacttagaagaactcccagacactgagcagagtggaatgaataagtttctccgaggtttgggcaacaaaatgaagtttctccacaagaagaattaa

SEQ ID NO: 187500 - DNA, 2404 bp, Homo sapiens
  Payload ID: 16909
  Gene Symbol: ST5
  Gene Name: suppression of tumorigenicity 5
  ENST ID: ENST00000526099
  CDS Start-End: 104-2056
gtgaacaacacaaaaccctgccctaaaagacttgttgaacggcatcgtaggtgagaagggggcctggcgaagccctgctccctacggttctgtgagttcctccatgcccaccctccaaagagatctgcccaaggagaatccatatgaggatgtggacttaaagagccgaagagcaggacgaaaatcccagcaactgtctgagaactccttggactctttgcacaggatgtggagtcctcaggacaggaagtacaacagcccgcccacacagctttccctgaaacccaacagccagtccctgcgcagtgggaactggtcagaaaggaagagccaccggctgccacgattacccaagaggcacagccatgacgacatgctgctgctggctcagctgagtctgccgtcctcaccctccagcctcaatgaagacagcctcagcaccaccagcgagctgctgtccagccgccgggcccgccgcattcccaagcttgtccaaagaattaactccatctacaatgccaagagaggaaagaagagattaaaaaagttgtctatgtccagcattgaaacagcatcactgagagatgaaaacagtgagagcgagagcgactctgatgacaggttcaaagcccacacacagcgcctggtccacatccagtcgatgctgaagcgcgcccccagctatcgcacgctggagctggagctgctggagtggcaggagcgggagctttttgagtactttgtggtggtgtccctcaagaagaagccatcgcgaaacacctacctccccgaagtctcctaccagtttcccaagctggaccgacccaccaagcagatgcgagaggcagaggaaaggctcaaagccattccccagttttgcttccctgatgccaaggactggcttcctgtgtcagagtatagcagtgagaccttttctttcatgctgactggggaagatggcagcagacgctttggctactgcaggcgcttactgccaagtgggaaagggccccggttgccagaggtgtactgtgtcatcagccgccttggctgcttcggcttgttttccaaggtcctagatgaggtggagcgccggcgtgggatctccgctgcattggtctatcctttcatgagaagtctcatggagtcgcccttcccagccccagggaagaccatcaaagtgaagacattcctgccaggtgctggcaatgaggtgttagagctgcggcggcccatggactcaaggctggagcacgtggactttgagtgcctttttacctgcctcagtgtgcgccagctcatccgaatctttgcctcactgctgctggagcgccgggtcatttttgtggcagataagctcagtaccctctccagctgctcccacgcggtggtggccttgctctaccccttctcctggcagcacaccttcattcctgtcctcccggcctccatgattgacatcgtctgctgtcccacccccttcctggttggcctgctctccagctccctccccaaactgaaggagctgcctgtggaggaggcgctgatggtgaatctgggatctgaccgattcatccgacagatggacgacgaagacacgttgttacctaggaagttacaggcagctctggagcaggctctggagaggaagaatgagctgatctcccaggactctgacagcgactccgacgatgaatgtaataccctcaatgggctggtgtcggaggtgtttatccggttctttgtggagaccgttgggcactactccctctttctgacacagagtgagaagggagagagggcctttcagcgagaggccttccgcaaatctgtggcctccaaaagcatccgccgctttcttgaggtttttatggagtctcagatgtttgctggcttcatccaagacagggagctaagaaagtgtcgggcaaagggcctttttgagcagcgagtggagcagtacttagaagaactcccagacactgagcagagtggaatgaataagtttctccgaggtttgggcaacaaaatgaagtttctccacaagaagaattaagcctccttctcagtagcagagtccagtgccttgcagagcctgaagcctggggagaaggcccagcctgggaccctctgggctgctgtggctcctctgcccccacagatcctatcctccaagccagcccacctctgccttcatcatatcccaggatactgtttgtaaataatctgctgtaagctttcttaactgttttttgtaacaagcaaagagaatatggcaaatatttgtatattcccaaggggccgggtgctttcctgtcctgccagagcatggatgaagtttcgctgggtgctcgtgactggccagttttgtgcagctgactgtctcagccaaaccactgatctt

SEQ ID NO: 187501 - DNA, 600 bp, Homo sapiens
  Payload ID: 16909
  Gene Symbol: ST5
  Gene Name: suppression of tumorigenicity 5
  ENST ID: ENST00000526057
  CDS Start-End: 460-600
agcccggggcgcggatgcctgcccgccgcccgccctctctgcaggagcggctcctcctccgggccgcgcggctcccggcgagaccccatccaggcgccgcgcccggcccggctggggaacgcagaggaagatgagagactgcttaggcgccaccactagtaccatgagtccctgcactggttaaagccatcgccacaacctggacaggcagcaagaaaatcctttgagtttgaggatgcatccagtctccagtccctgtacccctcttctcccactgagaatggtactgagaaccaacccaagtttggatccaaaagcactttagaagaaaatgcctatgaagatattgtgggagatctgcccaaggagaatccatatgaggatgtggacttaaagagccgaagagcaggacgaaaatcccagcaactgtctgagaactccttggactctttgcacaggatgtggagtcctcaggacaggaagtacaacagcccgcccacacagctttccctgaaacccaacagccagtccctgcgcagtgggaactggtcagaaaggaagagccaccggctgccacgattacccaagaggcacagccat

SEQ ID NO: 187502 - DNA, 862 bp, Homo sapiens
  Payload ID: 16909
  Gene Symbol: ST5
  Gene Name: suppression of tumorigenicity 5
  ENST ID: ENST00000530593
  CDS Start-End: 210-862
agtccctgtacccctcttctcccactgagaatggtactgagaaccaacccaagtttggatccaaaagcactttagaagaaaatgcctatgaagatattgtgggagatctgcccaaggagaatccatatgaggatgtggacttaaagagccgaagagcaggacgaaaatcccagcaactgtctgagaactccttggactctttgcacaggatgtggagtcctcaggacaggaagtacaacagcccgcccacacagctttccctgaaacccaacagccagtccctgcgcagtgggaactggtcagaaaggaagagccaccggctgccacgattacccaagaggcacagccatgacgacatgctgctgctggctcagctgagtctgccgtcctcaccctccagcctcaatgaagacagcctcagcaccaccagcgagctgctgtccagccgccgggcccgccgcattcccaagcttgtccaaagaattaactccatctacaatgccaagagaggaaagaagagattaaaaaagttgtctatgtccagcattgaaacagcatcactgagagcccacacacagcgcctggtccacatccagtcgatgctgaagcgcgcccccagctatcgcacgctggagctggagctgctggagtggcaggagcgggagctttttgagtactttgtggtggtgtccctcaagaagaagccatcgcgaaacacctacctccccgaagtctcctaccagtttcccaagctggaccgacccaccaagcagatgcgagaggcagaggaaaggctcaaagccattccccagttttgcttccctgatgccaaggactggcttcctgtgtcagagtatagcag

SEQ ID NO: 187503 - DNA, 1071 bp, Homo sapiens
  Payload ID: 16909
  Gene Symbol: ST5
  Gene Name: suppression of tumorigenicity 5
  ENST ID: ENST00000626808
  CDS Start-End: 1-1071
atgacttcaaggaagaatggaggtggggcgcatagctggcaagaaaccccgtgggaacaaagaagggctctgggtttgcagagagccgaaatgaccatgactgccaacaagaattccagcatcacccacggagctggtggcactaaagcccctcgggggactctgagcagaaaatcctttgagtttgaggatgcatccagtctccagtccctgtacccctcttctcccactgagaatggtactgagaaccaacccaagtttggatccaaaagcactttagaagaaaatgcctatgaagatattgtgggagatctgcccaaggagaatccatatgaggatgtggacttaaagagccgaagagcaggacgaaaatcccagcaactgtctgagaactccttggactctttgcacaggatgtggagtcctcaggacaggaagtacaacagcccgcccacacagctttccctgaaacccaacagccagtccctgcgcagtgggaactggtcagaaaggaagagccaccggctgccacgattacccaagaggcacagccatgacgacatgctgctgctggctcagctgagtctgccgtcctcaccctccagcctcaatgaagacagcctcagcaccaccagcgagctgctgtccagccgccgggcccgccgcattcccaagcttgtccaaagaattaactccatctacaatgccaagagaggaaagaagagattaaaaaagttgtctatgtccagcattgaaacagcatcactgagagatgaaaacagtgagagcgagagcgactctgatgacaggttcaaagcccacacacagcgcctggtccacatccagtcgatgctgaagcgcgcccccagctatcgcacgctggagctggagctgctggagtggcaggagcgggagctttttgagtactttgtggtggtgtccctcaagaagaagccatcgcgaaacacctacctccccgaagtctcctaccagtttcccaaggaatgtgctttctccagctcttcacgtggctgctggctccttctcatttctcaggctctgctcaagtag

SEQ ID NO: 187504 - DNA, 2899 bp, Homo sapiens
  Payload ID: 16910
  Gene Symbol: ST7
  Gene Name: suppression of tumorigenicity 7
  Uniprot ID: Q9NRC1
  ENST ID: ENST00000265437
  CDS Start-End: 215-1972
gggacctttagagagttagcaataaggctggagaaggaaaagccggcgcgcccgcggcccgcgcgatttcccgccgagcccgcgtccccggcggcgggcgggctccgggggcgcccgggccgcggcggcggcggcggcgcgagctgcgcctccgggccggtgaatcatcccggcagacaccaagagccgcggcagcagagaggagcgctgaaacatggctgaagcggccacgggctttctggagcagctcaagtcctgcatagtttggtcttggacgtatctgtggaccgtgtggttcttcatcgtgctattcctggtctacatcctgcgggtgcctttgaaaatcaacgacaacttgagcacagtgagcatgtttttgaacacattaacaccgaagttctacgtggccctaacaggcacttcctcactaatatcagggcttattttgatatttgaatggtggtattttcgcaaatacggaacttcattcattgaacaagtctcagtaagccacttgcgcccccttctgggaggggttgacaacaactcttccaacaattctaattccagtaacggggactcagattccaataggcaaagtgtctcagaatgcaaagtatggcgaaatccactaaatttatttaggggtgctgaatacaatcggtatacttgggtgacaggacgagagcctcttacttactatgacatgaatctctctgcccaagaccaccagacattctttacttgtgactcggaccatctgcgtcccgcagatgcaataatgcagaaagcctggagagagagaaacccccaagctaggatttctgcagctcatgaagccttggagataaatgaaattaggtccagagttgaagttcccctaattgcttcctctaccatctgggagataaaattgttaccaaagtgtgcaactgcttatattctcttggctgaagaggaagcaacaaccattgctgaagcagaaaaattatttaagcaggccctgaaggctggagatggctgttaccgacgctctcagcagctacaacatcatggatcccagtatgaagcccaacatagacgagacaccaatgtcttggtgtacatcaaaagaaggctagcaatgtgtgccagaagactcgggaggaccagggaagcagtgaaaatgatgagagatttaatgaaggagttcccccttctgagtatgttcaatatccatgaaaaccttttagaagcccttctggaactacaagcatatgctgatgttcaggcagtcttagcaaagtatgatgatataagcttaccaaagtcagcaacaatatgctacacagctgctttgctcaaagcaagagctgtctctgacaaattctctcctgaggctgcatctcggcgggggctgagcacagcagagatgaatgcagtagaggccattcatagagctgtggaattcaatcctcatgtgccaaaatacctactagaaatgaaaagcttaatcctacccccagaacatatcctgaagagaggagacagtgaagcaatagcatatgcattctttcatcttgcacactggaagagagtggaaggggctttgaatcttttgcattgtacgtgggaaggcacttttcggatgatcccttatcccttggaaaaggggcacctattttatccttacccaatctgtacagaaacagcagaccgagagctgcttccatctttccatgaagtctcagtttacccaaagaaggagcttcccttctttattctctttactgctggattatgttccttcacagccatgctggccctcctgacacatcagttcccggaacttatgggggtcttcgcaaaagctatgattgacattttctgctcggcagagttcagggactggaattgcaagagtattttcatgcgtgttgaagatgaactggaaatccctccggcacctcaatctcaacatttccaaaactgaactcatcacccctcttcccccaccaccaaaactgctcctcctcctgtattcctgacctccgccatccaccccgttgctcaagccggaaactcggcagcccttccaaactcttccctctctcactccccacatcccatcgtctcggccttcacaatctgtcagttctaacctcctaagcaactaggccttcagtaaatgtgattcacctcttctttccctccttttcccaaagcatccctcttagtctaggtccttgttgtttcttgcctgaactcctgccatagtcttaactggtctccttgcttcctgtcttatcctccaccgtctttcttttatactgacacaagaatggtctttctgaattgcacatgtgagcatgtcacttccctgcttaaatttctccagtggattcccagggacttcaggatcaagtcctagttgttcagcatggcatccaagactctttatgatctggcccttgcttacctctcagccttagctctcccaactcttgcacagtcactgctcttcagccatagtggatcactcaccattcccagatgtaccaggctctcgcacacctctgcacctttgcacgtgctgtttgctgtgcgtggaatgcccttcactgtcaccaccctgctcatccactctactaatgcctcttcattcttttatactcagctttctttaaagttcttctaagctgagttaggtgtctgtcctttatgatcccgcagtattccatgaatacgtatattctcacatttattgtactgtattataattgttgaaaacttgtctgtcccatttagaatgtgagctccttgagagcagaacggtgtcttcattatctctgtatccccaaggctttgcacagtgccttgctcatagtaggttttcaataaatgattattaaataaataa

SEQ ID NO: 187505 - DNA, 2142 bp, Homo sapiens
  Payload ID: 16910
  Gene Symbol: ST7
  Gene Name: suppression of tumorigenicity 7
  ENST ID: ENST00000323984
  CDS Start-End: 163-1896
cgcggcccgcgcgatttcccgccgagcccgcgtccccggcggcgggcgggctccgggggcgcccgggccgcggcggcggcggcggcgcgagctgcgcctccgggccggtgaatcatcccggcagacaccaagagccgcggcagcagagaggagcgctgaaacatggctgaagcggccacgggctttctggagcagctcaagtcctgcatagtttggtcttggacgtatctgtggaccgtgtggttcttcatcgtgctattcctggtctacatcctgcgggtgcctttgaaaatcaacgacaacttgagcacagtgagcatgtttttgaacacattaacaccgaagttctacgtggccctaacaggcacttcctcactaatatcagggcttattttgatatttgaatggtggtattttcgcaaatacggaacttcattcattgaacaagtctcagtaagccacttgcgcccccttctgggaggggttgacaacaactcttccaacaattctaattccagtaacggggactcagattccaataggcaaagtgtctcagaatgcaaagtatggcgaaatccactaaatttatttaggggtgctgaatacaatcggtatacttgggtgacaggacgagagcctcttacttactatgacatgaatctctctgcccaagaccaccagacattctttacttgtgactcggaccatctgcgtcccgcagatgcaataatgcagaaagcctggagagagagaaacccccaagctaggatttctgcagctcatgaagccttggagataaatgaaattaggtccagagttgaagttcccctaattgcttcctctaccatctgggagataaaattgttaccaaagtgtgcaactgcttatattctcttggctgaagaggaagcaacaaccattgctgaagcagaaaaattatttaagcaggccctgaaggctggagatggctgttaccgacgctctcagcagctacaacatcatggatcccagtatgaagcccaacatagacgagacaccaatgtcttggtgtacatcaaaagaaggctagcaatgtgtgccagaagactcgggaggaccagggaagcagtgaaaatgatgagagatttaatgaaggagttcccccttctgagtatgttcaatatccatgaaaaccttttagaagcccttctggaactacaagcatatgctgatgttcaggcagtcttagcaaagtatgatgatataagcttaccaaagtcagcaacaatatgctacacagctgctttgctcaaagcaagagctgtctctgacaaattctctcctgaggctgcatctcggcgggggctgagcacagcagagatgaatgcagtagaggccattcatagagctgtggaattcaatcctcatgtgccaaaatacctactagaaatgaaaagcttaatcctacccccagaacatatcctgaagagaggagacagtgaagcaatagcatatgcattctttcatcttgcacactggaagagagtggaaggggctttgaatcttttgcattgtacgtgggaaggcacttttcggatgatcccttatcccttggaaaaggggcacctattttatccttacccaatctgtacagaaacagcagaccgagagctgcttccatctttccatgaagtctcagtttacccaaagaaggagcttcccttctttattctctttactgctggattatgttccttcacagccatgctggccctcctgacacatcagttcccggaacttatgggggtcttcgcaaaagctttcctcagcactttgtttgcccccttaaactttgtcatggagaaagtggagagcatcctcccatccagtctgtggcaccagctaacacggatctgagagaagccctgtcctccactcacctcacccgccgctgccaccatctcctctgtgccaactccttgtggaccgcaagaaagcatgactttgaaaaagggaagccattccgagattttaaaatgttcatggactattccatattaaaagctgtttttgttgtacaaaattcactgatgttcagttctattttattttgccttcagaaaagaagaaagtcaaaaataaaacttttgtgtattacagcaa

SEQ ID NO: 187506 - DNA, 2360 bp, Homo sapiens
  Payload ID: 16910
  Gene Symbol: ST7
  Gene Name: suppression of tumorigenicity 7
  Uniprot ID: Q9NRC1
  ENST ID: ENST00000393443
  CDS Start-End: 615-2114
gtcttactgctacagcagggctggggattgcagtatccgctgttgctgctgctcccagtcctgcccctgctgctacctagtccagcctcaccgcatcccagaagaggcacgtcggccttcatttgcctagtggattttcaaaagcagctcttcggtttttggtgctgttaagagaccttgcatttcaatcacaccgggagaaaactgaagctcgtaacaggagaatctggcagctggacacagcttggactgcattgtctggcttcatgacccctgctgtgtagccggctcatctcttcactctcacatgtacactctcctcgcttttctttcttttttttttcccttttctttcttctaatttttaaaaagcagcctctggagccagccatgtttggcactgaatcttcatagaaaaatatttgttgaatgagtgaacgtgggatctctgttcattttggtatattactttgctttctgggctgagctcaggacagatgccaaagcctttccctctaatgacatcaaagccctacttctaaaaccagactggatgtgattcccttctacaaacagattcagtaaagaaatgtgaatactcccacaaaaagcccatgagcatgtttttgaacacattaacaccgaagttctacgtggccctaacaggcacttcctcactaatatcagggcttattttgatatttgaatggtggtattttcgcaaatacggaacttcattcattgaacaagtctcagtaagccacttgcgcccccttctgggaggggttgacaacaactcttccaacaattctaattccagtaacggggactcagattccaataggcaaagtgtctcagaatgcaaagtatggcgaaatccactaaatttatttaggggtgctgaatacaatcggtatacttgggtgacaggacgagagcctcttacttactatgacatgaatctctctgcccaagaccaccagacattctttacttgtgactcggaccatctgcgtcccgcagatgcaataatgcagaaagcctggagagagagaaacccccaagctaggatttctgcagctcatgaagccttggagataaatgagtgtgcaactgcttatattctcttggctgaagaggaagcaacaaccattgctgaagcagaaaaattatttaagcaggccctgaaggctggagatggctgttaccgacgctctcagcagctacaacatcatggatcccagtatgaagcccaacatagacgagacaccaatgtcttggtgtacatcaaaagaaggctagcaatgtgtgccagaagactcgggaggaccagggaagcagtgaaaatgatgagagatttaatgaaggagttcccccttctgagtatgttcaatatccatgaaaaccttttagaagcccttctggaactacaagcatatgctgatgttcaggcagtcttagcaaagtatgatgatataagcttaccaaagtcagcaacaatatgctacacagctgctttgctcaaagcaagagctgtctctgacaaattctctcctgaggctgcatctcggcgggggctgagcacagcagagatgaatgcagtagaggccattcatagagctgtggaattcaatcctcatgtgccaaaatacctactagaaatgaaaagcttaatcctacccccagaacatatcctgaagagaggagacagtgaagcaatagcatatgcattctttcatcttgcacactggaagagagtggaaggggctttgaatcttttgcattcttttcggatgatcccttatcccttggaaaaggggcacctattttatccttacccaatctgtacagaaacagcagaccgagagctgcttccatctttccatgaagtctcagtttacccaaagaaggagcttcccttctttattctctttactgctggattatgttccttcacagccatgctggccctcctgacacatcagttcccggaacttatgggggtcttcgcaaaagctttcctcagcactttgtttgcccccttaaactttgtcatggagaaagtggagagcatcctcccatccagtctgtggcaccagctaacacggatctgagagaagccctgtcctccactcacctcacccgccgctgccaccatctcctctgtgccaactccttgtggaccgcaagaaagcatgactttgaaaaagggaagccattccgagattttaaaatgttcatggactattccatattaaaagctgtttttgttgtacaaaattcactgatgttcagttctattttattttgccttcagaaaagaagaaagtcaaaaataaaacttttgtgtattacagcaa

SEQ ID NO: 187507 - DNA, 2113 bp, Homo sapiens
  Payload ID: 16910
  Gene Symbol: ST7
  Gene Name: suppression of tumorigenicity 7
  ENST ID: ENST00000393444
  CDS Start-End: 332-1867
cctgcccctgctgctacctagtccagcctcaccgcatcccagaagaggcacgtcggccttcatttgcctagtggattttcaaaagcagctcttcggtttttggtgctgttaagagaccttgcatttcaatcacaccgggagaaaactgaagctcgtaacaggagaatctggcagctggacacagcttggactgcattgtctggcttcatgacccctgctgtgtagccggctcatctcttcactctcacatgtacactctcctcgcttttctttcttttttttttcccttttctttcttctaatttttaaaaagcagcctctggagccagccatgtttggcactgaatcttcattgagcatgtttttgaacacattaacaccgaagttctacgtggccctaacaggcacttcctcactaatatcagggcttattttgatatttgaatggtggtattttcgcaaatacggaacttcattcattgaacaagtctcagtaagccacttgcgcccccttctgggaggggttgacaacaactcttccaacaattctaattccagtaacggggactcagattccaataggcaaagtgtctcagaatgcaaagtatggcgaaatccactaaatttatttaggggtgctgaatacaatcggtatacttgggtgacaggacgagagcctcttacttactatgacatgaatctctctgcccaagaccaccagacattctttacttgtgactcggaccatctgcgtcccgcagatgcaataatgcagaaagcctggagagagagaaacccccaagctaggatttctgcagctcatgaagccttggagataaatgagtgtgcaactgcttatattctcttggctgaagaggaagcaacaaccattgctgaagcagaaaaattatttaagcaggccctgaaggctggagatggctgttaccgacgctctcagcagctacaacatcatggatcccagtatgaagcccaacatagacgagacaccaatgtcttggtgtacatcaaaagaaggctagcaatgtgtgccagaagactcgggaggaccagggaagcagtgaaaatgatgagagatttaatgaaggagttcccccttctgagtatgttcaatatccatgaaaaccttttagaagcccttctggaactacaagcatatgctgatgttcaggcagtcttagcaaagtatgatgatataagcttaccaaagtcagcaacaatatgctacacagctgctttgctcaaagcaagagctgtctctgacaaattctctcctgaggctgcatctcggcgggggctgagcacagcagagatgaatgcagtagaggccattcatagagctgtggaattcaatcctcatgtgccaaaatacctactagaaatgaaaagcttaatcctacccccagaacatatcctgaagagaggagacagtgaagcaatagcatatgcattctttcatcttgcacactggaagagagtggaaggggctttgaatcttttgcattgtacgtgggaaggcacttttcggatgatcccttatcccttggaaaaggggcacctattttatccttacccaatctgtacagaaacagcagaccgagagctgcttccatctttccatgaagtctcagtttacccaaagaaggagcttcccttctttattctctttactgctggattatgttccttcacagccatgctggccctcctgacacatcagttcccggaacttatgggggtcttcgcaaaagctttcctcagcactttgtttgcccccttaaactttgtcatggagaaagtggagagcatcctcccatccagtctgtggcaccagctaacacggatctgagagaagccctgtcctccactcacctcacccgccgctgccaccatctcctctgtgccaactccttgtggaccgcaagaaagcatgactttgaaaaagggaagccattccgagattttaaaatgttcatggactattccatattaaaagctgtttttgttgtacaaaattcactgatgttcagttctattttattttgccttcagaaaagaagaaagtcaaaaataaaacttttgtgtattacagcaa

SEQ ID NO: 187508 - DNA, 2114 bp, Homo sapiens
  Payload ID: 16910
  Gene Symbol: ST7
  Gene Name: suppression of tumorigenicity 7
  ENST ID: ENST00000393446
  CDS Start-End: 304-1875
tctttctaaatattagcataataaatataaatggacccagaacgcgagggggcaggggccacgtgatcgctccacgaaagccacttgtagggacctttagagagttagcaataaggctggagaaggaaaagccggcgcgcccgcggcccgcgcgatttcccgccgagcccgcgtccccggcggcgggcgggctccgggggcgcccgggccgcggcggcggcggcggcgcgagctgcgcctccgggccggtgaatcatcccggcagacaccaagagccgcggcagcagagaggagcgctgaaacatggctgaagcggccacgggctttctggagcagctcaagtcctgcatagtttggtcttggacgtatctgtggaccgtgtggttcttcatcgtgctattcctggtctacatcctgcgggtgcctttgaaaatcaacgacaacttgagcacagtgagcatgtttttgaacacattaacaccgaagttctacgtggccctaacaggcacttcctcactaatatcagggcttattttgatatttgaatggtggtattttcgcaaatacggaacttcattcattgaacaagtctcagtaagccacttgcgcccccttctgggaggggttgacaacaactcttccaacaattctaattccagtaacggggactcagattccaataggcaaagtgtctcagaatgcaaagtatggcgaaatccactaaatttatttaggggtgctgaatacaatcggtatacttgggtgacaggacgagagcctcttacttactatgacatgaatctctctgcccaagaccaccagacattctttacttgtgactcggaccatctgcgtcccgcagatgcaataatgcagaaagcctggagagagagaaacccccaagctaggatttctgcagctcatgaagccttggagataaatgagtgtgcaactgcttatattctcttggctgaagaggaagcaacaaccattgctgaagcagaaaaattatttaagcaggccctgaaggctggagatggctgttaccgacgctctcagcagctacaacatcatggatcccagtatgaagcccaacatagacgagacaccaatgtcttggtgtacatcaaaagaaggctagcaatgtgtgccagaagactcgggaggaccagggaagcagtgaaaatgatgagagatttaatgaaggagttcccccttctgagtatgttcaatatccatgaaaaccttttagaagcccttctggaactacaagcatatgctgatgttcaggcagtcttagcaaagtatgatgatataagcttaccaaagtcagcaacaatatgctacacagctgctttgctcaaagcaagagctgtctctgacaaattctctcctgaggctgcatctcggcgggggctgagcacagcagagatgaatgcagtagaggccattcatagagctgtggaattcaatcctcatgtgccaaaatacctactagaaatgaaaagcttaatcctacccccagaacatatcctgaagagaggagacagtgaagcaatagcatatgcattctttcatcttgcacactggaagagagtggaaggggctttgaatcttttgcattgtacgtgggaaggcactttccatgaagtctcagtttacccaaagaaggagcttcccttctttattctctttactgctggattatgttccttcacagccatgctggccctcctgacacatcagttcccggaacttatgggggtcttcgcaaaagctttcctcagcactttgtttgcccccttaaactttgtcatggagaaagtggagagcatcctcccatccagtctgtggcaccagctaacacggatctgagagaagccctgtcctccactcacctcacccgccgctgccaccatctcctctgtgccaactccttgtggaccgcaagaaagcatgactttgaaaaagggaagccattccgagattttaaaatgttcatggactattccatattaaaagctgtttttgttgtacaaaattcactgatgttcagttctattttattttgccttcagaaaagaagaaagtcaaaaataaaacttttgtgtatt

SEQ ID NO: 187509 - DNA, 2182 bp, Homo sapiens
  Payload ID: 16910
  Gene Symbol: ST7
  Gene Name: suppression of tumorigenicity 7
  ENST ID: ENST00000393447
  CDS Start-End: 332-1936
cctgcccctgctgctacctagtccagcctcaccgcatcccagaagaggcacgtcggccttcatttgcctagtggattttcaaaagcagctcttcggtttttggtgctgttaagagaccttgcatttcaatcacaccgggagaaaactgaagctcgtaacaggagaatctggcagctggacacagcttggactgcattgtctggcttcatgacccctgctgtgtagccggctcatctcttcactctcacatgtacactctcctcgcttttctttcttttttttttcccttttctttcttctaatttttaaaaagcagcctctggagccagccatgtttggcactgaatcttcattgagcatgtttttgaacacattaacaccgaagttctacgtggccctaacaggcacttcctcactaatatcagggcttattttgatatttgaatggtggtattttcgcaaatacggaacttcattcattgaacaagtctcagtaagccacttgcgcccccttctgggaggggttgacaacaactcttccaacaattctaattccagtaacggggactcagattccaataggcaaagtgtctcagaatgcaaagtatggcgaaatccactaaatttatttaggggtgctgaatacaatcggtatacttgggtgacaggacgagagcctcttacttactatgacatgaatctctctgcccaagaccaccagacattctttacttgtgactcggaccatctgcgtcccgcagatgcaataatgcagaaagcctggagagagagaaacccccaagctaggatttctgcagctcatgaagccttggagataaatgaaattaggtccagagttgaagttcccctaattgcttcctctaccatctgggagataaaattgttaccaaagtgtgcaactgcttatattctcttggctgaagaggaagcaacaaccattgctgaagcagaaaaattatttaagcaggccctgaaggctggagatggctgttaccgacgctctcagcagctacaacatcatggatcccagtatgaagcccaacatagacgagacaccaatgtcttggtgtacatcaaaagaaggctagcaatgtgtgccagaagactcgggaggaccagggaagcagtgaaaatgatgagagatttaatgaaggagttcccccttctgagtatgttcaatatccatgaaaaccttttagaagcccttctggaactacaagcatatgctgatgttcaggcagtcttagcaaagtatgatgatataagcttaccaaagtcagcaacaatatgctacacagctgctttgctcaaagcaagagctgtctctgacaaattctctcctgaggctgcatctcggcgggggctgagcacagcagagatgaatgcagtagaggccattcatagagctgtggaattcaatcctcatgtgccaaaatacctactagaaatgaaaagcttaatcctacccccagaacatatcctgaagagaggagacagtgaagcaatagcatatgcattctttcatcttgcacactggaagagagtggaaggggctttgaatcttttgcattgtacgtgggaaggcacttttcggatgatcccttatcccttggaaaaggggcacctattttatccttacccaatctgtacagaaacagcagaccgagagctgcttccatctttccatgaagtctcagtttacccaaagaaggagcttcccttctttattctctttactgctggattatgttccttcacagccatgctggccctcctgacacatcagttcccggaacttatgggggtcttcgcaaaagctttcctcagcactttgtttgcccccttaaactttgtcatggagaaagtggagagcatcctcccatccagtctgtggcaccagctaacacggatctgagagaagccctgtcctccactcacctcacccgccgctgccaccatctcctctgtgccaactccttgtggaccgcaagaaagcatgactttgaaaaagggaagccattccgagattttaaaatgttcatggactattccatattaaaagctgtttttgttgtacaaaattcactgatgttcagttctattttattttgccttcagaaaagaagaaagtcaaaaataaaacttttgtgtattacagcaa

SEQ ID NO: 187510 - DNA, 2127 bp, Homo sapiens
  Payload ID: 16910
  Gene Symbol: ST7
  Gene Name: suppression of tumorigenicity 7
  ENST ID: ENST00000393449
  CDS Start-End: 163-1881
cgcggcccgcgcgatttcccgccgagcccgcgtccccggcggcgggcgggctccgggggcgcccgggccgcggcggcggcggcggcgcgagctgcgcctccgggccggtgaatcatcccggcagacaccaagagccgcggcagcagagaggagcgctgaaacatggctgaagcggccacgggctttctggagcagctcaagtcctgcatagtttggtcttggacgtatctgtggaccgtgtggttcttcatcgtgctattcctggtctacatcctgcgggtgcctttgaaaatcaacgacaacttgagcacagtgagcatgtttttgaacacattaacaccgaagttctacgtggccctaacaggcacttcctcactaatatcagggcttattttgatatttgaatggtggtattttcgcaaatacggaacttcattcattgaacaagtctcagtaagccacttgcgcccccttctgggaggggttgacaacaactcttccaacaattctaattccagtaacggggactcagattccaataggcaaagtgtctcagaatgcaaagtatggcgaaatccactaaatttatttaggggtgctgaatacaatcggtatacttgggtgacaggacgagagcctcttacttactatgacatgaatctctctgcccaagaccaccagacattctttacttgtgactcggaccatctgcgtcccgcagatgcaataatgcagaaagcctggagagagagaaacccccaagctaggatttctgcagctcatgaagccttggagataaatgaaattaggtccagagttgaagttcccctaattgcttcctctaccatctgggagataaaattgttaccaaagtgtgcaactgcttatattctcttggctgaagaggaagcaacaaccattgctgaagcagaaaaattatttaagcaggccctgaaggctggagatggctgttaccgacgctctcagcagctacaacatcatggatcccagtatgaagcccaacatagacgagacaccaatgtcttggtgtacatcaaaagaaggctagcaatgtgtgccagaagactcgggaggaccagggaagcagtgaaaatgatgagagatttaatgaaggagttcccccttctgagtatgttcaatatccatgaaaaccttttagaagcccttctggaactacaagcatatgctgatgttcaggcagtcttagcaaagtatgatgatataagcttaccaaagtcagcaacaatatgctacacagctgctttgctcaaagcaagagctgtctctgacaaattctctcctgaggctgcatctcggcgggggctgagcacagcagagatgaatgcagtagaggccattcatagagctgtggaattcaatcctcatgtgccaaaatacctactagaaatgaaaagcttaatcctacccccagaacatatcctgaagagaggagacagtgaagcaatagcatatgcattctttcatcttgcacactggaagagagtggaaggggctttgaatcttttgcattcttttcggatgatcccttatcccttggaaaaggggcacctattttatccttacccaatctgtacagaaacagcagaccgagagctgcttccatctttccatgaagtctcagtttacccaaagaaggagcttcccttctttattctctttactgctggattatgttccttcacagccatgctggccctcctgacacatcagttcccggaacttatgggggtcttcgcaaaagctttcctcagcactttgtttgcccccttaaactttgtcatggagaaagtggagagcatcctcccatccagtctgtggcaccagctaacacggatctgagagaagccctgtcctccactcacctcacccgccgctgccaccatctcctctgtgccaactccttgtggaccgcaagaaagcatgactttgaaaaagggaagccattccgagattttaaaatgttcatggactattccatattaaaagctgtttttgttgtacaaaattcactgatgttcagttctattttattttgccttcagaaaagaagaaagtcaaaaataaaacttttgtgtattacagcaa

SEQ ID NO: 187511 - DNA, 2110 bp, Homo sapiens
  Payload ID: 16910
  Gene Symbol: ST7
  Gene Name: suppression of tumorigenicity 7
  Uniprot ID: Q9NRC1
  ENST ID: ENST00000393451
  CDS Start-End: 200-1864
ttagcaataaggctggagaaggaaaagccggcgcgcccgcggcccgcgcgatttcccgccgagcccgcgtccccggcggcgggcgggctccgggggcgcccgggccgcggcggcggcggcggcgcgagctgcgcctccgggccggtgaatcatcccggcagacaccaagagccgcggcagcagagaggagcgctgaaacatggctgaagcggccacgggctttctggagcagctcaagtcctgcatagtttggtcttggacgtatctgtggaccgtgtggttcttcatcgtgctattcctggtctacatcctgcgggtgcctttgaaaatcaacgacaacttgagcacagtgagcatgtttttgaacacattaacaccgaagttctacgtggccctaacaggcacttcctcactaatatcagggcttattttgatatttgaatggtggtattttcgcaaatacggaacttcattcattgaacaagtctcagtaagccacttgcgcccccttctgggaggggttgacaacaactcttccaacaattctaattccagtaacggggactcagattccaataggcaaagtgtctcagaatgcaaagtatggcgaaatccactaaatttatttaggggtgctgaatacaatcggtatacttgggtgacaggacgagagcctcttacttactatgacatgaatctctctgcccaagaccaccagacattctttacttgtgactcggaccatctgcgtcccgcagatgcaataatgcagaaagcctggagagagagaaacccccaagctaggatttctgcagctcatgaagccttggagataaatgagtgtgcaactgcttatattctcttggctgaagaggaagcaacaaccattgctgaagcagaaaaattatttaagcaggccctgaaggctggagatggctgttaccgacgctctcagcagctacaacatcatggatcccagtatgaagcccaacatagacgagacaccaatgtcttggtgtacatcaaaagaaggctagcaatgtgtgccagaagactcgggaggaccagggaagcagtgaaaatgatgagagatttaatgaaggagttcccccttctgagtatgttcaatatccatgaaaaccttttagaagcccttctggaactacaagcatatgctgatgttcaggcagtcttagcaaagtatgatgatataagcttaccaaagtcagcaacaatatgctacacagctgctttgctcaaagcaagagctgtctctgacaaattctctcctgaggctgcatctcggcgggggctgagcacagcagagatgaatgcagtagaggccattcatagagctgtggaattcaatcctcatgtgccaaaatacctactagaaatgaaaagcttaatcctacccccagaacatatcctgaagagaggagacagtgaagcaatagcatatgcattctttcatcttgcacactggaagagagtggaaggggctttgaatcttttgcattgtacgtgggaaggcacttttcggatgatcccttatcccttggaaaaggggcacctattttatccttacccaatctgtacagaaacagcagaccgagagctgcttccatctttccatgaagtctcagtttacccaaagaaggagcttcccttctttattctctttactgctggattatgttccttcacagccatgctggccctcctgacacatcagttcccggaacttatgggggtcttcgcaaaagctttcctcagcactttgtttgcccccttaaactttgtcatggagaaagtggagagcatcctcccatccagtctgtggcaccagctaacacggatctgagagaagccctgtcctccactcacctcacccgccgctgccaccatctcctctgtgccaactccttgtggaccgcaagaaagcatgactttgaaaaagggaagccattccgagattttaaaatgttcatggactattccatattaaaagctgtttttgttgtacaaaattcactgatgttcagttctattttattttgccttcagaaaagaagaaagtcaaaaataaaacttttgtgtattacagcaa

SEQ ID NO: 187512 - DNA, 549 bp, Homo sapiens
  Payload ID: 16910
  Gene Symbol: ST7
  Gene Name: suppression of tumorigenicity 7
  ENST ID: ENST00000420755
  CDS Start-End: 134-549
gtatgcgagcaaacaaggtaggaactggagtgcatgagcgctggagtcagctggccacttgggcactggcaggatcaaactccactcagacccactgccttccaccccttgtgggagggagcacccagtgagcatgtttttgaacacattaacaccgaagttctacgtggccctaacaggcacttcctcactaatatcagggcttattttgatatttgaatggtggtattttcgcaaatacggaacttcattcattgaacaagtctcagtaagccacttgcgcccccttctgggaggggttgacaacaactcttccaacaattctaattccagtaacggggactcagattccaataggcaaagtgtctcagaatgcaaagtatggcgaaatccactaaatttatttaggggtgctgaatacaatcggtatacttgggtgacaggacgagagcctcttacttactatgacatgaatctctctgcccaagaccaccagacattctttacttgtgactcggaccatctgcgtcccgcagatgcaataatgca

SEQ ID NO: 187513 - DNA, 1005 bp, Homo sapiens
  Payload ID: 16910
  Gene Symbol: ST7
  Gene Name: suppression of tumorigenicity 7
  ENST ID: ENST00000438863
  CDS Start-End: 195-353
aataaggctggagaaggaaaagccggcgcgcccgcggcccgcgcgatttcccgccgagcccgcgtccccggcggcgggcgggctccgggggcgcccgggccgcggcggcggcggcggcgcgagctgcgcctccgggccggtgaatcatcccggcagacaccaagagccgcggcagcagagaggagcgctgaaacatggctgaagcggccacgggctttctggagcagctcaagtcctgcatagtttggtcttggacgtatctgtggaccgtgtggttcttcatcgtgctattcctggtctacatcctgcgggtgcctttgaaaatcaacgacaacttgagcacagatatttgaatggtggtattttcgcaaatacggaacttcattcattgaacaagtctcagtaagccacttgcgcccccttctgggaggggttgacaacaactcttccaacaattctaattccagtaacggggactcagattccaataggcaaagtgtctcagaatgcaaagtatggcgaaatccactaaatttatttaggggtgctgaatacaatcggtatacttgggtgacaggacgagagcctcttacttactatgacatgaatctctctgcccaagaccaccagacattctttacttgtgactcggaccatctgcgtcccgcagatgcaataatgcagaaagcctggagagagagaaacccccaagctaggatttctgcagctcatgaagccttggagataaatgagtgtgcaactgcttatattctcttggctgaagaggaagcaacaaccattgctgaagcagaaaaattatttaagcaggccctgaaggctggagatggctgttaccgacgctctcagcagctacaacatcatggatcccagtatgaagcccaacatagacgagacaccaatgtcttggtgtacatcaaaagaaggctagcaatgtgtgccagaagactcgggaggaccagggaagcagtgaaaatgatgagagat

SEQ ID NO: 187514 - DNA, 577 bp, Homo sapiens
  Payload ID: 16910
  Gene Symbol: ST7
  Gene Name: suppression of tumorigenicity 7
  ENST ID: ENST00000417919
  CDS Start-End: 392-577
acaccaagagccgcggcagcagagaggagcgctgaaacatggctgaagcggccacgggctttctggagcagctcaagtcctgcatagtttggtcttggacgtatctgtggaccgtgtggttcttcatcgtgctattcctggtctacatcctgcgggtgcctttgaaaatcaacgacaacttgagcacagagaaaaatatttgttgaatgagtgaacgtgggatctctgttcattttggtatattactttgctttctgggctgagctcaggacagatgccaaagcctttccctctaatgacatcaaagccctacttctaaaaccagactggatgtgattcccttctacaaacagattcagtaaagaaatgtgaatactcccacaaaaagcccatgagcatgtttttgaacacattaacaccgaagttctacgtggccctaacaggcacttcctcactaatatcagggcttattttgatatttgaatggtggtattttcgcaaatacggaacttcattcattgaacaagtctcagtaagccacttgcgcccccttctgggaggggttgacaacaactct

SEQ ID NO: 187515 - DNA, 805 bp, Homo sapiens
  Payload ID: 16910
  Gene Symbol: ST7
  Gene Name: suppression of tumorigenicity 7
  ENST ID: ENST00000443979
  CDS Start-End: 75-269
gagctgcgcctccgggccggtgaatcatcccggcagacaccaagagccgcggcagcagagaggagcgctgaaacatggctgaagcggccacgggctttctggagcagctcaagtcctgcatagtttggtcttggacgtatctgtggaccgtgtggttcttcatcgtgctattcctggtctacatcctgcgggtgcctttgaaaatcaacgacaacttgagcacagttaatgaaggagttcccccttctgagtatgttcaatatccatgaaaaccttttagaagcccttctggaactacaagcatatgctgatgttcaggcagtcttagcaaagtatgatgatataagcttaccaaagtcagcaacaatatgctacacagctgctttgctcaaagcaagagctgtctctgacaaattctctcctgaggctgcatctcggcgggggctgagcacagcagagatgaatgcagtagaggccattcatagagctgtggaattcaatcctcatgtgccaaaatacctactagaaatgaaaagcttaatcctacccccagaacatatcctgaagagaggagacagtgaagcaatagcatatgcattctttcatcttgcacactggaagagagtggaaggggctttgaatcttttgcattgtacgtgggaaggcacttttcggatgatcccttatcccttggaaaaggggcacctattttatccttacccaatctgtacagaaacagcagaccgagagctgcttccatctttccatgaagtctcagtttacccaaagaaggagcttcccttct

SEQ ID NO: 187516 - DNA, 579 bp, Homo sapiens
  Payload ID: 16910
  Gene Symbol: ST7
  Gene Name: suppression of tumorigenicity 7
  ENST ID: ENST00000434836
  CDS Start-End: 507-579
gtcttactgctacagcagggctggggattgcagtatccgctgttgctgctgctcccagtcctgcccctgctgctacctagtccagcctcaccgcatcccagaagaggcacgtcggccttcatttgcctagtggattttcaaaagcagctcttcggtttttggtgctgttaagagaccttgcatttcaatcacaccgggagaaaactgaagctcgtaacaggagaatctggcagctggacacagcttggactgcattgtctggcttcatgacccctgctgtgtagccggctcatctcttcactctcacatgtacactctcctcgcttttctttcttttttttttcccttttctttcttctaatttttaaaaagcagcctctggagccagccatgtttggcactgaatcttcatggtggagatcttcattatcaagtttcctgtaactaaaagggaacagatcgtctgagatcttgctccacttgtccttgagggttattaagtgagcatgtttttgaacacattaacaccgaagttctacgtggccctaacaggcacttcctcactaatatcagggctta

SEQ ID NO: 187517 - DNA, 1694 bp, Homo sapiens
  Payload ID: 16910
  Gene Symbol: ST7
  Gene Name: suppression of tumorigenicity 7
  ENST ID: ENST00000446490
  CDS Start-End: 21-1694
gcagagaggagcgctgaaacatggctgaagcggccacgggctttctggagcagctcaagtcctgcatagtttggtcttggacgtatctgtggaccgtgtggttcttcatcgtgctattcctggtctacatcctgcgggtgcctttgaaaatcaacgacaacttgagcacagtgagcatgtttttgaacacattaacaccgaagttctacgtggccctaacaggcacttcctcactaatatcagggcttattttgatatttgaatggtggtattttcgcaaatacggaacttcattcattgaacaagtctcagtaagccacttgcgcccccttctgggaggggttgacaacaactcttccaacaattctaattccagtaacggggactcagattccaataggcaaagtgtctcagaatgcaaagtatggcgaaatccactaaatttatttaggggtgctgaatacaatcggtatacttgggtgacaggacgagagcctcttacttactatgacatgaatctctctgcccaagaccaccagacattctttacttgtgactcggaccatctgcgtcccgcagatgcaataatgcagaaagcctggagagagagaaacccccaagctaggatttctgcagctcatgaagccttggagataaatgagtgtgcaactgcttatattctcttggctgaagaggaagcaacaaccattgctgaagcagaaaaattatttaagcaggccctgaaggctggagatggctgttaccgacgctctcagcagctacaacatcatggatcccagtatgaagcccaacatagacgagacaccaatgtcttggtgtacatcaaaagaaggctagcaatgtgtgccagaagactcgggaggaccagggaagcagtgaaaatgatgagagatttaatgaaggagttcccccttctgagtatgttcaatatccatgaaaaccttttagaagcccttctggaactacaagcatatgctgatgttcaggcagtcttagcaaagtatgatgatataagcttaccaaagtcagcaacaatatgctacacagctgctttgctcaaagcaagagctgtctctgacaaattctctcctgaggctgcatctcggcgggggctgagcacagcagagatgaatgcagtagaggccattcatagagctgtggaattcaatcctcatgtgccaaaatacctactagaaatgaaaagcttaatcctacccccagaacatatcctgaagagaggagacagtgaagcaatagcatatgcattctttcatcttgcacactggaagagagtggaaggggctttgaatcttttgcattgtacgtgggaaggcattcctcagcactttgtttgcccccttaaactttgtcatggagaaagtggagagcatcctcccatccagtctgtggcaccagctaacacggatctgagagaagccctgtcctccactcacctcacccgccgctgccaccatctcctctgtgccaactccttgtggaccgcaagaaagcatgactttgaaaaagggaagccattccgagattttaaaatgttcatggactattccatattaaaagctgtttttgttgtacaaaattcactgatgttcagttctattttattttgccttcagaaaagaagaaagtcaaaaataaaacttttgtgtattaca

SEQ ID NO: 187518 - DNA, 1956 bp, Homo sapiens
  Payload ID: 16910
  Gene Symbol: ST7
  Gene Name: suppression of tumorigenicity 7
  ENST ID: ENST00000432298
  CDS Start-End: 115-1710
gtcacatggcaggaggcttccccagaacggttcgtcagtccagggagccgtttcattttctggctgatagagttgtacttggaaaatactcagtttcctgcttactgcttcattatggattatacagtgagcatgtttttgaacacattaacaccgaagttctacgtggccctaacaggcacttcctcactaatatcagggcttattttgatatttgaatggtggtattttcgcaaatacggaacttcattcattgaacaagtctcagtaagccacttgcgcccccttctgggaggggttgacaacaactcttccaacaattctaattccagtaacggggactcagattccaataggcaaagtgtctcagaatgcaaagtatggcgaaatccactaaatttatttaggggtgctgaatacaatcggtatacttgggtgacaggacgagagcctcttacttactatgacatgaatctctctgcccaagaccaccagacattctttacttgtgactcggaccatctgcgtcccgcagatgcaataatgcagaaagcctggagagagagaaacccccaagctaggatttctgcagctcatgaagccttggagataaatgaaattaggtccagagttgaagttcccctaattgcttcctctaccatctgggagataaaattgttaccaaagtgtgcaactgcttatattctcttggctgaagaggaagcaacaaccattgctgaagcagaaaaattatttaagcaggccctgaaggctggagatggctgttaccgacgctctcagcagctacaacatcatggatcccagtatgaagcccaacatagacgagacaccaatgtcttggtgtacatcaaaagaaggctagcaatgtgtgccagaagactcgggaggaccagggaagcagtgaaaatgatgagagatttaatgaaggagttcccccttctgagtatgttcaatatccatgaaaaccttttagaagcccttctggaactacaagcatatgctgatgttcaggcagtcttagcaaagtatgatgatataagcttaccaaagtcagcaacaatatgctacacagctgctttgctcaaagcaagagctgtctctgacaaattctctcctgaggctgcatctcggcgggggctgagcacagcagagatgaatgcagtagaggccattcatagagctgtggaattcaatcctcatgtgccaaaatacctactagaaatgaaaagcttaatcctacccccagaacatatcctgaagagaggagacagtgaagcaatagcatatgcattctttcatcttgcacactggaagagagtggaaggggctttgaatcttttgcattgtacgtgggaaggcacttttcggatgatcccttatcccttggaaaaggggcacctattttatccttacccaatctgtacagaaacagcagaccgagagctgcttccatctttccatgaagtctcagtttacccaaagaaggagcttcccttctttattctctttactgctggattatgttccttcacagccatgctggccctcctgacacatcagttcccggaacttatgggggtcttcgcaaaagctttcctcagcactttgtttgcccccttaaactttgtcatggagaaagtggagagcatcctcccatccagtctgtggcaccagctaacacggatctgagagaagccctgtcctccactcacctcacccgccgctgccaccatctcctctgtgccaactccttgtggaccgcaagaaagcatgactttgaaaaagggaagccattccgagattttaaaatgttcatggactattccatattaaaagctgtttttgttgtacaaaattcactgatgttcagttctattttattttgccttcagaaaagaagaaagtcaaaaataaaacttttgtgtattacagcaa

SEQ ID NO: 187519 - DNA, 542 bp, Homo sapiens
  Payload ID: 16910
  Gene Symbol: ST7
  Gene Name: suppression of tumorigenicity 7
  ENST ID: ENST00000449366
  CDS Start-End: 282-542
cgtttcattttctggctgatagagttgtacttggaaaatactcagtttcctgcttactgcttcattatggattatacagagaaaaatatttgttgaatgagtgaacgtgggatctctgttcattttggtatattactttgctttctgggctgagctcaggacagatgccaaagcctttccctctaatgacatcaaagccctacttctaaaaccagactggatgtgattcccttctacaaacagattcagtaaagaaatgtgaatactcccacaaaaagcccatgagcatgtttttgaacacattaacaccgaagttctacgtggccctaacaggcacttcctcactaatatcagggcttattttgatatttgaatggtggtattttcgcaaatacggaacttcattcattgaacaagtctcagtaagccacttgcgcccccttctgggaggggttgacaacaactcttccaacaattctaattccagtaacggggactcagattccaataggcaaagtgtctcagaatgcaaagtatggcga

SEQ ID NO: 187520 - DNA, 1887 bp, Homo sapiens
  Payload ID: 16910
  Gene Symbol: ST7
  Gene Name: suppression of tumorigenicity 7
  ENST ID: ENST00000422922
  CDS Start-End: 115-1641
gtcacatggcaggaggcttccccagaacggttcgtcagtccagggagccgtttcattttctggctgatagagttgtacttggaaaatactcagtttcctgcttactgcttcattatggattatacagtgagcatgtttttgaacacattaacaccgaagttctacgtggccctaacaggcacttcctcactaatatcagggcttattttgatatttgaatggtggtattttcgcaaatacggaacttcattcattgaacaagtctcagtaagccacttgcgcccccttctgggaggggttgacaacaactcttccaacaattctaattccagtaacggggactcagattccaataggcaaagtgtctcagaatgcaaagtatggcgaaatccactaaatttatttaggggtgctgaatacaatcggtatacttgggtgacaggacgagagcctcttacttactatgacatgaatctctctgcccaagaccaccagacattctttacttgtgactcggaccatctgcgtcccgcagatgcaataatgcagaaagcctggagagagagaaacccccaagctaggatttctgcagctcatgaagccttggagataaatgagtgtgcaactgcttatattctcttggctgaagaggaagcaacaaccattgctgaagcagaaaaattatttaagcaggccctgaaggctggagatggctgttaccgacgctctcagcagctacaacatcatggatcccagtatgaagcccaacatagacgagacaccaatgtcttggtgtacatcaaaagaaggctagcaatgtgtgccagaagactcgggaggaccagggaagcagtgaaaatgatgagagatttaatgaaggagttcccccttctgagtatgttcaatatccatgaaaaccttttagaagcccttctggaactacaagcatatgctgatgttcaggcagtcttagcaaagtatgatgatataagcttaccaaagtcagcaacaatatgctacacagctgctttgctcaaagcaagagctgtctctgacaaattctctcctgaggctgcatctcggcgggggctgagcacagcagagatgaatgcagtagaggccattcatagagctgtggaattcaatcctcatgtgccaaaatacctactagaaatgaaaagcttaatcctacccccagaacatatcctgaagagaggagacagtgaagcaatagcatatgcattctttcatcttgcacactggaagagagtggaaggggctttgaatcttttgcattgtacgtgggaaggcacttttcggatgatcccttatcccttggaaaaggggcacctattttatccttacccaatctgtacagaaacagcagaccgagagctgcttccatctttccatgaagtctcagtttacccaaagaaggagcttcccttctttattctctttactgctggattatgttccttcacagccatgctggccctcctgacacatcagttcccggaacttatgggggtcttcgcaaaagctttcctcagcactttgtttgcccccttaaactttgtcatggagaaagtggagagcatcctcccatccagtctgtggcaccagctaacacggatctgagagaagccctgtcctccactcacctcacccgccgctgccaccatctcctctgtgccaactccttgtggaccgcaagaaagcatgactttgaaaaagggaagccattccgagattttaaaatgttcatggactattccatattaaaagctgtttttgttgtacaaaattcactgatgttcagttctattttattttgccttcagaaaagaagaaagtcaaaaataaaacttttgtgtattacagcaa

SEQ ID NO: 187521 - DNA, 531 bp, Homo sapiens
  Payload ID: 16910
  Gene Symbol: ST7
  Gene Name: suppression of tumorigenicity 7
  ENST ID: ENST00000421345
  CDS Start-End: 295-531
agagctggaatttctgagggtttcggttgcagttttcagtgatctttgctcgtctcccttccctgtaaagctacatatgctcagcaagtgccgcgtgcctcccatccttggtcggtggtaaatgcaggaggtaattaacaggatcttcacaaacttggagccagcccactgagtcgttaaaaaaacacccgcaaagaaaacacacgagccttaacactccagagagttccgaaacacaaagtaaatttcgagctaagggttacagtcctttaaatctggaaatttcaagtgagcatgtttttgaacacattaacaccgaagttctacgtggccctaacaggcacttcctcactaatatcagggcttattttgatatttgaatggtggtattttcgcaaatacggaacttcattcattgaacaagtctcagtaagccacttgcgcccccttctgggaggggttgacaacaactcttccaacaattctaattccagtaacggggactcagattccaataggcaaagtgtctca

SEQ ID NO: 187522 - DNA, 1689 bp, Homo sapiens
  Payload ID: 16910
  Gene Symbol: ST7
  Gene Name: suppression of tumorigenicity 7
  ENST ID: ENST00000490039
  CDS Start-End: 6-1689
tgagcatgtttttgaacacattaacaccgaagttctacgtggccctaacaggcacttcctcactaatatcagggcttattttgatatttgaatggtggtattttcgcaaatacggaacttcattcattgaacaagtctcagtaagccacttgcgcccccttctgggaggggttgacaacaactcttccaacaattctaattccagtaacggggactcagattccaataggcaaagtgtctcagaatgcaaagtatggcgaaatccactaaatttatttaggggtgctgaatacaatcggtatacttgggtgacaggacgagagcctcttacttactatgacatgaatctctctgcccaagaccaccagacattctttacttgtgactcggaccatctgcgtcccgcagatgcaataatgcagaaagcctggagagagagaaacccccaagctaggatttctgcagctcatgaagccttggagataaatgaaattaggtccagagttgaagttcccctaattgcttcctctaccatctgggagataaaattgttaccaaagtgtgcaactgcttatattctcttggctgaagaggaagcaacaaccattgctgaagcagaaaaattatttaagcaggccctgaaggctggagatggctgttaccgacgctctcagcagctacaacatcatggatcccagtatgaagcccaacatagacgagacaccaatgtcttggtgtacatcaaaagaaggctagcaatgtgtgccagaagactcgggaggaccagggaagcagtgaaaatgatgagagatttaatgaaggagttcccccttctgagtatgttcaatatccatgaaaaccttttagaagcccttctggaactacaagcatatgctgatgttcaggcagtcttagcaaagtatgatgatataagcttaccaaagtcagcaacaatatgctacacagctgctttgctcaaagcaagagctgtctctgacaaattctctcctgaggctgcatctcggcgggggctgagcacagcagagatgaatgcagtagaggccattcatagagctgtggaattcaatcctcatgtgccaaaatacctactagaaatgaaaagcttaatcctacccccagaacatatcctgaagagaggagacagtgaagcaatagcatatgcattctttcatcttgcacactggaagagagtggaaggggctttgaatcttttgcattgtacgtgggaaggcacttttcggatgatcccttatcccttggaaaaggggcacctattttatccttacccaatctgtacagaaacagcagaccgagagctgcttccatttcctcagcactttgtttgcccccttaaactttgtcatggagaaagtggagagcatcctcccatccagtctgtggcaccagctaacacggatctgagagaagccctgtcctccactcacctcacccgccgctgccaccatctcctctgtgccaactccttgtggaccgcaagaaagcatgactttgaaaaagggaagccattccgagattttaaaatgttcatggactattccatattaaaagctgtttttgttgtacaaaattcactgatgttcagttctattttattttgccttcagaaaagaagaaagtcaaaaataaaacttttgtgtattacagcaa

SEQ ID NO: 187523 - DNA, 780 bp, Homo sapiens
  Payload ID: 16910
  Gene Symbol: ST7
  Gene Name: suppression of tumorigenicity 7
  ENST ID: ENST00000477742
  CDS Start-End: 488-780
ttgcagtatccgctgttgctgctgctcccagtcctgcccctgctgctacctagtccagcctcaccgcatcccagaagaggcacgtcggccttcatttgcctagtggattttcaaaagcagctcttcggtttttggtgctgttaagagaccttgcatttcaatcacaccgggagaaaactgaagctcgtaacaggagaatctggcagctggacacagcttggactgcattgtctggcttcatgacccctgctgtgtagccggctcatctcttcactctcacatgtacactctcctcgcttttctttcttttttttttcccttttctttcttctaatttttaaaaagcagcctctggagccagccatgtttggcactgaatcttcataactctactcagctcaaaatacagaacatttccatttcccctggaagttctcttgtggcctttcccagtcaatattatttcccctcttcatgaaaagtgagcatgtttttgaacacattaacaccgaagttctacgtggccctaacaggcacttcctcactaatatcagggcttattttgatatttgaatggtggtattttcgcaaatacggaacttcattcattgaacaagtctcagtaagccacttgcgcccccttctgggaggggttgacaacaactcttccaacaattctaattccagtaacggggactcagattccaataggcaaagtgtctcagaatgcaaagtatggcgaaatccactaaatttatttaggggtgctgaatacaatcg

SEQ ID NO: 187524 - DNA, 2155 bp, Homo sapiens
  Payload ID: 16910
  Gene Symbol: ST7
  Gene Name: suppression of tumorigenicity 7
  ENST ID: ENST00000465133
  CDS Start-End: 382-1137
ctacagcagggctggggattgcagtatccgctgttgctgctgctcccagtcctgcccctgctgctacctagtccagcctcaccgcatcccagaagaggcacgtcggccttcatttgcctagtggattttcaaaagcagctcttcggtttttggtgctgttaagagaccttgcatttcaatcacaccgggagaaaactgaagctcgtaacaggagaatctggcagctggacacagcttggactgcattgtctggcttcatgacccctgctgtgtagccggctcatctcttcactctcacatgtacactctcctcgcttttctttcttttttttttcccttttctttcttctaatttttaaaaagcagcctctggagccagccatgtttggcactgaatcttcattgagcatgtttttgaacacattaacaccgaagttctacgtggccctaacaggcacttcctcactaatatcagggcttattttgatatttgaatggtggtattttcgcaaatacggaacttcattcattgaacaagtctcagtaagccacttgcgcccccttctgggaggggttgacaacaactcttccaacaattctaattccagtaacggggactcagattccaataggcaaagtgtctcagaatgcaaagtatggcgaaatccactaaatttatttaggggtgctgaatacaatcggtatacttgggtgacaggacgagagcctcttacttactatgacatgaatctctctgcccaagaccaccagacattctttacttgtgactcggaccatctgcgtcccgcagatgcaataatgcagaaagcctggagagagagaaacccccaagctaggatttctgcagctcatgaagccttggagataaatgagtgtgcaactgcttatattctcttggctgaagaggaagcaacaaccattgctgaagcagaaaaattatttaagcaggccctgaaggctggagatggctgttaccgacgctctcagcagctacaacatcatggatcccagtatgaagcccaacatagtaaggtttcctgcaggttgatgcattgggggatcagaattgtaaaaattattaatcagagcaaatttttagtccagttcaaaatatgattctcctagacaagagaaaatattggcttttgctttgtttttattaattttcttctttcctataagtgcagttagtaaataattaacttacagcttcattgctgtttatattcacattctctttcctgcccatagattcctaaccgcagaaataaatggcagtaacctttaatagtaaccttttttcctcctgagttcttacatatttctgttcatcagttgcttctgctcacaactttaaaacccagatgggaaacaggatttaaattagccatagtgttagcaaaggttttatcttatagatcttctacaacatggattgaaataggacaattaagaatataagttattggtgattgtatcagcatttatctcttacataagaaacattggtattggcttccagagagaaagagccatgagctcctagttatttatcttttttatattaaaataatgcctttttaaactccccaaaaaacgcctttttaaatttaagataactctttaaaatctgagacctttcacttcagtatactaaactgaaagccaatgacatttcgtgggggaacagtatagaaacaaaacaacgaaatcatttctggaattccctgagcccctcgactcatcagtttgtttgttgttgaagcagaaatttagcagtccttgtggtaagagagttaagtatttccatggtccaaccaaaatttgagagtatttccatggtccaaccaaaattcacaaagttattttgtttctcacttagtttctccctcctgaaacttagagagtagggatgtatctccttcatatttgagattataaaattaaatgttaacgttaaacttgggtttggtgtagaaactgactgcattagtccccataactaaggtgccagcaaaatctttgcattatagcctgcatatacatgagtatgtcctcacatgtaccacatcaattcctaagtttttatttttattctgcagcatatatatgctaataaagtctctaatcacca

SEQ ID NO: 187525 - DNA, 1866 bp, Homo sapiens
  Payload ID: 16911
  Gene Symbol: ST7L
  Gene Name: suppression of tumorigenicity 7 like
  Uniprot ID: Q8TDW4
  ENST ID: ENST00000343210
  CDS Start-End: 77-1744
actatcccaggattcccgactcccggtttcctgtccttctcccctcccagctcctggcgcctgcgatagcggcaagatggcggaccgtggcggcgtgggtgaagccgcagctgttggagcgtctcctgcatctgtccctggcctaaacccgacgctaggctggagggagcgactgcgggccgggctggcggggactggggcctcgttgtggttcgtggcggggctggggctgctttacgccctgaggatccctttgaggctgtgtgagaatttggcagcggtgactgtatttttaaattcattgacacccaaattctatgtggcacttacagggacctcttcattgatatcaggactaatatttatatttgaatggtggtacttccataagcatggcacatcttttattgagcaagtatctgtaagccatttgcaaccactgatgggaggaacagagagcagcatttcagaaccaggttctccttcgaggaacagagaaaatgaaaccagcagacagaatttgtcagaatgtaaggtatggagaaaccctctaaatcttttcagaggagcagaatataggagatacacttgggtgactggtaaagagccacttacatactatgacatgaacctgtcagctcaggaccatcagacctttttcacctgtgacacagattttttacgtccttcagacacagttatgcagaaggcttggagggaaagaaatcctccagctcgaatcaaagcagcctatcaagctttagaattaaacaatgactgtgccactgcatatgttctactggctgaggaagaagcaacaactattgtagatgctgaaaggttatttaaacaggcactcaaggcaggagaaacaatttataggcagtcacagcagtgccagcaccaaagtcctcagcatgaagctcaactgaggagagataccaatgtactggtatatattaaaagaagattggcaatgtgtgcaagaaaattaggaagaataagagaagcagtaaaaataatgagagatttgatgaaagaatttcctcctcttaccatgttgaacatccatgaaaatctcttagaatcacttttagaattacaggcctatccagatgttcaggcagtcctagcaaaatatgatgatataagccttccaaagtcagcagcaatctgttacacagcagcactgttgaagacaaggactgtttcagaaaaattctctccagaaacagcctccagaagaggattaagcacagcagaaattaatgccgtggaagcaattcatagagctgtggaatttaatcctcatgttccaaaatatttattagagatgaaaagtttaattttacctccagaacacattctgaaacggggtgatagtgaagcaattgcctatgctttctttcatcttcagcactggaaacgaatagaaggtgctcttaatctgttacagtgtacatgggaaggcacttttagaatgattccatacccgttagagaaaggacatctattttacccttatcccagctgcacagagacggctgatagagagctattacctacctttcatcatgtttctgtttacccaaaaaaggagcttcctttgttcatccatttcacagcaggattttgctcttctacagcaatgatagccattctcactcaccagtttcctgaaatcatgggtatttttgctaaagctgtaagtatgatctcaaggacttgtgtagattatttgtaaaacacacaagaaaccatctctgatctgcctgtgctaacccagctgaacaatggaagatatttgttgtaaattaaaggaattgatttgtatatagttgctgccataaatacatcaaacataaa

SEQ ID NO: 187526 - DNA, 4528 bp, Homo sapiens
  Payload ID: 16911
  Gene Symbol: ST7L
  Gene Name: suppression of tumorigenicity 7 like
  Uniprot ID: Q8TDW4
  ENST ID: ENST00000358039
  CDS Start-End: 306-2033
cggggggggggcggtgtgaaaggtgaccctcatttcgtttggaagcggtaacacttcggggtcacatctcagtccagttcctccagaataggcgctgctgtccgccccttccctgccccacgaaagaacaggtagccccaatcttgagacacgctcctccaccttcgaaatcttctcggtcccggttccccaggactcagccttcacagaggccaacttcaggtccgccactatcccaggattcccgactcccggtttcctgtccttctcccctcccagctcctggcgcctgcgatagcggcaagatggcggaccgtggcggcgtgggtgaagccgcagctgttggagcgtctcctgcatctgtccctggcctaaacccgacgctaggctggagggagcgactgcgggccgggctggcggggactggggcctcgttgtggttcgtggcggggctggggctgctttacgccctgaggatccctttgaggctgtgtgagaatttggcagcggtgactgtatttttaaattcattgacacccaaattctatgtggcacttacagggacctcttcattgatatcaggactaatatttatatttgaatggtggtacttccataagcatggcacatcttttattgagcaagtatctgtaagccatttgcaaccactgatgggaggaacagagagcagcatttcagaaccaggttctccttcgaggaacagagaaaatgaaaccagcagacagaatttgtcagaatgtaaggtatggagaaaccctctaaatcttttcagaggagcagaatataggagatacacttgggtgactggtaaagagccacttacatactatgacatgaacctgtcagctcaggaccatcagacctttttcacctgtgacacagattttttacgtccttcagacacagttatgcagaaggcttggagggaaagaaatcctccagctcgaatcaaagcagcctatcaagctttagaattaaacaatgactgtgccactgcatatgttctactggctgaggaagaagcaacaactattgtagatgctgaaaggttatttaaacaggcactcaaggcaggagaaacaatttataggcagtcacagcagtgccagcaccaaagtcctcagcatgaagctcaactgaggagagataccaatgtactggtatatattaaaagaagattggcaatgtgtgcaagaaaattaggaagaataagagaagcagtaaaaataatgagagatttgatgaaagaatttcctcctcttaccatgttgaacatccatgaaaatctcttagaatcacttttagaattacaggcctatccagatgttcaggcagtcctagcaaaatatgatgatataagccttccaaagtcagcagcaatctgttacacagcagcactgttgaagacaaggactgtttcagaaaaattctctccagaaacagcctccagaagaggattaagcacagcagaaattaatgccgtggaagcaattcatagagctgtggaatttaatcctcatgttccaaaatatttattagagatgaaaagtttaattttacctccagaacacattctgaaacggggtgatagtgaagcaattgcctatgctttctttcatcttcagcactggaaacgaatagaaggtgctcttaatctgttacagtgtacatgggaaggcacttttagaatgattccatacccgttagagaaaggacatctattttacccttatcccagctgcacagagacggctgatagagagctattacctacctttcatcatgtttctgtttacccaaaaaaggagcttcctttgttcatccatttcacagcaggattttgctcttctacagcaatgatagccattctcactcaccagtttcctgaaatcatgggtatttttgctaaagctgtgctgggactctggtgcccccaaccctgggcatcctcaggctttgaggagaatacacaggatttgaagtcagaagacctaggtttgagttctggctgagccacgcactgttcatgtgaccttggacaaatcaccaaatttttctgaacagcatctgtaaagtgacagtaacccctacctcacagggttgttgtgaggattacatatatgctaaagcattttgcatatgaaaaagcttcttatgaatattgttattcctaggcaaaccccccttggaagctgtcaaaaaggacaactgtagatgaaattgtcttccttttttcttcattcagcttagcctttctgtttggccagggctacttacaggggctgttggggttgaagtcaagtcaccgcattttggctcctttggtcaaagagaaagaactctaatgtccagctgctccatcgatatactcatagaatggaagtgagcaaaggaaaattttaagccaggatagttaaccgttagggggccagtgggagaatgcttgccttgcatttgcacatccagaatgactaaaacatcttaagtaaatgaggaatagccaccgagatgctcagagataatataagccatgagtgggaagtgggaaaatgagtttgtcaacgccctctcttttctatccctttacctttgaggtcagggacagggcatattactgacaccccactggctattgccctatacctgccaatcacccaaagaaaataatagcttctgagaaagctcaattcactgtagcaactgtgatatatttaccctaataaagccaccacttggtcttttccagtgcttctctcttatggagatcatccctggaatccaaagctctccagttttctaacccagttaagagttaaaaacaaccacaggtcatgagcagtaggcttggcagttataccccatgcagtcataggagactgctccatcattctcagcacatagggtgcacatctcactatctctggcatgaaccagccttgcgaacttatacagtctcagccactctgctttgatggtaattcttcaccactgatctctcctcaccatgcccttcctgcatccttcccccaaccacccaccagaggagttctggtccccaaaccaaagagttgcctgcaggttggtaatgtgactttgtagatattccttgattaaagccagaccctattggtatcctttttgaagtactggatcgaaatctaattgcttttttttttaattgttggggagaggaggatgagcagaactcctatgcagcctgagagaagttctctatgtgtctgtatatgtacacctctgtgtgtgtgtgtgtaacctcatggttgtgctcaggctgacagggagggcaaagagtgaaaaggaagcatctctttcttgttatccaacattgcttcaaagatgcccaacccccgtagtagcaggcagttcccaagtggagggtcggggcagaggcctccaccaaggccatcaataaccaggtgtgagctacaggtctctgtgtaatgtgaagctctcccgtatttcatttctgcacccagggggcggctctgcaggattgcttacggagaactctgtgtctggcacctctctccacaaggcccaggcgcccagggtcccaccgacctgcccaggaatgcatcacattgttctctggtgctgtaatttggctgcaggagctaggctgaatgcctcccagggatgagaaacatactctccctggcgtcctcccttcgccccagctagcttgagcttctgccctatgaccactgagtgcatttaaataaaaacctcagaaagactgaggaaaaaaaaatcctaattatctctcttctgttaagccatgtagagactcgtgtcctgagtgggtctgagaatttggcaaagacttactggttggtgttcttgataagggaagtgagacaaaggagaagaaattactccctgcaacaggaggaatagaaatgaagcagtgagtgttcagaaattagatctacaagaagttttgcaaacagaccctcagggccaggcaatgtttgtttttgttttttgttttttgtttttttttttaatctgaagcccctgattttatttttccagcatcactctaaggaagagtgtggattagtgccattattcagggctggtattaataaaagttagcttttatctgcagggctaggttaaggctggcattcttacttttacattaaaaaaactggctacaggctgcgcagctgaggtacttcagtcatgtgccttctctaaaggattcttagatccttaaaatatatagtatgttttaagtttgtatctaaatagcacttactgtaatgtattatacctaaatgtttattaaaagttagaagaaatgagtaccaacaggaaggaatggaagagaggagaggggctaagacattgctgatctgagggacagacctctatcaaatagaagagggctgggagaaggggtgattagaagcagagtgagggaactaaatggagccctgactgcaccaaataaagttctcattttgctgcttgttccaaa

SEQ ID NO: 187527 - DNA, 4206 bp, Homo sapiens
  Payload ID: 16911
  Gene Symbol: ST7L
  Gene Name: suppression of tumorigenicity 7 like
  Uniprot ID: Q8TDW4
  ENST ID: ENST00000360743
  CDS Start-End: 77-1711
actatcccaggattcccgactcccggtttcctgtccttctcccctcccagctcctggcgcctgcgatagcggcaagatggcggaccgtggcggcgtgggtgaagccgcagctgttggagcgtctcctgcatctgtccctggcctaaacccgacgctaggctggagggagcgactgcgggccgggctggcggggactggggcctcgttgtggttcgtggcggggctggggctgctttacgccctgaggatccctttgaggctgtgtgagaatttggcagcggtgactgtatttttaaattcattgacacccaaattctatgtggcacttacagggacctcttcattgatatcaggactaatatttatatttgaatggtggtacttccataagcatggcacatcttttattgagcaagtatctgtaagccatttgcaaccactgatgggaggaacagagagcagcatttcagaaccaggttctccttcgaggaacagagaaaatgaaaccagcagacagaatttgtcagaatgtaaggtatggagaaaccctctaaatcttttcagaggagcagaatataggagatacacttgggtgactggtaaagagccacttacatactatgacatgaacctgtcagctcaggaccatcagacctttttcacctgtgacacagattttttacgtccttcagacacagttatgcagaaggcttggagggaaagaaatcctccagctcgaatcaaagcagcctatcaagctttagaattaaacaatgactgtgccactgcatatgttctactggctgaggaagaagcaacaactattgtagatgctgaaaggttatttaaacaggcactcaaggcaggagaaacaatttataggcagtcacagcagtgccagcaccaaagtcctcagcatgaagctcaactgaggagagataccaatgtactggtatatattaaaagaagattggcaatgtgtgcaagaaaattaggaagaataagagaagcagtaaaaataatgagagatttgatgaaagaatttcctcctcttaccatgttgaacatccatgaaaatctcttagaatcacttttagaattacaggcctatccagatgttcaggcagtcctagcaaaatatgatgatataagccttccaaagtcagcagcaatctgttacacagcagcactgttgaagacaaggactgtttcagaaaaattctctccagaaacagcctccagaagaggattaagcacagcagaaattaatgccgtggaagcaattcatagagctgtggaatttaatcctcatgttccaaaatatttattagagatgaaaagtttaattttacctccagaacacattctgaaacggggtgatagtgaagcaattgcctatgctttctttcatcttcagcactggaaacgaatagaaggtgctcttaatctgttacagtgtacatgggaaggcacctttcatcatgtttctgtttacccaaaaaaggagcttcctttgttcatccatttcacagcaggattttgctcttctacagcaatgatagccattctcactcaccagtttcctgaaatcatgggtatttttgctaaagctgtgctgggactctggtgcccccaaccctgggcatcctcaggctttgaggagaatacacaggatttgaagtcagaagacctaggtttgagttctggctgagccacgcactgttcatgtgaccttggacaaatcaccaaatttttctgaacagcatctgtaaagtgacagtaacccctacctcacagggttgttgtgaggattacatatatgctaaagcattttgcatatgaaaaagcttcttatgaatattgttattcctaggcaaaccccccttggaagctgtcaaaaaggacaactgtagatgaaattgtcttccttttttcttcattcagcttagcctttctgtttggccagggctacttacaggggctgttggggttgaagtcaagtcaccgcattttggctcctttggtcaaagagaaagaactctaatgtccagctgctccatcgatatactcatagaatggaagtgagcaaaggaaaattttaagccaggatagttaaccgttagggggccagtgggagaatgcttgccttgcatttgcacatccagaatgactaaaacatcttaagtaaatgaggaatagccaccgagatgctcagagataatataagccatgagtgggaagtgggaaaatgagtttgtcaacgccctctcttttctatccctttacctttgaggtcagggacagggcatattactgacaccccactggctattgccctatacctgccaatcacccaaagaaaataatagcttctgagaaagctcaattcactgtagcaactgtgatatatttaccctaataaagccaccacttggtcttttccagtgcttctctcttatggagatcatccctggaatccaaagctctccagttttctaacccagttaagagttaaaaacaaccacaggtcatgagcagtaggcttggcagttataccccatgcagtcataggagactgctccatcattctcagcacatagggtgcacatctcactatctctggcatgaaccagccttgcgaacttatacagtctcagccactctgctttgatggtaattcttcaccactgatctctcctcaccatgcccttcctgcatccttcccccaaccacccaccagaggagttctggtccccaaaccaaagagttgcctgcaggttggtaatgtgactttgtagatattccttgattaaagccagaccctattggtatcctttttgaagtactggatcgaaatctaattgcttttttttttaattgttggggagaggaggatgagcagaactcctatgcagcctgagagaagttctctatgtgtctgtatatgtacacctctgtgtgtgtgtgtgtaacctcatggttgtgctcaggctgacagggagggcaaagagtgaaaaggaagcatctctttcttgttatccaacattgcttcaaagatgcccaacccccgtagtagcaggcagttcccaagtggagggtcggggcagaggcctccaccaaggccatcaataaccaggtgtgagctacaggtctctgtgtaatgtgaagctctcccgtatttcatttctgcacccagggggcggctctgcaggattgcttacggagaactctgtgtctggcacctctctccacaaggcccaggcgcccagggtcccaccgacctgcccaggaatgcatcacattgttctctggtgctgtaatttggctgcaggagctaggctgaatgcctcccagggatgagaaacatactctccctggcgtcctcccttcgccccagctagcttgagcttctgccctatgaccactgagtgcatttaaataaaaacctcagaaagactgaggaaaaaaaaatcctaattatctctcttctgttaagccatgtagagactcgtgtcctgagtgggtctgagaatttggcaaagacttactggttggtgttcttgataagggaagtgagacaaaggagaagaaattactccctgcaacaggaggaatagaaatgaagcagtgagtgttcagaaattagatctacaagaagttttgcaaacagaccctcagggccaggcaatgtttgtttttgttttttgttttttgtttttttttttaatctgaagcccctgattttatttttccagcatcactctaaggaagagtgtggattagtgccattattcagggctggtattaataaaagttagcttttatctgcagggctaggttaaggctggcattcttacttttacattaaaaaaactggctacaggctgcgcagctgaggtacttcagtcatgtgccttctctaaaggattcttagatccttaaaatatatagtatgttttaagtttgtatctaaatagcacttactgtaatgtattatacctaaatgtttattaaaagttagaagaaatgagtaccaacaggaaggaatggaagagaggagaggggctaagacattgctgatctgagggacagacctctatcaaatagaagagggctgggagaaggggtgattagaagcagagtgagggaactaaatggagccctgactgcaccaaataaagttctcattttgctgcttgttccaaa

SEQ ID NO: 187528 - DNA, 862 bp, Homo sapiens
  Payload ID: 16911
  Gene Symbol: ST7L
  Gene Name: suppression of tumorigenicity 7 like
  ENST ID: ENST00000369664
  CDS Start-End: 175-862
atatactgtactattctttagctgtagacaggatgaagtgtttagggcccaggtccccttaccatgtgattatatttcactcaagatctgagcagcaacctcagaacaagatataagtatttccattacatgattcagtatggtggttgatttttctgaagcaaaaggcagcaaatgtcccctttcctgttcagagatgacatgaaagacttgactgtatttttaaattcattgacacccaaattctatgtggcacttacagggacctcttcattgatatcaggactaatatttatatttgaatggtggtacttccataagcatggcacatcttttattgagcaagtatctgtaagccatttgcaaccactgatgggaggaacagagagcagcatttcagaaccaggttctccttcgaggaacagagaaaatgaaaccagcagacagaatttgtcagaatgtaaggtatggagaaaccctctaaatcttttcagaggagcagaatataggagatacacttgggtgactggtaaagagccacttacatactatgacatgaacctgtcagctcaggaccatcagacctttttcacctgtgacacagattttttacgtccttcagacacagttatgcagaaggcttggagggaaagaaatcctccagctcgaatcaaagcagcctatcaagctttagaattaaacaatgactgtgccactgcatatgttctactggctgaggaagaagcaacaactattgtagatgctgaaaggttatttaaacaggcactcaaggcaggagaaacaatttataggcagtcacagcagtgccagcaccaaagtcctcagcatgaagctcaactga

SEQ ID NO: 187529 - DNA, 1815 bp, Homo sapiens
  Payload ID: 16911
  Gene Symbol: ST7L
  Gene Name: suppression of tumorigenicity 7 like
  Uniprot ID: Q8TDW4
  ENST ID: ENST00000369666
  CDS Start-End: 77-1693
actatcccaggattcccgactcccggtttcctgtccttctcccctcccagctcctggcgcctgcgatagcggcaagatggcggaccgtggcggcgtgggtgaagccgcagctgttggagcgtctcctgcatctgtccctggcctaaacccgacgctaggctggagggagcgactgcgggccgggctggcggggactggggcctcgttgtggttcgtggcggggctggggctgctttacgccctgaggatccctttgaggctgtgtgagaatttggcagcggggacctcttcattgatatcaggactaatatttatatttgaatggtggtacttccataagcatggcacatcttttattgagcaagtatctgtaagccatttgcaaccactgatgggaggaacagagagcagcatttcagaaccaggttctccttcgaggaacagagaaaatgaaaccagcagacagaatttgtcagaatgtaaggtatggagaaaccctctaaatcttttcagaggagcagaatataggagatacacttgggtgactggtaaagagccacttacatactatgacatgaacctgtcagctcaggaccatcagacctttttcacctgtgacacagattttttacgtccttcagacacagttatgcagaaggcttggagggaaagaaatcctccagctcgaatcaaagcagcctatcaagctttagaattaaacaatgactgtgccactgcatatgttctactggctgaggaagaagcaacaactattgtagatgctgaaaggttatttaaacaggcactcaaggcaggagaaacaatttataggcagtcacagcagtgccagcaccaaagtcctcagcatgaagctcaactgaggagagataccaatgtactggtatatattaaaagaagattggcaatgtgtgcaagaaaattaggaagaataagagaagcagtaaaaataatgagagatttgatgaaagaatttcctcctcttaccatgttgaacatccatgaaaatctcttagaatcacttttagaattacaggcctatccagatgttcaggcagtcctagcaaaatatgatgatataagccttccaaagtcagcagcaatctgttacacagcagcactgttgaagacaaggactgtttcagaaaaattctctccagaaacagcctccagaagaggattaagcacagcagaaattaatgccgtggaagcaattcatagagctgtggaatttaatcctcatgttccaaaatatttattagagatgaaaagtttaattttacctccagaacacattctgaaacggggtgatagtgaagcaattgcctatgctttctttcatcttcagcactggaaacgaatagaaggtgctcttaatctgttacagtgtacatgggaaggcacttttagaatgattccatacccgttagagaaaggacatctattttacccttatcccagctgcacagagacggctgatagagagctattacctacctttcatcatgtttctgtttacccaaaaaaggagcttcctttgttcatccatttcacagcaggattttgctcttctacagcaatgatagccattctcactcaccagtttcctgaaatcatgggtatttttgctaaagctgtaagtatgatctcaaggacttgtgtagattatttgtaaaacacacaagaaaccatctctgatctgcctgtgctaacccagctgaacaatggaagatatttgttgtaaattaaaggaattgatttgtatatagttgctgccataaatacatcaaacataaa

SEQ ID NO: 187530 - DNA, 1743 bp, Homo sapiens
  Payload ID: 16911
  Gene Symbol: ST7L
  Gene Name: suppression of tumorigenicity 7 like
  Uniprot ID: Q8TDW4
  ENST ID: ENST00000369669
  CDS Start-End: 435-1613
gtgtgagaatttggcagcgggtgagaggaccagacctcctggggcagggcggggggccaggagagatgtcgggggcaagagccaaagggcaagagattctcggtagtcctagagggcctctgaggagtcgatgatgagcgatcaatgactgtatttttaaattcattgacacccaaattctatgtggcacttacagggacctcttcattgatatcaggactaatatttatatttgaatggtggtacttccataagcatggcacatcttttattgagcaagtatctgtaagccatttgcaaccactgatgggaggaacagagagcagcatttcagaaccaggttctccttcgaggaacagagaaaatgaaaccagcagacagaatttgtcagatacacttgggtgactggtaaagagccacttacatactatgacatgaacctgtcagctcaggaccatcagacctttttcacctgtgacacagattttttacgtccttcagacacagttatgcagaaggcttggagggaaagaaatcctccagctcgaatcaaagcagcctatcaagctttagaattaaacaatgactgtgccactgcatatgttctactggctgaggaagaagcaacaactattgtagatgctgaaaggttatttaaacaggcactcaaggcaggagaaacaatttataggcagtcacagcagtgccagcaccaaagtcctcagcatgaagctcaactgaggagagataccaatgtactggtatatattaaaagaagattggcaatgtgtgcaagaaaattaggaagaataagagaagcagtaaaaataatgagagatttgatgaaagaatttcctcctcttaccatgttgaacatccatgaaaatctcttagaatcacttttagaattacaggcctatccagatgttcaggcagtcctagcaaaatatgatgatataagccttccaaagtcagcagcaatctgttacacagcagcactgttgaagacaaggactgtttcagaaaaattctctccagaaacagcctccagaagaggattaagcacagcagaaattaatgccgtggaagcaattcatagagctgtggaatttaatcctcatgttccaaaatatttattagagatgaaaagtttaattttacctccagaacacattctgaaacggggtgatagtgaagcaattgcctatgctttctttcatcttcagcactggaaacgaatagaaggtgctcttaatctgttacagtgtacatgggaaggcacttttagaatgattccatacccgttagagaaaggacatctattttacccttatcccagctgcacagagacggctgatagagagctattacctacctttcatcatgtttctgtttacccaaaaaaggagcttcctttgttcatccatttcacagcaggattttgctcttctacagcaatgatagccattctcactcaccagtttcctgaaatcatgggtatttttgctaaagctgtgctgggactctggtgcccccaaccctgggcatcctcaggctttgaggagaatacacaggatttgaagtcagaagacctaggtttgagttctggctgagccacgcactgttcatgtgaccttggacaaatcaccaaatttttctgaacagcatctgtaaagtgacagtaacccctacctcacagggttgttgtgaggattacatatatgctaaagcattttgcatatg

SEQ ID NO: 187531 - DNA, 860 bp, Homo sapiens
  Payload ID: 16911
  Gene Symbol: ST7L
  Gene Name: suppression of tumorigenicity 7 like
  ENST ID: ENST00000418497
  CDS Start-End: 1-860
gcatttcagaaccaggttctccttcgaggaacagagaaaatgaaaccagcagacagaatttgtcagaatgtaaggtatggagaaaccctctaaatcttttcagaggagcagaatataggagatacacttgggtgactggtaaagagccacttacatactatgacatgaacctgtcagctcaggaccatcagacctttttcacctgtgacacagattttttacgtccttcagacacagttatgcagaaggcttggagggaaagaaatcctccagctcgaatcaaagcagcctatcaagctttagaattaaacaatgactgtgccactgcatatgttctactggctgaggaagaagcaacaactattgtagatgctgaaaggttatttaaacaggcactcaaggcaggagaaacaatttataggcagtcacagcagtgccagcaccaaagtcctcagcatgaagctcaactgaggagagataccaatgtactggtatatattaaaagaagattggcaatgtgtgcaagaaaattaggaagaataagagaagcagtaaaaataatgagagattatttattagagatgaaaagtttaattttacctccagaacacattctgaaacggggtgatagtgaagcaattgcctatgctttctttcatcttcagcactggaaacgaatagaaggtgctcttaatctgttacagtgtacatgggaaggcacctttcatcatgtttctgtttacccaaaaaaggagcttcctttgttcatccatttcacagcaggattttgctcttctacagcaatgatagccattctcactcaccagtttcctgaaatcatgggtatttttgctaaagct

SEQ ID NO: 187532 - DNA, 1780 bp, Homo sapiens
  Payload ID: 16911
  Gene Symbol: ST7L
  Gene Name: suppression of tumorigenicity 7 like
  Uniprot ID: Q8TDW4
  ENST ID: ENST00000490067
  CDS Start-End: 77-1753
actatcccaggattcccgactcccggtttcctgtccttctcccctcccagctcctggcgcctgcgatagcggcaagatggcggaccgtggcggcgtgggtgaagccgcagctgttggagcgtctcctgcatctgtccctggcctaaacccgacgctaggctggagggagcgactgcgggccgggctggcggggactggggcctcgttgtggttcgtggcggggctggggctgctttacgccctgaggatccctttgaggctgtgtgagaatttggcagcggggacctcttcattgatatcaggactaatatttatatttgaatggtggtacttccataagcatggcacatcttttattgagcaagtatctgtaagccatttgcaaccactgatgggaggaacagagagcagcatttcagaaccaggttctccttcgaggaacagagaaaatgaaaccagcagacagaatttgtcagaatgtaaggtatggagaaaccctctaaatcttttcagaggagcagaatataggagatacacttgggtgactggtaaagagccacttacatactatgacatgaacctgtcagctcaggaccatcagacctttttcacctgtgacacagattttttacgtccttcagacacagttatgcagaaggcttggagggaaagaaatcctccagctcgaatcaaagcagcctatcaagctttagaattaaacaatgactgtgccactgcatatgttctactggctgaggaagaagcaacaactattgtagatgctgaaaggttatttaaacaggcactcaaggcaggagaaacaatttataggcagtcacagcagtgccagcaccaaagtcctcagcatgaagctcaactgaggagagataccaatgtactggtatatattaaaagaagattggcaatgtgtgcaagaaaattaggaagaataagagaagcagtaaaaataatgagagatttgatgaaagaatttcctcctcttaccatgttgaacatccatgaaaatctcttagaatcacttttagaattacaggcctatccagatgttcaggcagtcctagcaaaatatgatgatataagccttccaaagtcagcagcaatctgttacacagcagcactgttgaagacaaggactgtttcagaaaaattctctccagaaacagcctccagaagaggattaagcacagcagaaattaatgccgtggaagcaattcatagagctgtggaatttaatcctcatgttccaaaatatttattagagatgaaaagtttaattttacctccagaacacattctgaaacggggtgatagtgaagcaattgcctatgctttctttcatcttcagcactggaaacgaatagaaggtgctcttaatctgttacagtgtacatgggaaggcacttttagaatgattccatacccgttagagaaaggacatctattttacccttatcccagctgcacagagacggctgatagagagctattacctacctttcatcatgtttctgtttacccaaaaaaggagcttcctttgttcatccatttcacagcaggattttgctcttctacagcaatgatagccattctcactcaccagtttcctgaaatcatgggtatttttgctaaagctgtgctgggactctggtgcccccaaccctgggcatcctcaggctttgaggagaatacacaggatttgaagtcagaagacctaggtttgagttctggctgagccacgcactgttcatgtgaccttgga

SEQ ID NO: 187533 - DNA, 4348 bp, Homo sapiens
  Payload ID: 16911
  Gene Symbol: ST7L
  Gene Name: suppression of tumorigenicity 7 like
  Uniprot ID: Q8TDW4
  ENST ID: ENST00000361846
  CDS Start-End: 32-1699
cccagctcctggcgcctgcgatagcggcaagatggcggaccgtggcggcgtgggtgaagccgcagctgttggagcgtctcctgcatctgtccctggcctaaacccgacgctaggctggagggagcgactgcgggccgggctggcggggactggggcctcgttgtggttcgtggcggggctggggctgctttacgccctgaggatccctttgaggctgtgtgagaatttggcagcggtgactgtatttttaaattcattgacacccaaattctatgtggcacttacagggacctcttcattgatatcaggactaatatttatatttgaatggtggtacttccataagcatggcacatcttttattgagcaagtatctgtaagccatttgcaaccactgatgggaggaacagagagcagcatttcagaaccaggttctccttcgaggaacagagaaaatgaaaccagcagacagaatttgtcagaatgtaaggtatggagaaaccctctaaatcttttcagaggagcagaatataggagatacacttgggtgactggtaaagagccacttacatactatgacatgaacctgtcagctcaggaccatcagacctttttcacctgtgacacagattttttacgtccttcagacacagttatgcagaaggcttggagggaaagaaatcctccagctcgaatcaaagcagcctatcaagctttagaattaaacaatgactgtgccactgcatatgttctactggctgaggaagaagcaacaactattgtagatgctgaaaggttatttaaacaggcactcaaggcaggagaaacaatttataggcagtcacagcagtgccagcaccaaagtcctcagcatgaagctcaactgaggagagataccaatgtactggtatatattaaaagaagattggcaatgtgtgcaagaaaattaggaagaataagagaagcagtaaaaataatgagagatttgatgaaagaatttcctcctcttaccatgttgaacatccatgaaaatctcttagaatcacttttagaattacaggcctatccagatgttcaggcagtcctagcaaaatatgatgatataagccttccaaagtcagcagcaatctgttacacagcagcactgttgaagacaaggactgtttcagaaaaattctctccagaaacagcctccagaagaggattaagcacagcagaaattaatgccgtggaagcaattcatagagctgtggaatttaatcctcatgttccaaaatatttattagagatgaaaagtttaattttacctccagaacacattctgaaacggggtgatagtgaagcaattgcctatgctttctttcatcttcagcactggaaacgaatagaaggtgctcttaatctgttacagtgtacatgggaaggcacttttagaatgattccatacccgttagagaaaggacatctattttacccttatcccagctgcacagagacggctgatagagagctattacctacctttcatcatgtttctgtttacccaaaaaaggagcttcctttgttcatccatttcacagcaggattttgctcttctacagcaatgatagccattctcactcaccagtttcctgaaatcatgggtatttttgctaaagctgtagtaggagttaaaacccaaaaagaaaatgctgattaattatattcccaaaaatgaaaacactgagaaccatggaaaaactagtccttacttggtgctgggactctggtgcccccaaccctgggcatcctcaggctttgaggagaatacacaggatttgaagtcagaagacctaggtttgagttctggctgagccacgcactgttcatgtgaccttggacaaatcaccaaatttttctgaacagcatctgtaaagtgacagtaacccctacctcacagggttgttgtgaggattacatatatgctaaagcattttgcatatgaaaaagcttcttatgaatattgttattcctaggcaaaccccccttggaagctgtcaaaaaggacaactgtagatgaaattgtcttccttttttcttcattcagcttagcctttctgtttggccagggctacttacaggggctgttggggttgaagtcaagtcaccgcattttggctcctttggtcaaagagaaagaactctaatgtccagctgctccatcgatatactcatagaatggaagtgagcaaaggaaaattttaagccaggatagttaaccgttagggggccagtgggagaatgcttgccttgcatttgcacatccagaatgactaaaacatcttaagtaaatgaggaatagccaccgagatgctcagagataatataagccatgagtgggaagtgggaaaatgagtttgtcaacgccctctcttttctatccctttacctttgaggtcagggacagggcatattactgacaccccactggctattgccctatacctgccaatcacccaaagaaaataatagcttctgagaaagctcaattcactgtagcaactgtgatatatttaccctaataaagccaccacttggtcttttccagtgcttctctcttatggagatcatccctggaatccaaagctctccagttttctaacccagttaagagttaaaaacaaccacaggtcatgagcagtaggcttggcagttataccccatgcagtcataggagactgctccatcattctcagcacatagggtgcacatctcactatctctggcatgaaccagccttgcgaacttatacagtctcagccactctgctttgatggtaattcttcaccactgatctctcctcaccatgcccttcctgcatccttcccccaaccacccaccagaggagttctggtccccaaaccaaagagttgcctgcaggttggtaatgtgactttgtagatattccttgattaaagccagaccctattggtatcctttttgaagtactggatcgaaatctaattgcttttttttttaattgttggggagaggaggatgagcagaactcctatgcagcctgagagaagttctctatgtgtctgtatatgtacacctctgtgtgtgtgtgtgtaacctcatggttgtgctcaggctgacagggagggcaaagagtgaaaaggaagcatctctttcttgttatccaacattgcttcaaagatgcccaacccccgtagtagcaggcagttcccaagtggagggtcggggcagaggcctccaccaaggccatcaataaccaggtgtgagctacaggtctctgtgtaatgtgaagctctcccgtatttcatttctgcacccagggggcggctctgcaggattgcttacggagaactctgtgtctggcacctctctccacaaggcccaggcgcccagggtcccaccgacctgcccaggaatgcatcacattgttctctggtgctgtaatttggctgcaggagctaggctgaatgcctcccagggatgagaaacatactctccctggcgtcctcccttcgccccagctagcttgagcttctgccctatgaccactgagtgcatttaaataaaaacctcagaaagactgaggaaaaaaaaatcctaattatctctcttctgttaagccatgtagagactcgtgtcctgagtgggtctgagaatttggcaaagacttactggttggtgttcttgataagggaagtgagacaaaggagaagaaattactccctgcaacaggaggaatagaaatgaagcagtgagtgttcagaaattagatctacaagaagttttgcaaacagaccctcagggccaggcaatgtttgtttttgttttttgttttttgtttttttttttaatctgaagcccctgattttatttttccagcatcactctaaggaagagtgtggattagtgccattattcagggctggtattaataaaagttagcttttatctgcagggctaggttaaggctggcattcttacttttacattaaaaaaactggctacaggctgcgcagctgaggtacttcagtcatgtgccttctctaaaggattcttagatccttaaaatatatagtatgttttaagtttgtatctaaatagcacttactgtaatgtattatacctaaatgtttattaaaagttagaagaaatgagtaccaacaggaaggaatggaagagaggagaggggctaagacattgctgatctgagggacagacctctatcaaatagaagagggctgggagaaggggtgattagaagcagagtgagggaactaaatggagccctgactgcaccaaataaagttctcattttgctgcttgttccaaa

SEQ ID NO: 187534 - DNA, 4483 bp, Homo sapiens
  Payload ID: 16911
  Gene Symbol: ST7L
  Gene Name: suppression of tumorigenicity 7 like
  Uniprot ID: Q8TDW4
  ENST ID: ENST00000490715
  CDS Start-End: 167-1834
gatggaatcaccgcggcggccgtcggaaggacccgcccggaaacgccgaccaagagggccccatgtcagttatgcgcgggagtgacgtctcctaacgccagcgcccgcgcccgcgccccaggaagtagggtttgccttagctcctggcgcctgcgatagcggcaagatggcggaccgtggcggcgtgggtgaagccgcagctgttggagcgtctcctgcatctgtccctggcctaaacccgacgctaggctggagggagcgactgcgggccgggctggcggggactggggcctcgttgtggttcgtggcggggctggggctgctttacgccctgaggatccctttgaggctgtgtgagaatttggcagcggtgactgtatttttaaattcattgacacccaaattctatgtggcacttacagggacctcttcattgatatcaggactaatatttatatttgaatggtggtacttccataagcatggcacatcttttattgagcaagtatctgtaagccatttgcaaccactgatgggaggaacagagagcagcatttcagaaccaggttctccttcgaggaacagagaaaatgaaaccagcagacagaatttgtcagaatgtaaggtatggagaaaccctctaaatcttttcagaggagcagaatataggagatacacttgggtgactggtaaagagccacttacatactatgacatgaacctgtcagctcaggaccatcagacctttttcacctgtgacacagattttttacgtccttcagacacagttatgcagaaggcttggagggaaagaaatcctccagctcgaatcaaagcagcctatcaagctttagaattaaacaatgactgtgccactgcatatgttctactggctgaggaagaagcaacaactattgtagatgctgaaaggttatttaaacaggcactcaaggcaggagaaacaatttataggcagtcacagcagtgccagcaccaaagtcctcagcatgaagctcaactgaggagagataccaatgtactggtatatattaaaagaagattggcaatgtgtgcaagaaaattaggaagaataagagaagcagtaaaaataatgagagatttgatgaaagaatttcctcctcttaccatgttgaacatccatgaaaatctcttagaatcacttttagaattacaggcctatccagatgttcaggcagtcctagcaaaatatgatgatataagccttccaaagtcagcagcaatctgttacacagcagcactgttgaagacaaggactgtttcagaaaaattctctccagaaacagcctccagaagaggattaagcacagcagaaattaatgccgtggaagcaattcatagagctgtggaatttaatcctcatgttccaaaatatttattagagatgaaaagtttaattttacctccagaacacattctgaaacggggtgatagtgaagcaattgcctatgctttctttcatcttcagcactggaaacgaatagaaggtgctcttaatctgttacagtgtacatgggaaggcacttttagaatgattccatacccgttagagaaaggacatctattttacccttatcccagctgcacagagacggctgatagagagctattacctacctttcatcatgtttctgtttacccaaaaaaggagcttcctttgttcatccatttcacagcaggattttgctcttctacagcaatgatagccattctcactcaccagtttcctgaaatcatgggtatttttgctaaagctgtagtaggagttaaaacccaaaaagaaaatgctgattaattatattcccaaaaatgaaaacactgagaaccatggaaaaactagtccttacttggtgctgggactctggtgcccccaaccctgggcatcctcaggctttgaggagaatacacaggatttgaagtcagaagacctaggtttgagttctggctgagccacgcactgttcatgtgaccttggacaaatcaccaaatttttctgaacagcatctgtaaagtgacagtaacccctacctcacagggttgttgtgaggattacatatatgctaaagcattttgcatatgaaaaagcttcttatgaatattgttattcctaggcaaaccccccttggaagctgtcaaaaaggacaactgtagatgaaattgtcttccttttttcttcattcagcttagcctttctgtttggccagggctacttacaggggctgttggggttgaagtcaagtcaccgcattttggctcctttggtcaaagagaaagaactctaatgtccagctgctccatcgatatactcatagaatggaagtgagcaaaggaaaattttaagccaggatagttaaccgttagggggccagtgggagaatgcttgccttgcatttgcacatccagaatgactaaaacatcttaagtaaatgaggaatagccaccgagatgctcagagataatataagccatgagtgggaagtgggaaaatgagtttgtcaacgccctctcttttctatccctttacctttgaggtcagggacagggcatattactgacaccccactggctattgccctatacctgccaatcacccaaagaaaataatagcttctgagaaagctcaattcactgtagcaactgtgatatatttaccctaataaagccaccacttggtcttttccagtgcttctctcttatggagatcatccctggaatccaaagctctccagttttctaacccagttaagagttaaaaacaaccacaggtcatgagcagtaggcttggcagttataccccatgcagtcataggagactgctccatcattctcagcacatagggtgcacatctcactatctctggcatgaaccagccttgcgaacttatacagtctcagccactctgctttgatggtaattcttcaccactgatctctcctcaccatgcccttcctgcatccttcccccaaccacccaccagaggagttctggtccccaaaccaaagagttgcctgcaggttggtaatgtgactttgtagatattccttgattaaagccagaccctattggtatcctttttgaagtactggatcgaaatctaattgcttttttttttaattgttggggagaggaggatgagcagaactcctatgcagcctgagagaagttctctatgtgtctgtatatgtacacctctgtgtgtgtgtgtgtaacctcatggttgtgctcaggctgacagggagggcaaagagtgaaaaggaagcatctctttcttgttatccaacattgcttcaaagatgcccaacccccgtagtagcaggcagttcccaagtggagggtcggggcagaggcctccaccaaggccatcaataaccaggtgtgagctacaggtctctgtgtaatgtgaagctctcccgtatttcatttctgcacccagggggcggctctgcaggattgcttacggagaactctgtgtctggcacctctctccacaaggcccaggcgcccagggtcccaccgacctgcccaggaatgcatcacattgttctctggtgctgtaatttggctgcaggagctaggctgaatgcctcccagggatgagaaacatactctccctggcgtcctcccttcgccccagctagcttgagcttctgccctatgaccactgagtgcatttaaataaaaacctcagaaagactgaggaaaaaaaaatcctaattatctctcttctgttaagccatgtagagactcgtgtcctgagtgggtctgagaatttggcaaagacttactggttggtgttcttgataagggaagtgagacaaaggagaagaaattactccctgcaacaggaggaatagaaatgaagcagtgagtgttcagaaattagatctacaagaagttttgcaaacagaccctcagggccaggcaatgtttgtttttgttttttgttttttgtttttttttttaatctgaagcccctgattttatttttccagcatcactctaaggaagagtgtggattagtgccattattcagggctggtattaataaaagttagcttttatctgcagggctaggttaaggctggcattcttacttttacattaaaaaaactggctacaggctgcgcagctgaggtacttcagtcatgtgccttctctaaaggattcttagatccttaaaatatatagtatgttttaagtttgtatctaaatagcacttactgtaatgtattatacctaaatgtttattaaaagttagaagaaatgagtaccaacaggaaggaatggaagagaggagaggggctaagacattgctgatctgagggacagacctctatcaaatagaagagggctgggagaaggggtgattagaagcagagtgagggaactaaatggagccctgactgcaccaaataaagttctcattttgctgcttgttccaaa

SEQ ID NO: 187535 - DNA, 1021 bp, Homo sapiens
  Payload ID: 16912
  Gene Symbol: SAPCD1
  Gene Name: suppressor APC domain containing 1
  ENST ID: ENST00000383205
  CDS Start-End: 257-700
cggattctaccccaggatacttcatgagaacgaaccccttcagagaggccctacaaaacagattagagggaagacagaggggtccaagggagatggtctctcttctcaagtaggaacaccccagcctcagacagacacagcaggaaggggcctgagaggctgacagaggcaggatgggtgcaaggcaggggtggaggggagggaccagcccgggctgcaccagtgggagtggctccacccttcccacctcagagccatggggagccagggctctggcggggtgcccttggtgcaggctccctacacagtcctgctgctgccgctggggacaagccgccaagacccaggggcccagagcttcttcctttggctacgcaggatgcaggctctggagagagaacaggatgccctgtggcagggtctggagctgctacagcatggccaggcctggtttgaagaccatctgagggaggcacagcgacagcagctgcatctaggggcccttggtgagaattttctaacagatttacactcagagcctggtcgccccccgttagcccagattcaaaaggtgaacatctgtttgcagaatctgattcatgagaagttgtcaaggcagcagaaaggagtcacccagccaaaggaggagatggctcagcggggctgcaccaaggggccaagaggccctacccgtgtctaaaccctcctctcactcccctaagcctggtgaaagagtcagaagccccaggctcctttttctgtttcttaactcaacagctaaaaaatggctccaggtagtgagtcaatgaagttcagacatgttggtgtaaagtttctcctctgctcctgaaaacttcatcttcttggtgtctcatgtcctcattctcccctatatgacatgcaaaaacgatctttctttgaaatccctctgggaagaagacatgtttattgaaactgtccttcagccttaaatacaaaaataaaactgaaactgctccagaaagcagctttctccaaaaat

SEQ ID NO: 187536 - DNA, 916 bp, Homo sapiens
  Payload ID: 16912
  Gene Symbol: SAPCD1
  Gene Name: suppressor APC domain containing 1
  Uniprot ID: Q5SSQ6
  ENST ID: ENST00000449857
  CDS Start-End: 60-596
ggagggaccagcccgggctgcaccagtgggagtggctccacccttcccacctcagagccatggggagccagggctctggcggggtgcccttggtgcaggctccctacacagtcctgctgctgccgctggggacaagccgccaagacccaggggcccagagcttcttcctttggctacgcaggatgcaggctctggagagagaacaggatgccctgtggcagggtctggagctgctacagcatggccaggcctggtttgaagaccatctgagggaggcacagcgacagcagctgcatctaggggcccttggtgagaattttctaacagatttacactcagagcctggtcgccccccgttagcccagattcaaaaggtgaacatctgtttgcagaatctgattcatgagaagttctccccaagtccactgaacaaggctagttcctgcaccacccaggattcaaaggaaagacgaagggagcagaacttgtggcagcaacaggagttgtcaaggcagcagaaaggagtcacccagccaaaggaggagatggctcagcggggctgcaccaaggggccaagaggccctacccgtgtctaaaccctcctctcactcccctaagcctggtgaaagagtcagaagccccaggctcctttttctgtttcttaactcaacagctaaaaaatggctccaggtagtgagtcaatgaagttcagacatgttggtgtaaagtttctcctctgctcctgaaaacttcatcttcttggtgtctcatgtcctcattctcccctatatgacatgcaaaaacgatctttctttgaaatccctctgggaagaagcatgtttattgaaactgtccttcagccttaaatacaaaaataaaactgaaactgctccagaaagcagctttctccaaaaat

SEQ ID NO: 187537 - DNA, 916 bp, Homo sapiens; identical to SEQ ID NO: 187536
  Payload ID: 16912
  Gene Symbol: SAPCD1
  Gene Name: suppressor APC domain containing 1
  Uniprot ID: Q5SSQ6
  ENST ID: ENST00000447852
  CDS Start-End: 60-596

SEQ ID NO: 187538 - DNA, 916 bp, Homo sapiens; identical to SEQ ID NO: 187536
  Payload ID: 16912
  Gene Symbol: SAPCD1
  Gene Name: suppressor APC domain containing 1
  Uniprot ID: Q5SSQ6
  ENST ID: ENST00000443153
  CDS Start-End: 60-596

SEQ ID NO: 187539 - DNA, 916 bp, Homo sapiens; identical to SEQ ID NO: 187536
  Payload ID: 16912
  Gene Symbol: SAPCD1
  Gene Name: suppressor APC domain containing 1
  Uniprot ID: Q5SSQ6
  ENST ID: ENST00000453534
  CDS Start-End: 60-596

SEQ ID NO: 187540 - DNA, 917 bp, Homo sapiens
  Payload ID: 16912
  Gene Symbol: SAPCD1
  Gene Name: suppressor APC domain containing 1
  Uniprot ID: Q5SSQ6
  ENST ID: ENST00000457185
  CDS Start-End: 60-596
ggagggaccagcccgggctgcaccagtgggagtggctccacccttcccacctcagagccatggggagccagggctctggcggggtgcccttggtgcaggctccctacacagtcctgctgctgccgctggggacaagccgccaagacccaggggcccagagcttcttcctttggctacgcaggatgcaggctctggagagagaacaggatgccctgtggcagggtctggagctgctacagcatggccaggcctggtttgaagaccatctgagggaggcacagcgacagcagctgcatctaggggcccttggtgagaattttctaacagatttacactcagagcctggtcgccccccgttagcccagattcaaaaggtgaacatctgtttgcagaatctgattcatgagaagttctccccaagtccactgaacaaggctagttcctgcaccacccaggattcaaaggaaagacgaagggagcagaacttgtggcagcaacaggagttgtcaaggcagcagaaaggagtcacccagccaaaggaggagatggctcagcggggctgcaccaaggggccaagaggccctacccgtgtctaaaccctcctctcactcccctaagcctggtgaaagagtcagaagccccaggctcctttttctgtttcttaactcaacagctaaaaaatggctccaggtagtgagtcaatgaagttcagacatgttggtgtaaagtttctcctctgctcctgaaaacttcatcttcttggtgtctcatgtcctcattctcccctatatgacatgcaaaaacgatctttctttgaaatccctctgggaagaagacatgtttattgaaactgtccttcagccttaaatacaaaaataaaactgaaactgctccagaaagcagctttctccaaaaat

SEQ ID NO: 187541 - DNA, 607 bp, Homo sapiens
  Payload ID: 16912
  Gene Symbol: SAPCD1
  Gene Name: suppressor APC domain containing 1
  ENST ID: ENST00000433778
  CDS Start-End: 257-607
cggattctaccccaggatacttcatgagaacgaaccccttcagagaggccctacaaaacagattagagggaagacagaggggtccaagggagatggtctctcttctcaagtaggaacaccccagcctcagacagacacagcaggaaggggcctgagaggctgacagaggcaggatgggtgcaaggcaggggtggaggggagggaccagcccgggctgcaccagtgggagtggctccacccttcccacctcagagccatggggagccagggctctggcggggtgcccttggtgcaggctccctacacagtcctgctgctgccgctggggacaagccgccaagacccaggggcccagagcttcttcctttggctacgcaggatgcaggctctggagagagaacaggatgccctgtggcagggtctggagctgctacagcatggccaggcctggtttgaagaccatctgagggaggcacagcgacagcagctgcatctaggggcccttggtgagaattttctaacagatttacactcagagcctggtcgccccccgttagcccagattcaaaaggtgaacatctgtttgcagaatctgattcatgagaag

SEQ ID NO: 187542 - DNA, 1020 bp, Homo sapiens
  Payload ID: 16912
  Gene Symbol: SAPCD1
  Gene Name: suppressor APC domain containing 1
  ENST ID: ENST00000427166
  CDS Start-End: 257-700
cggattctaccccaggatacttcatgagaacgaaccccttcagagaggccctacaaaacagattagagggaagacagaggggtccaagggagatggtctctcttctcaagtaggaacaccccagcctcagacagacacagcaggaaggggcctgagaggctgacagaggcaggatgggtgcaaggcaggggtggaggggagggaccagcccgggctgcaccagtgggagtggctccacccttcccacctcagagccatggggagccagggctctggcggggtgcccttggtgcaggctccctacacagtcctgctgctgccgctggggacaagccgccaagacccaggggcccagagcttcttcctttggctacgcaggatgcaggctctggagagagaacaggatgccctgtggcagggtctggagctgctacagcatggccaggcctggtttgaagaccatctgagggaggcacagcgacagcagctgcatctaggggcccttggtgagaattttctaacagatttacactcagagcctggtcgccccccgttagcccagattcaaaaggtgaacatctgtttgcagaatctgattcatgagaagttgtcaaggcagcagaaaggagtcacccagccaaaggaggagatggctcagcggggctgcaccaaggggccaagaggccctacccgtgtctaaaccctcctctcactcccctaagcctggtgaaagagtcagaagccccaggctcctttttctgtttcttaactcaacagctaaaaaatggctccaggtagtgagtcaatgaagttcagacatgttggtgtaaagtttctcctctgctcctgaaaacttcatcttcttggtgtctcatgtcctcattctcccctatatgacatgcaaaaacgatctttctttgaaatccctctgggaagaagcatgtttattgaaactgtccttcagccttaaatacaaaaataaaactgaaactgctccagaaagcagctttctccaaaaat

SEQ ID NO: 187543 - DNA, 916 bp, Homo sapiens; identical to SEQ ID NO: 187536
  Payload ID: 16912
  Gene Symbol: SAPCD1
  Gene Name: suppressor APC domain containing 1
  Uniprot ID: Q5SSQ6
  ENST ID: ENST00000415669
  CDS Start-End: 60-596

SEQ ID NO: 187544 - DNA, 1020 bp, Homo sapiens; identical to SEQ ID NO: 187542
  Payload ID: 16912
  Gene Symbol: SAPCD1
  Gene Name: suppressor APC domain containing 1
  ENST ID: ENST00000436320
  CDS Start-End: 257-700

SEQ ID NO: 187545 - DNA, 820 bp, Homo sapiens; identical to SEQ ID NO: 155498
  Payload ID: 16912
  Gene Symbol: SAPCD1
  Gene Name: suppressor APC domain containing 1
  Uniprot ID: Q5SSQ6
  ENST ID: ENST00000425424
  CDS Start-End: 60-506

SEQ ID NO: 187546 - DNA, 1020 bp, Homo sapiens; identical to SEQ ID NO: 187542
  Payload ID: 16912
  Gene Symbol: SAPCD1
  Gene Name: suppressor APC domain containing 1
  ENST ID: ENST00000425286
  CDS Start-End: 257-700

SEQ ID NO: 187547 - DNA, 1020 bp, Homo sapiens; identical to SEQ ID NO: 187542
  Payload ID: 16912
  Gene Symbol: SAPCD1
  Gene Name: suppressor APC domain containing 1
  ENST ID: ENST00000449925
  CDS Start-End: 257-700

SEQ ID NO: 187548 - DNA, 820 bp, Homo sapiens; identical to SEQ ID NO: 155498
  Payload ID: 16912
  Gene Symbol: SAPCD1
  Gene Name: suppressor APC domain containing 1
  Uniprot ID: Q5SSQ6
  ENST ID: ENST00000551778
  CDS Start-End: 60-506

SEQ ID NO: 187549 - DNA, 3848 bp, Homo sapiens
  Payload ID: 16913
  Gene Symbol: SAPCD2
  Gene Name: suppressor APC domain containing 2
  Uniprot ID: Q86UD0
  ENST ID: ENST00000409687
  CDS Start-End: 129-1313
gccgcgaggagggccccattcaaaagtagtcgctattgtcgccgtgggctgagctcgccgggccggcccctccgtggggccgcgctgggacgcacgcgggtggacgaggggaccgatcccgggcgcccatggccggggccgccatggccgagcggggccgcgtgcctccccccgcacccgcgcccagcacggaggggctgccgcgcgccttcctgcagagcctgcgcaccctgttcgacatcctggacgaccggcggcgcggctgcgtgcacctgcgcgagatcgagtcccgctggcagggcaccgacgcgcgggagctgccccgcggggtgctggagggcttgcgccaggtggccccggccagcggctacctgaccttcgagcgcttcgtggccggcctgcgcacctccctgctgagcgccgacggcggcccccgggaccccacgcgcgccccggcccggcccggggatcagccgccgccgccgccgcagcgcctggtgttcgctccggccgacgagccgcggacggtcctggagaggaagcccctgcccctgggcgtgcgcgcccctctggccggtcccagcgccgccgcccgcagcccggagcagctgtgcgccccggctgaggcggcgccctgccccgcggagcccgagcggtcccagagcgcggcgctggaaccgagctccagcgcggacgcaggtgcagtggcgtgcagggccctggaggcggactcaggggatgcccggcgggctccccgtgcccgaggggaacgtcggaggcacaccatcgccagcggcgtggactgcggcctgctgaagcagatgaaggagctggagcaggagaaggaggtgctgctgcagggtttggagatgatggcgcggggccgcgactggtaccagcagcagctgcaacgagtgcaggagcgccagcgccgcctgggccagagcagagccagcgccgactttggggctgcagggagcccccgcccactggggcggctactgcccaaggtacaagaggtggcccggtgcctgggggagctgctggctgcagcctgtgccagccgggccctgcccccgtcctcctccgggcccccctgccctgccctgacgtccacctcacccccggtctggcagcagcagaccatcctcatgctgaaggagcagaaccgactcctcacccaggaggtgaccgagaagagtgagcgcatcacgcagctggagcaggagaagtcggcgctcattaagcagctgtttgaggcccgcgccctgagccagcaggacgggggacctctggattccaccttcatctagtccttgtgggccgcgtgggcccccagggccagcctggcactcagcccttcgagggtgggcgccccatcgcacccaccctctctggctggagacccccggcaggcccaggcacagtcccggagtgggcgccttcctgccgcccttgccagatgggctccccaggcctgcccccggctggtccccgcaccgagcgcttgactccgttttggctcctggtgctgacatgggctggggctctcttgagtccgcatagtccgcagctactactgccgctgtcagtggacagtggggtacccctccatgagttagcgtccccccgtttccagcggtgccgccctgggtcccatcttcagggaaaggcactgcccacgccaggctgcacttccaacaacgggcagcagagggcgcggggcggctccgacgcgggtccaagggcagcttcccgctcaaccagggcaccaggacgaggtggctgtagctcggacggacggaagtagatggagggggtggggacggcctgtaagcggggggtgcctgcctggctggggagccccagggatagcggtcggacttcaggttctggccaaggctgagggaccctggctgcagcggatcggcacgccgggtgggcgagagcttggcctgcatgtgcctcccacagaccctggggtgatggccttccccctcttggccgggacgttgccccacgttgagtcccacacaacatcctgtgagcctggctccccaggagggcccccagacagctcccaggcacgtcataggcaaagcctgttcccccgactcaggatttccaaggcctggggtcctgctcacccccctttgctctcacgcccagcctgtccccaggtttcagctgggagaggccacctccctcagccaaggaaaacgagaacccccagggtacaggaggaggctggggcaggtccccttgggtgtcactccctcagcccctgcccaggcccactcccgctggtgctggagtacgcactggtgggggggccctgctcagcccaacctggagggtcccagtgtcaccagaaccaggggcacggcaacagcatcgatgggttctgcagcccagggcccccgatgcggggtcagtgcgtggggggcgcagggcccccgatgccgatgcggggtcagtgtgtgtggggcgcagggcctccgatgcggggtcagtgcgtggggggcgcagggccccctcgtgtccagggcactttggtacactgtcccacaaggcacctgtctcagaggaggggccctggcaggcagcgtggcaactcccttccggagcccagctccatgctaacctgcccacagcaaccccacagagccacattccctgctgcacctggtctgcaggggtgtcccaggacaggcccaagtcagcccagcatgcagctgccctcctaccctgaagatgggagtgggctttccaggggacataaggatgtcaggcctggacctcctgggcaggaaagggtgcaggtcctgagggcctgtgccccacagccccagcaccaggtggactgcagcgcagtgggtgggccagtggcagccagggagaagccccccgtcagcaggctggggtctgcccaccagggcctccccacgtctgcctttgagggtgcctgccatgccctgggggatcctggcatctttactggactggaagcaggagacagaacagtgtctgtcccggggtgacttcatcaggagaccgcccacatagagctggaccccgcagctgaagcggaaatgtgagacaggctggcacctccggaaaaactgcctttcagccttggtgttccgtgcaaggtgaaaagaaataggtcctcccagtttacagcttgaaatcaggctagtgagtggccctggagaccacgaggggagaatttaaaggccccggctggcagggtctaggtggctggcagaggcacatgcagaccctgcctggagcctgccctaggacgctgggcgggtcagtctccgtgcaggatgtgagcagcgtccctgggctctatccgcgaggtgccagtagcgtgtgcaggtacatacacgtgcgtgcacactgtgatgacacccggaaatgtctcaggatgttgaaatgtgtccttgggggcagaagtgtccccagttgagaatctgccccagaggaacacacccacaccaggcctcaggattttgtgttgatcaagttccaaggaaaaggaacatctcagccgggcgtggtggttcacgcctggaatcccagcacttgaggccaggagttccagagcagcctgggcaacgcagtgagagaccccatctctacaaaaaaaaaaaagaaagaaagaaaatgagagatccaggtttaaaaattcataaacaccacaaggaaacaatacactatgagacccagcagaagcaacagattgactctagacccagatactagaattatcagagagaatataaagtaacagtgttttatatatctaaagaaataaaagagatttctggaaacatgaacaa

SEQ ID NO: 187550 - DNA, 12079 bp, Homo sapiens
  Payload ID: 16914
  Gene Symbol: SCAI
  Gene Name: suppressor of cancer cell invasion
  Uniprot ID: Q8N9R8
  ENST ID: ENST00000336505
  CDS Start-End: 60-1880
agcttcccgagcgagccctgcggccgccggagcagctcccgcggcggagcaggagccggatggtcagaggagcccggcagccccagcagccgcggagtcgcctggcccccagactgactggcacagtggagaaaccgcctcgaaaacggagaagcaggactgaatttgctcttaaagaaatcatgtcctctggaggtgctgaagatgatatcccacagggagagaggaaaacagttacagatttttgttatcttctggataaatctaagcaactgttcaatgggttaagagatttgccacaatatggacagaagcagtggcagtcctattttggaagaacttttgatgtttacaccaaactctggaagttccagcagcagcatcgacaagtcttggataatcggtatggcttgaagcgctggcaaataggagaaattgcttccaagattgggcagctatactatcattattacttacgcacatcggaaaccagctatctgaatgaggctttttccttctattctgcaatcagacagagatcatattattctcaagtcaataaagaggacagacctgaattggtagttaagaagttacgatattatgcaagatttatagtagtttgtcttcttctcaacaaaatggatgttgtaaaggatctggtaaaggaattgtcagatgaaattgaagattatactcaccgatttaatactgaagatcaagtggaatggaacttggtgcttcaagaagtagcagctttcattgaggcggatcctgtaatggtattaaatgatgataataccattgttatcacatcgaatcgccttgctgaaacaggagccccattgctggaacagggcatgattgtgggacagttgtctctggctgacgcactcattattggtaattgtaataatcaggttaagttcagtgaactaactgttgacatgttccggatgttacaagctctggaaagggagccaatgaatttagcttcccagatgaataaaccaggaatgcaggaatcagctgacaagcctactagacgagaaaacccccacaagtatctgctctacaaaccaaccttcagccagctatataccttcttagcagcgtcttttaaggagctgcctgccaatagcgtgcttctgatttacctgtcggccactggcgttttccccacaggtcgttctgatagtgaaggtccttatgattttggaggtgtacttactaatagtaaccgggatattattaatggagatgccatccacaaacgaaatcagtcccacaaggaaatgcactgccttcatcccggggatctctatcctttcaccaggaagccactgttcatcattgtggattcgtctaatagtgttgcgtataagaatttcacaaacttgtttggacagccactagtctgcttgctttctcctacagcatatccaaaagctttacaagatcaatctcagcgaggtagcctcttcactctctttttgaacaatcctctaatggccttcctatttgtctctggattgtcaagcatgcgcagaggcctatgggaaaagtgtcaagaatatcttcgaaaaatcaaccgtgatattgcccagctactgactcattcacgttcaatagatcaggcatttctccagttttttggagatgaatttcttcgcttgctcctcacaagatttatcttttgttcagccaccatgaggatgcacaagatttttcgggaaacacgaaattatccagaatcatatccacaactgccaagggatgaaacagtggagaatcctcatctccagaagcacattttggaattagcatccattctggatgttcgaaacgtgttctttgagaataccattgatgactattaaaacaaaaaccctgttgtcgaaacaagttttcattttccacaaattttaaatggtgcagttttctaacgtgataagacacatagtggtgttacttagtttttattttttaatttagggccaccattttaaaaacaaacaaaaaaatgttcacacttttagggtaactgttttaaaatgcaacctttcaggtcttttaaaatcttaaccttggaatttttattttttgattttgagggatggatatttacctccaacttctaatcctacactcaaatagtcactattctcaccctgagaagagtaaatcatttatttttgtataatgaggtaaatccaactcttatacttggacctaagttaaatgtctggatttggaaatatgtaatggttcataatgatgaagctagccaccatggactactgaaaatcaagaacagagtccctccataatatattttttctcattccaacttagctggtagaaaaatgtttgatcctttgaaacatgatcaagccagttttttgaaatcatttaatttctttcaatactgtcataatttcagaaattggattgaattgcatctgaaagctacatcttgattgaggacttgaggtggtaatattacttggaatgtatgagtattatgagatttatttgcatattttctttgtagtctgtgaatgctggaaatgaaaaaggaaacaactttgaaatattttagtcaaaaaaccatgtcattggtttcataatacaatgtctccaataggaattctatttaaactcttggtttatgagatcacatttaaagactggattgatgtctgtgacataaagttttaattttttgcctcattcaaatttatgagacttcaaagtcatagatgttttaaattttggtaaggggtaactgggtgttatgaaacctaaaatgtaagttgattttgcattggtaatttggaaataagatttattaacattccctgtatttagtattttatattcatgcacaaaatttttattatcttaaataggactcagtgtatattataaagatttttcttttttgtgttttccttccctgtcattccctttataatttcacagtcacttgctatgaagtcctccctcctttttgattatgcagcattcaatttcagaaatctatgaatgagaaggccttatacctaattttctgtacaggatcacatctggcagtcccaggagaagtgagctgattgcttttgatatctctttcccatggccctaggtaaattatactctaaatttatttattttttttgaaacagagtcttgcttttgttgcccaggttggagtgcagtggggctatctcggctcactgcaacctccgcctcccaggttcaagcaattttcctgcctcagcctcccgagtagctgggattacaggtgcccgccaccatgcctggctaatttttgtatttttagtagagacggggtttcaccatgttggtcaggctggtctcaaactcctgaccttgtgatctgcctgcctcagcctcccaaagtgctgggattacaggcgtgagccaccgcacctggctattatttttaacttggttttcatttctggcatagagactaatttgggtctaagttattcccattcctgctttgatttgctgatttttcaaacctgaagtccaaagttactgtttttggggtttggggacttggggagtattttacttttttttttttttttttttaagagacagagtcttgctttgttgcccaggttggggtgcagcggtacattcatggctcactgcagcctcaaattcctggattcaggcaatcttctcacctcagcctcccaagtagctgggactacaggcatgcgccaccatgcctggctaattttctttattttttaattttttgtagagacatggtctcactttgttgagcaggctggcctcaaactcctgggctcaagtgatcctcctgcctcaacctcccaaagtgctaggattacaggtgtgagccactgtacctggcctgtttactttttaaaaatttttttgtttgttctttcaaacagtatttcagaaagcttgggaaaagttaccctggaaagatttcctttgctagtgggttttcattttcaggtaaagactgctttccttttttttcagtatcttaataaacttcatagctttcctttagtaacagtgttcattgaactacagcaatagactatcttcggttttctgacctcttgtttcaattccccttaagtcctgtgccagttatgctcctaccaacacagagtttcctgtcctctaatgtttaaaatagtatttactgttctgagctttatcctcccccgttaagcataaagaacactggtctgagaactaggagacctaagttctagtcctggctttcctggtaacttaagcgttatgccctttgacaactgtcttcatgtctctgcttgttagcactctcatctgtaaaatgaagaggttggcccaggtcttctccaactctgattctgtaatttggactcttggttccaaaaatattgatttccccactccaaccaccaagagaactatttaccctgtttgtagtgtacacaaccttttcttttgtaagtcatatttacctagattttgttcaagaaaatctgggtcccacttagctgttttagaaactagtacagacagagactctcctgaggaaattagagcttttatgattagaaacatgcttgtctaaaaatgagggtcttagaaatcacaacattgacccttatgatgttgccccttaagctaatagtgtaattccttactggtagttaaaaatctaaagtggactgaagtgatcttgaatcttcaaagagaggaaaactgtgctggaaaatgttattgtttcattgatgccttcaaaaaaatgcgtattaaacaaagactatactccagattttcttctgggcattggggaagcaaacaaaatagacttaaaaatcctcatgttcatgaagcttacattctagtagaaggagtaaggcaataaacataagtaatttatgttagaaaatgttaagtaggatggaaaagtgtagattatggtaaggtaaatcttttgtttgttttcttaagagaagaacaatgtttaaaagagtgatcaagcagggcatggtggcatgaccctattagtcccagctacctgggaggccgaggtgggagggtcacttgagcccaggagtttgtggctgcagtgagctgtgattgcaccactgcactccagcctggatggcaaagcaagacctcgtctctggaaaaaaagaaaagaaaaagtgatgatcagggtaggcttcattaggaaggtcacatttgcatgaacactttgccttttctttctttttatgaaagttttaaacatagtttttttgttttttgtttttgagacggagtttcactcttgttactcaggctgcagtgtggtggcaggatctcagctcactgcaacctccaccttccagtttcaagtgattctcctgcctcagcctccccagtagctgggattacaggcatgtgccaccacacccagctaattttgtgttttgagatggggtttcaccatgttggtcaggctggtctcgaactcctgatttgaggtgatccgttggcctcggcctcccaaagtgctgggattacaggcatgagccaccacgcccagcctaaacatacagtttaataaatcctccttgtaccttacccagcttctgtatttctttaatcaagggagaagaattatctaaaaggacagttgcccaatgggcttgagctgatgatagtggcaaagaatttcattttttaaaaatgcataccacctgccctttataaaaaaatttaaaccctaatgtatttaattttataattcataaaaatttaaatattggaactaagaacagagcaaagcaaagggaaaaagcactcctttgttttcaaattgcacaaactgtccctggagattctgatagtctctcatctctcttaactatcactgtaaacaacatagaaagcataagactgcaagaagtcagttatacacaaaacaaaatgaagcacagtggaattttctctttctttatctgtatatttctgaagttggtaaagcaactatcttctctattttacagaagagaaagctgagacccaaaaagctattcatagtgatagagctagaactaaaactcagatctcctcatctcagcccagtcttctcagtagctcagactgctttctataatgaacaagaaagaataattagggatttgtattttggcacaaaacagtatcaaatttttattgtaaaaatccacaaatctgacattttatcttttattctagccaggatgtattcttcatttgcatgtgtgtgtttctcttagaaagtggtgctctcaaacctttcaaagcacagaatttattgtaccctctttatttttaccaaattgaaacgtttcaggatttcagaagcaaagtgcaatccaattgtggctggagttttcctgatagaggatccgggtggttccctcccctccaacttctggctactgccctttatttcctttgtgcaatagaattccctgaaacagattatgtcgtaattatactgatttagtcaggataatgggaaaagcgacaaatcggatttatgtattaggtattatggagctttctttagcactctcctccaagtttaatctctgacatgtgtgatatagtaactttctgtctctgagaagcagtttggacccagctgaaaaattttatttatggagacttgtaatcagcctgatatacagagaacactctggactggaaatatagtcaggtaccaaggtctgctaatttggccattgccagtgattcaaaaccacctccccaccctgagtaaaagatttgatatgaatatgaatgctatgagtctcctggtgatgttttgggtgtatatgttcctgtgtgtgtttggaaatcatagagggtatttaccttgagggctcttttgttgaccttatttatttgaaattcttattttatttgtaatggcatatgtatatttttgtgatgctacatgcaatctctgtgtatactttttgtatatatgtatacatatttgtaaatatattggtatgcagtgatacagtatgtgtatattatgtacccatacccattgtgggctgaatttatttaagttctgtgaggacatcctagtggcattgttcatgctgctgtaattaggttgtggctgtatctcattcataagcctctattttgagaggcttgtgtttggataaaatgggctaatttggagttgaaattaggatatgaagatcttaacagaaagctagatatttattcttagctttaaaatcacctgcaaatttttatttaaactgatgataaattagtgatataacctgaaaaacctaagtatgtgaaactgagacaccagcagattcttaggctgtagtagtcctttattttcttgatccatatttaagtattattactgagtagtaaattatgtatattggggcttaatagagaggctgtggaaaaaaattgctttaatcacatttaaaaacataggaaaatgtccattaaataggggaaatatattcccagttgtcatttttatgcctcatactgaattttgattttggaacaattcttttttcatcagtgttttatgtgtctctatgaggcagaaaagggggcattagctaagggatggcctaacctaagtaggataggatttagtgaggaacgggaggttgttaatttgtatatttgcagcagctatgattaatttagtcctgtcttggcatttccggctacagattttttcttactggacttgcatatcaaaggtgagtaggctcatctgagaaaatgcttccactgaataaaatgccttcactcgtattgctgtgtctctatgagaccacttgtgttctgcaagttgatgatatattcgcacatgaagtagagtttttaatattagatgcatggtgtgctataaaaatctgggccttcaaacctctcccaaggatgatagggttggggaggataagaggatagtaaatacgtgcaatgccaatttgtgaacctatagaatgttgccaagtatcaatgtttggttacttcagttgacatatttatttgcatgaaagagtgtaggagatgtttaatatacacttaaatacattcactgcagaaattaagtagaggttatttttgcatgataaaatataactgcaaagcaactttttacaccgtattctttggaagattaaatctatctgatccaatattatcttaaaatagagaaattatctcaggagtctgttttaccacccaaaaaaatgttacatttgctgattcattatattttaaataaaacagccaactattcataagacttttcaattatagtattaaattcagaaataattataacagcatttttcttgaataaatattaaaatttggtaatttattatttctgaaaaatcagtgaaaacatccataggatctgatggtttgttgtttgaataaccaaatcattgtttttgcactggagagtagtagagcagatattataccatttaaaattcatggaactgactcaggctccttgtggatattaatttgaggacagtagtggtaatcaaaagtacagtagaaaacacttgacattgtgaatgtgacctctgaccccaaccgttgtaaagccaataactttgagggtgaataaggtaacacttgcttagaaaacccagccctttcccccagtctcctgcgctcttatacattgatactttacaactatttttgctgtacctctcagtctttcctggataatgggaccacttaaaaaaaaaagtgattcatcttcctcaaactagaatttcaaagcctaatactacactatgttccagcttcactgagttttgaacaaaaagacttaagcatgccttgtgtttaaggaaaaataattgatgtgtgaatggaatcaatcacctattgacgggaagggtgtcaggatgatgtagggtgatatgcctttaattggataaagagaactgtattaagtataactaatttaataactgattgaagcaccattcttaattttaaaatatttttgttaatttcttttgtggttttaaaaattaataatttttttttttttgagatggagttttgctcgttgcccaggctggaatgcaatggcgcgatctcagctcactgcaacctccgcctcctgggttcaagagattctcctgcctcagcctcccaagtagctgggattacaggcgtgtgccaccacgaccagctaattttgtatttttagtagagatggggtttcaccatgttggccaggttggtctcgaactcctgacctcaagtgatccacccgcctcggcctcccaaagtgctgggattacaggtgtgagccactgtggccggcctaaaaaaaattctttttaatagttatcagactactttaaccagtgccatgtttaaacatacttggacaatagactcagtttttttaatagtttgaagtacattatattaaaactacaaactcacttattcaagcctaaatttcatcatagactataaattgggtatcaatttcctattttggtggacaattccagtctgtctactacgacaatcatctttttaggtgtaatattgtttaagacataggtaattttaggttttatacttttctcctaggcttatggaatgaaagctaataggatatcactttcagaatgaaatagggaattatggctagccttcttatagggctgccgtaaatgatacttaaatgtttgttatatcactgattttcttttctcttctgaagctgttgtgaatgtccactttgccatgattaaaagttgagatttgtaaacattacaatttgaaccataaattttctcaaacatgaaatcagtatgaataagtataaaatttgaaatgatcatacatgagaatcccaaaagtaaatacttccaaaccatagagggataaccactgtatttttaaaaagcttatttccacccttaaagaagcatgctactaattgctttttttctaaattaaaactatgtactgtggtaaattaaaaatctgcaggaaaaattgcttagtgttttagcacaataagaatttttattactcaggagttggagaccagtctgggcaatacagtgaaaccctgtcgctactaaaatacaaaaaaaaaaaaaaaaaaaaaaaaattagccaggcatggtggtgtgcgcctgtaatcccagctacttgggaggctgaggcaggagaactgcttgtaacctgggaggcggaggttgcagtgagccgagatcgtgccattgcactccagtctgggtgacagagcaagactcattctcaaaaaaaaaaaaaaaaggaatttttattactatttcctgaagaatggtttttgttaacttgttactgtatcattaaaaagaccttctaatggttcagtacaataatctagaacttgatttatgtggctttttatagttatctgaatgcattccttttgccacatagaccatatggctagttctccaacttttttgcttatttttaataaaccttgctgttcaacaatcagagaaacctttagattttggatgattcttccagttgaggtagaaacatcttagataataggaaaggcaaatacaaagtcctaacattttcatagtagagtttacaagtaaaataacttatccatataggttatcttcgttgtgtagcaccagtataaatagtgatttcattaatcattgaatcagatgaagcagttataaatcactttttactttgtgctaagaattattgtaatttcaggacactttattatttcctctgagcagtttccattggaaggttgagtttcccttttttaagttctaatcatcactaaaggttaagataatcaaataggagttaaaataagttatgtttgatctttttcccttgaaaataatgctgaacttattgtctacattctgattattaggcagaaatgcacttgtttaaatcatagaagtaattcatttggaggatataattactcgattttctagtggtgtgaaatactttttaacaattgtgcttgtctgtaactgaaatgttatagaattttaacactatagggattatagagttatattagctctcctcaagagactgaagcacaatatttttcatgtaacaattcttatccaagtgctgctaatctgtcgtgcaaataatgaagctatttggttgcctatttagctattcacaaatcactgtaatctttgaaacaatcttgtcgttcatttgtattaatatttggatattgtgagttaatactttagaaaaaaatccatcaactcagccccgttagcaaaactgtttggattcatagtttttatatgtgttaacagtagaataaattttgaaggggctatttactaccaatgactaaggggaaaattatactgtcactatcatttgacttgaacatttgtggtattgtaaaagtcttgtcagttgtgttctaaattgcttaagccatacgttctcttaaacaggatgtttttttcttcctttccagcagcctttttcttctttgtctgttatggttaatactccatagattttagaaattgagaagttcttgaaacattttattttcttgagttcatcacttttgactcttgtatgagatgtgatttgtcataaaagatagccttccactacttcactaaatgaatttcagagtaaacactgtgattctgcagagcggattcagtaggctttccaatgttttctcctgctatacagtgcctaccaccttgagggcacttcagtactagaggatgaaaactgaaacgttgttttgatgtttattgaataacgagattagagaatatttgatttttgttgtcagtgtattaaagaaattttcacattgataaatgttctctaggaatgtgtctacattcatcaggtgtgaactcttgtacatgaattttgtaccttgaatccacatatatattaagtgtatcatcaatataaaaataaacattatttgcttaaa

SEQ ID NO: 187551 - DNA, 1968 bp, Homo sapiens
  Payload ID: 16914
  Gene Symbol: SCAI
  Gene Name: suppressor of cancer cell invasion
  Uniprot ID: Q8N9R8
  ENST ID: ENST00000373549
  CDS Start-End: 60-1949
agcttcccgagcgagccctgcggccgccggagcagctcccgcggcggagcaggagccggatggtcagaggagcccggcagccccagcagccgcggagtcgcctggcccccagactgactggcacagtggagaaaccgcctcgaaaacggagaagcagtatcagaggttctggtgatagcagtcattcacaatctcaaggggaaagatatcaacatttcactgaaaagactgaatttgctcttaaagaaatcatgtcctctggaggtgctgaagatgatatcccacagggagagaggaaaacagttacagatttttgttatcttctggataaatctaagcaactgttcaatgggttaagagatttgccacaatatggacagaagcagtggcagtcctattttggaagaacttttgatgtttacaccaaactctggaagttccagcagcagcatcgacaagtcttggataatcggtatggcttgaagcgctggcaaataggagaaattgcttccaagattgggcagctatactatcattattacttacgcacatcggaaaccagctatctgaatgaggctttttccttctattctgcaatcagacagagatcatattattctcaagtcaataaagaggacagacctgaattggtagttaagaagttacgatattatgcaagatttatagtagtttgtcttcttctcaacaaaatggatgttgtaaaggatctggtaaaggaattgtcagatgaaattgaagattatactcaccgatttaatactgaagatcaagtggaatggaacttggtgcttcaagaagtagcagctttcattgaggcggatcctgtaatggtattaaatgatgataataccattgttatcacatcgaatcgccttgctgaaacaggagccccattgctggaacagggcatgattgtgggacagttgtctctggctgacgcactcattattggtaattgtaataatcaggttaagttcagtgaactaactgttgacatgttccggatgttacaagctctggaaagggagccaatgaatttagcttcccagatgaataaaccaggaatgcaggaatcagctgacaagcctactagacgagaaaacccccacaagtatctgctctacaaaccaaccttcagccagctatataccttcttagcagcgtcttttaaggagctgcctgccaatagcgtgcttctgatttacctgtcggccactggcgttttccccacaggtcgttctgatagtgaaggtccttatgattttggaggtgtacttactaatagtaaccgggatattattaatggagatgccatccacaaacgaaatcagtcccacaaggaaatgcactgccttcatcccggggatctctatcctttcaccaggaagccactgttcatcattgtggattcgtctaatagtgttgcgtataagaatttcacaaacttgtttggacagccactagtctgcttgctttctcctacagcatatccaaaagctttacaagatcaatctcagcgaggtagcctcttcactctctttttgaacaatcctctaatggccttcctatttgtctctggattgtcaagcatgcgcagaggcctatgggaaaagtgtcaagaatatcttcgaaaaatcaaccgtgatattgcccagctactgactcattcacgttcaatagatcaggcatttctccagttttttggagatgaatttcttcgcttgctcctcacaagatttatcttttgttcagccaccatgaggatgcacaagatttttcgggaaacacgaaattatccagaatcatatccacaactgccaagggatgaaacagtggagaatcctcatctccagaagcacattttggaattagcatccattctggatgttcgaaacgtgttctttgagaataccattgatgactattaaaacaaaaaccctgttgtcg

SEQ ID NO: 187552 - DNA, 691 bp, Homo sapiens
  Payload ID: 16914
  Gene Symbol: SCAI
  Gene Name: suppressor of cancer cell invasion
  ENST ID: ENST00000467917
  CDS Start-End: 1-265
caaacgaaatcagtcccacaaggaaatgcactgccttcatcccggggatctctatcctttcaccaggaagccactgttcatcattgtggattcgtctaatagtgttgcgtataagaatttcacaaacttgtttggacagccactagtctgcttgctttctcctacagcatatccaaaagctttacaagtgctgatgtctctctgtgggagatggcattttactgctacttcccagccagaagtcctgtctgctgacatagtttgacacaggaagtgatggtcagcatttgaatgcctgagagaagctggaggctttcaccgttgttttaagatcaatctcagcgaggtagcctcttcactctctttttgaacaatcctctaatggccttcctatttgtctctggattgtcaagcatgcgcagaggcctatgggaaaagtgtcaagaatatcttcgaaaaatcaaccgtgatattgcccagctactgactcattcacgttcaatagatcaggcatttctccagttttttggagatgaatttcttcgcttgctcctcacaagatttatcttttgttcagccaccatgaggatgcacaagatttttcgggaaacacgaaattatccagaatcatatccacaactgccaagggatgaaacagtggagaatcctcatctccagaagcacattttgg

SEQ ID NO: 187553 - DNA, 562 bp, Homo sapiens
  Payload ID: 16914
  Gene Symbol: SCAI
  Gene Name: suppressor of cancer cell invasion
  ENST ID: ENST00000494102
  CDS Start-End: 1-99
aatttcacaaacttgtttggacagccactagtctgcttgctttctcctacagcatatccaaaagctttacaagggactgggtctcaccatgttgcctaggctggtctcaaactcctgggctcaagagatctgcctgccttggcctcccaaagtgctattcaacatttattatcagatcaatctcagcgaggtagcctcttcactctctttttgaacaatcctctaatggccttcctatttgtctctggattgtcaagcatgcgcagaggcctatgggaaaagtgtcaagaatatcttcgaaaaatcaaccgtgatattgcccagctactgactcattcacgttcaatagatcaggcatttctccagttttttggagatgaatttcttcgcttgctcctcacaagatttatcttttgttcagccaccatgaggatgcacaagatttttcgggtaggcaaagaacattattaaagacgaattttatcattttaggtatttaagaaccatgtattatattttacctgtataaaataaggttataataaaataatattattttgga

SEQ ID NO: 187554 - DNA, 1808 bp, Homo sapiens
  Payload ID: 16914
  Gene Symbol: SCAI
  Gene Name: suppressor of cancer cell invasion
  ENST ID: ENST00000477186
  CDS Start-End: 51-1523
agcgagccctgcggccgccggagcagctcccgcggcggagcaggagccggatggtcagaggagcccggcagccccagcagccgcggagtcgcctggcccccagactgactggcacagtggagaaaccgcctcgaaaacggagaagcaggactgaatttgctcttaaagaaatcatgtcctctggaggtgctgaagatgatatcccacagggagagaggaaaacagttacagatttttgttatcttctggataaatctaagcaactgttcaatgggttaagagatttgccacaatatggacagaagcagtggcagtcctattttggaagaacttttgatgtttacaccaaactctggaagttccagcagcagcatcgacaagtcttggataatcggtatggcttgaagcgctggcaaataggagaaattgcttccaagattgggcagctatactatcattattacttacgcacatcggaaaccagctatctgaatgaggctttttccttctattctgcaatcagacagagatcatattattctcaagtcaataaagaggacagacctgaattggtagttaagaagttacgatattatgcaagatttatagtagtttgtcttcttctcaacaaaatggatgttgtaaaggatctggtaaaggaattgtcagatgaaattgaagattatactcaccgatttaatactgaagatcaagtggaatggaacttggtgcttcaagaagtagcagctttcattgaggcggatcctgtaatggtattaaatgatgataataccattgttatcacatcgaatcgccttgctgaaacaggagccccattgctggaacagggcatgattgtgggacagttgtctctggctgacgcactcattattggtaattgtaataatcaggttaagttcagtgaactaactgttgacatgttccggatgttacaagctctggaaagggagccaatgaatttagcttcccagatgaataaaccaggaatgcaggaatcagctgacaagcctactagacgagaaaacccccacaagtatctgctctacaaaccaaccttcagccagctatataccttcttagcagcgtcttttaaggagctgcctgccaatagcgtgcttctgatttacctgtcggccactggcgttttccccacaggtcgttctgatagtgaaggtccttatgattttggaggtgtacttactaatagtaaccgggatattattaatggagatgccatccacaaacgaaatcagtcccacaaggaaatgcactgccttcatcccggggatctctatcctttcaccaggaagccactgttcatcattgtggattcgtctaatagtgttgcgtataagaatttcacaaacttgtttggacagccactagtctgcttgctttctcctacagcatatccaaaagctttacaagcatgcgcagaggcctatgggaaaagtgtcaagaatatcttcgaaaaatcaaccgtgatattgcccagctactgactcattcacgttcaatagatcaggcatttctccagttttttggagatgaatttcttcgcttgctcctcacaagatttatcttttgttcagccaccatgaggatgcacaagatttttcgggaaacacgaaattatccagaatcatatccacaactgccaagggatgaaacagtggagaatcctcatctccagaagcacattttggaattagcatccattctggatgttcgaaacgtgttctttgagaataccattgatgactattaaaacaaaaaccctgttgtcg

SEQ ID NO: 187555 - DNA, 1225 bp, Homo sapiens
  Payload ID: 16915
  Gene Symbol: SOCS1
  Gene Name: suppressor of cytokine signaling 1
  Uniprot ID: O15524
  ENST ID: ENST00000332029
  CDS Start-End: 152-787
agctgcacggctcctggccccggagcatgcgcgagagccgccccggagcgccccggagccccccgccgtcccgcccgcggcgtcccgcgccccgccgccagcgcacccccggacgctatggcccacccctccggctggccccttctgtaggatggtagcacacaaccaggtggcagccgacaatgcagtctccacagcagcagagccccgacggcggccagaaccttcctcctcttcctcctcctcgcccgcggcccccgcgcgcccgcggccgtgccccgcggtcccggccccggcccccggcgacacgcacttccgcacattccgttcgcacgccgattaccggcgcatcacgcgcgccagcgcgctcctggacgcctgcggattctactgggggcccctgagcgtgcacggggcgcacgagcggctgcgcgccgagcccgtgggcaccttcctggtgcgcgacagccgccagcggaactgctttttcgcccttagcgtgaagatggcctcgggacccacgagcatccgcgtgcactttcaggccggccgctttcacctggatggcagccgcgagagcttcgactgcctcttcgagctgctggagcactacgtggcggcgccgcgccgcatgctgggggccccgctgcgccagcgccgcgtgcggccgctgcaggagctgtgccgccagcgcatcgtggccaccgtgggccgcgagaacctggctcgcatccccctcaaccccgtcctccgcgactacctgagctccttccccttccagatttgaccggcagcgcccgccgtgcacgcagcattaactgggatgccgtgttattttgttattacttgcctggaaccatgtgggtaccctccccggcctgggttggagggagcggatgggtgtaggggcgaggcgcctcccgccctcggctggagacgaggccgcagaccccttctcacctcttgagggggtcctccccctcctggtgctccctctgggtccccctggttgttgtagcagcttaactgtatctggagccaggacctgaactcgcacctcctacctcttcatgtttacatatacccagtatctttgcacaaaccaggggttgggggagggtctctggctttatttttctgctgtgcagaatcctattttatattttttaaagtcagtttaggtaataaactttattatgaaagttttttttttaaaaaaaaataa

SEQ ID NO: 187556 - DNA, 2761 bp, Homo sapiens
  Payload ID: 16916
  Gene Symbol: SOCS2
  Gene Name: suppressor of cytokine signaling 2
  Uniprot ID: O14508
  ENST ID: ENST00000340600
  CDS Start-End: 599-1195
cttcccatagccgcggcctcaactaaaagtggccattgacctttcaagctttcgagcagtgatgcaatagaatagtatttcaaagaaaaatgcttatcgaaattttggatccggttttcccgtgattgttaagggtttcttttaaaaagtaggtcacatttcaagtaggtcatatttcgggggcgggtgcgcagacaaggagatgagtttccactaaggccagggggcctccaacggggttggaggtgagaatcccaggtagggtagaggtgccgagatccttccgaatcccagccctggggcgtcagccctgcagggaatggcagagacactctccggactgagggaaccgaggccagtcaccaagccccttccgggcgcgcaggcgatcagtgggtgaccgcggctgcgagggactttgtcatccgtcctccaggatctggggagaaagagccccatcccttctctctctgccaccatttcggacaccccgcagggactcgttttgggattcgcactgacttcaaggaaggacgcgaacccttctctgaccccagctcgggcggccacctgtctttgccgcggtgacccttctctcatgaccctgcggtgccttgagccctccgggaatggcggggaagggacgcggagccagtgggggaccgcggggtcggcggaggagccatccccgcaggcggcgcgtctggcgaaggccctgcgggagctcggtcagacaggatggtactggggaagtatgactgttaatgaagccaaagagaaattaaaagaggcaccagaaggaactttcttgattagagatagctcgcattcagactacctactaacaatatctgttaaaacatcagctggaccaactaatcttcgaatcgaataccaagacggaaaattcagattggactctatcatatgtgtcaaatccaagcttaaacaatttgacagtgtggttcatctgatcgactactatgttcagatgtgcaaggataagcggacaggtccagaagccccccggaacggcactgttcacctttatctgaccaaaccgctctacacgtcagcaccatctctgcagcatctctgtaggctcaccattaacaaatgtaccggtgccatctggggactgcctttaccaacaagactaaaagattacttggaagaatataaattccaggtataaatgtttctctttttttaaacatgtctcacatagagtatctccgaatgcagctatgtaaaagagaaccaaaacttgagtgctctggataactatatggaatgctttctaagaacagctgaagctaatctaatttaaatttaacagcttgaagaggtagctaggtgtttaaagttcctccagatacttttacctgagtgatgcttcccttcctaaggctgaccaagacctgttgatccttttagattaaaaataaaatgtcgcatgtaaaggctgaagtcgcgttttatcagaatgccttgccttcttaggttcttttccattatgtcaaaggtccaggctccagtaggagagaaagaactcctcataggaatactgaagaagtgggaaggaaccaagctgacacaggcctcactgcaatttgatatgcctgctgatcagagtctcttgggcattttatattttgcattctgatgtacctaggagttttgttaaacagatgatgtatgtgagtatttatcccattttatgcaattaaccaaatcaaccaaaaaaagtgaccatgaagtcctgtatttgtctttttactacatgtaggaactctcatgtgaatgagtactgtagtaatccattctatgggagccttatttcagaaatatttcaaactggtgcaaatggaaaagactttctcttttcctttaaagctaaagacaagaatatcatgctatacaggtgcaactcaatccccgttaataaaaaccaatgtaggtataggcattctaccctttgaaatagctgtgtcccaacctgttgccattgattttttggaaatggctttagaaatatccaagttgtccttgaattgtctaaccatggacataaacagttgtctcccttctactgtgtagaatactttgacttaattttcttccagatacagggggatacctgcctgtttttcaaagtgtttatttactgctgttactatttgattagaatgtattaaataaaaaaaacctgatttctacaagttgcacttattgagttctagagaacgtacactttcatggtaatagaggattgccataaaaacttacgtcaagtgaaataagccaattattcaacaaaaggtagaacattacttgccattctgtaaagttatgggctgtacctgccccctttgcaatttggaaagcatggtttagaaactacaggcattgtcaagtggccgggtcttttataatttgaataggcataacactgatgtcctctgtgtttccaaaaacatggtttagaaactacaaacattatgacatggccagtcttttacaagttgagtaggcataatactaaagaaaaatacaaagttttgtggccacttattttttgctatgttagtctgcataactgttataaatgtaccatcttttctagagtccagacattatttattttatggctttaaaattttcctgcatagctacaatcctgtggtgtgtcaccataaaggtggaccctgtgtgaatgagaaaattcagttataaattgtaataaaacctgcttactgga

SEQ ID NO: 187557 - DNA, 1065 bp, Homo sapiens
  Payload ID: 16916
  Gene Symbol: SOCS2
  Gene Name: suppressor of cytokine signaling 2
  Uniprot ID: O14508
  ENST ID: ENST00000536696
  CDS Start-End: 451-1047
caagggaggcgcgtcggtctgggaagtcgcgcgcactcgctgctcctgggaccgacgtttaactcttgccaagtctcgtcgcagccgccgcggctggcgggccttgggcttcccctgaagcatgagccctctcgcccgcagccaccctcaccgcgtggcccgcggacagtgcgcgccggggtcccgggtgcacagcctcaggataccccgtgcccgcagctcgggcgcccgcggcaggcgatcagtgggtgaccgcggctgcgagggactttgtcatccgtcctccaggatctggggagaaagagccccatcccttctctctctgccaccatttcggacaccccgcagggactcgttttgggattcgcactgacttcaaggaaggacgcgaacccttctctgaccccagctcgggcggccacctgtctttgccgcggtgacccttctctcatgaccctgcggtgccttgagccctccgggaatggcggggaagggacgcggagccagtgggggaccgcggggtcggcggaggagccatccccgcaggcggcgcgtctggcgaaggccctgcgggagctcggtcagacaggatggtactggggaagtatgactgttaatgaagccaaagagaaattaaaagaggcaccagaaggaactttcttgattagagatagctcgcattcagactacctactaacaatatctgttaaaacatcagctggaccaactaatcttcgaatcgaataccaagacggaaaattcagattggactctatcatatgtgtcaaatccaagcttaaacaatttgacagtgtggttcatctgatcgactactatgttcagatgtgcaaggataagcggacaggtccagaagccccccggaacggcactgttcacctttatctgaccaaaccgctctacacgtcagcaccatctctgcagcatctctgtaggctcaccattaacaaatgtaccggtgccatctggggactgcctttaccaacaagactaaaagattacttggaagaatataaattccaggtataaatgtttctctttttttaa

SEQ ID NO: 187558 - DNA, 2391 bp, Homo sapiens
  Payload ID: 16916
  Gene Symbol: SOCS2
  Gene Name: suppressor of cytokine signaling 2
  Uniprot ID: O14508
  ENST ID: ENST00000549122
  CDS Start-End: 768-1364
gcggctctgccccgcggcctagcgttgctgcctgctttctccagccccttctcggcgtctggaagtgtctggagtttcttttttttatttcccctaaactgccattcaaattaataatcctcctaataacctgatctcccgctcctccccaccggcctgcctcccgccctcgctccttcctccctccctccctctctccttcccacctccagggtcgcagccggagggaaacccggcagcagtccgagagtggaggtgtcccagcccgtagggggcgtcgccgcgcggtgggggatggggtcgaggcaatgatcctcgaggcttttgtgtgccctctgcgcacggaactccgaccgccgcctccgagcgcggggctggttgcatccccgggcatctcgttcccaaattaaacgttaacgggggaaacaagggcagacgcccctcctctcccgggcccctcccacctccccttttccccccacccccccgccccatgtccgctgaggaggctgcctggtgcggaggcggcggcggcggccgcggccgaggtcgaggcgatcagtgggtgaccgcggctgcgagggactttgtcatccgtcctccaggatctggggagaaagagccccatcccttctctctctgccaccatttcggacaccccgcagggactcgttttgggattcgcactgacttcaaggaaggacgcgaacccttctctgaccccagctcgggcggccacctgtctttgccgcggtgacccttctctcatgaccctgcggtgccttgagccctccgggaatggcggggaagggacgcggagccagtgggggaccgcggggtcggcggaggagccatccccgcaggcggcgcgtctggcgaaggccctgcgggagctcggtcagacaggatggtactggggaagtatgactgttaatgaagccaaagagaaattaaaagaggcaccagaaggaactttcttgattagagatagctcgcattcagactacctactaacaatatctgttaaaacatcagctggaccaactaatcttcgaatcgaataccaagacggaaaattcagattggactctatcatatgtgtcaaatccaagcttaaacaatttgacagtgtggttcatctgatcgactactatgttcagatgtgcaaggataagcggacaggtccagaagccccccggaacggcactgttcacctttatctgaccaaaccgctctacacgtcagcaccatctctgcagcatctctgtaggctcaccattaacaaatgtaccggtgccatctggggactgcctttaccaacaagactaaaagattacttggaagaatataaattccaggtataaatgtttctctttttttaaacatgtctcacatagagtatctccgaatgcagctatgtaaaagagaaccaaaacttgagtgctctggataactatatggaatgctttctaagaacagctgaagctaatctaatttaaatttaacagcttgaagaggtagctaggtgtttaaagttcctccagatacttttacctgagtgatgcttcccttcctaaggctgaccaagacctgttgatccttttagattaaaaataaaatgtcgcatgtaaaggctgaagtcgcgttttatcagaatgccttgccttcttaggttcttttccattatgtcaaaggtccaggctccagtaggagagaaagaactcctcataggaatactgaagaagtgggaaggaaccaagctgacacaggcctcactgcaatttgatatgcctgctgatcagagtctcttgggcattttatattttgcattctgatgtacctaggagttttgttaaacagatgatgtatgtgagtatttatcccattttatgcaattaaccaaatcaaccaaaaaaagtgaccatgaagtcctgtatttgtctttttactacatgtaggaactctcatgtgaatgagtactgtagtaatccattctatgggagccttatttcagaaatatttcaaactggtgcaaatggaaaagactttctcttttcctttaaagctaaagacaagaatatcatgctatacaggtgcaactcaatccccgttaataaaaaccaatgtaggtataggcattctaccctttgaaatagctgtgtcccaacctgttgccattgattttttggaaatggctttagaaatatccaagttgtccttgaattgtctaaccatggacataaacagttgtctcccttctactgtgtagaatactttgacttaattttcttccagatacagggggatacctgcctgtttttcaaagtgtttatttactgctgttactatttgattagaatgtattaaataaaaaaaacctgatttctacaa

SEQ ID NO: 187559 - DNA, 744 bp, Homo sapiens
  Payload ID: 16916
  Gene Symbol: SOCS2
  Gene Name: suppressor of cytokine signaling 2
  ENST ID: ENST00000548091
  CDS Start-End: 317-744
cgcagctcggagcgccggggaagagagagtccgaaccgcggctctgccccgcggcctagcgttgctgcctgctttctccagccccttctcggcgtctggaagtgcgatcagtgggtgaccgcggctgcgagggactttgtcatccgtcctccaggatctggggagaaagagccccatcccttctctctctgccaccatttcggacaccccgcagggactcgttttgggattcgcactgacttcaaggaaggacgcgaacccttctctgaccccagctcgggcggccacctgtctttgccgcggtgacccttctctcatgaccctgcggtgccttgagccctccgggaatggcggggaagggacgcggagccagtgggggaccgcggggtcggcggaggagccatccccgcaggcggcgcgtctggcgaaggccctgcgggagctcggtcagacaggatggtactggggaagtatgactgttaatgaagccaaagagaaattaaaagaggcaccagaaggaactttcttgattagagatagctcgcattcagactacctactaacaatatctgttaaaacatcagctggaccaactaatcttcgaatcgaataccaagacggaaaattcagattggactctatcatatgtgtcaaatccaagcttaaacaatttgacagtgtggttcatctgatcgactactatgttcagatgtgcaaggataagcggacaggtccagaagcccc

SEQ ID NO: 187560 - DNA, 984 bp, Homo sapiens
  Payload ID: 16916
  Gene Symbol: SOCS2
  Gene Name: suppressor of cytokine signaling 2
  ENST ID: ENST00000549887
  CDS Start-End: 501-984
gcggccgaggtcgaggtaagagcgcggcgttggtggtttgcattttccgcagcgctcgcgaccgcccgctcggccccggcctcgcctcggagccccgcgagggctgcgcgctcgggccgattcctcgacagcgcccgcggcggcgagaaccaccgcagccatcctggtccgggagcgaccgccgcggcacccccaaccccgccagagcgggcaccaggaagcggggggaggggagcgaggagcctcccgggcggagatgcggcagctcccgcacctccgcaccccgggcgatcagtgggtgaccgcggctgcgagggactttgtcatccgtcctccaggatctggggagaaagagccccatcccttctctctctgccaccatttcggacaccccgcagggactcgttttgggattcgcactgacttcaaggaaggacgcgaacccttctctgaccccagctcgggcggccacctgtctttgccgcggtgacccttctctcatgaccctgcggtgccttgagccctccgggaatggcggggaagggacgcggagccagtgggggaccgcggggtcggcggaggagccatccccgcaggcggcgcgtctggcgaaggccctgcgggagctcggtcagacaggatggtactggggaagtatgactgttaatgaagccaaagagaaattaaaagaggcaccagaaggaactttcttgattagagatagctcgcattcagactacctactaacaatatctgttaaaacatcagctggaccaactaatcttcgaatcgaataccaagacggaaaattcagattggactctatcatatgtgtcaaatccaagcttaaacaatttgacagtgtggttcatctgatcgactactatgttcagatgtgcaaggataagcggacaggtccagaagccccccggaacggcactgttcacctttatctgaccaaaccgctctacacgtcagcaccat

SEQ ID NO: 187561 - DNA, 3733 bp, Homo sapiens
  Payload ID: 16916
  Gene Symbol: SOCS2
  Gene Name: suppressor of cytokine signaling 2
  ENST ID: ENST00000548537
  CDS Start-End: 425-733
ggaactccgaccgccgcctccgagcgcggggctggttgcatccccgggcatctcgttcccaaattaaacgttaacgggggaaacaagggcagacgcccctcctctcccgggcccctcccacctccccttttccccccacccccccgccccatgtccgctgaggaggctgcctggtgcggaggcggcggcggcggccgcggccgaggtcgaggcgatcagtgggtgaccgcggctgcgagggactttgtcatccgtcctccaggatctggggagaaagagccccatcccttctctctctgccaccatttcggacaccccgcagggactcgttttgggattcgcactgacttcaaggaaggacgcgaacccttctctgaccccagctcgggcggccacctgtctttgccgcggtgacccttctctcatgaccctgcggtgccttgagccctccgggaatggcggggaagggacgcggagccagtgggggaccgcggggtcggcggaggagccatccccgcaggcggcgcgtctggcgaaggccctgcgggagctcggtcagacaggtagggagccgatcggccgcgacgcgtgcgggagggagcgcctccccaaggaagcagctaggaagcggggtcgaggtgggaagcaaagaataagatggaaatacgtcccttgcttccaagggaccgcggagagcacgctcgcagggtcctgggtccttgggaatgcgtaaggaaagtggttctccagggactcaggcctggcggagcgcagagcgcgggaagagcttcttggaaatagcttcttagcacgctggaagatttactgttttccgcagctgctcagggttaggctcccgggctcgaaccccggccggggaaagcgtcgggcgcctccctttgcacggggtgcaatcagcaagtcggtgccgcgggccccgcaggcccagcagcatctggctcccgggcggagctgcggctgcagcccaggatcttggcggccaagttcagggactgacactgccgcgagggcggctgcccgggcgtcgagagtaggctgcgaagcccccgccgagcgcggcttccatggtcggcgcgcccagggtactgccgctttcaagtacagtcaggcaattcgcgcggcacgctgtctctaggcatctgaaaaaagaaaaaagaaaaaaagtaaagtatctggcaaatcattctggctttccaaatccgtatcctaaaagcttacagttgtggcacagttgaaattttggtagcaacagggggagggagagggaaaagttctctcgcttgcgattccggtctttccgtgtgggccacgggctttccctcccggggaggcaccggcagattgcaagtatcccggtaattgtgggggtggggggagcacaaatgttcagacttcttaaatacggacggtctctgagccttcttagaaagcagagtgggccggggagatggtgcaggcagatgaaatcaagaatgcaggggagatggatggttgtgattgggtttggattagggcaaagttcaaaagagtttagggaagattgtaaacttgaagtagtaattatcacttgggaattcccatttcttagtgactggtaaggtagtcataaagcagcgaacagaagctattgtactagagctgtgcttttacaacaagtacatagcagtgctttctacatagaaggctgttcatagcaggctttgcagattctttttttttttttttttttttttttggtggggggcacaccaaccatccaaaaaagttgcttctgtttttactgtagttcaattacaggagttgggttttccactttttaaagggcatggcttttatttctaacttctgatttttttctaatttacctaaatctttattttacttaaataatgttaaaagtgtcatgcttcatcagccagtgtgtcatgctgcagatgttcttttggttcattagaagaaaatcttaagaagagcttcagaaagttgattttttaaaaaagaaagaaaactggctcgccgtttgtgttcataaaatggacccaaatttttattaaattcctactgaaagtatttgtggtggcccggtaaactttcgctcacacaccaccttttttttttttcttttttagagctaaaaaaattattgccaattacttgctctgttctaagaattcttataataactgttttaccctcttttctttttctttttgaacaaaaaccccaggatggtactggggaagtatgactgttaatgaagccaaagagaaattaaaagaggcaccagaaggaactttcttgattagagatagctcgcattcagactacctactaacaatatctgttaaaacatcagctggaccaactaatcttcgaatcgaataccaagacggaaaattcagattggactctatcatatgtgtcaaatccaagcttaaacaatttgacagtgtggttcatctgatcgactactatgttcagatgtgcaaggataagcggacaggtccagaagccccccggaacggcactgttcacctttatctgaccaaaccgctctacacgtcagcaccatctctgcagcatctctgtaggctcaccattaacaaatgtaccggtgccatctggggactgcctttaccaacaagactaaaagattacttggaagaatataaattccaggtataaatgtttctctttttttaaacatgtctcacatagagtatctccgaatgcagctatgtaaaagagaaccaaaacttgagtgctctggataactatatggaatgctttctaagaacagctgaagctaatctaatttaaatttaacagcttgaagaggtagctaggtgtttaaagttcctccagatacttttacctgagtgatgcttcccttcctaaggctgaccaagacctgttgatccttttagattaaaaataaaatgtcgcatgtaaaggctgaagtcgcgttttatcagaatgccttgccttcttaggttcttttccattatgtcaaaggtccaggctccagtaggagagaaagaactcctcataggaatactgaagaagtgggaaggaaccaagctgacacaggcctcactgcaatttgatatgcctgctgatcagagtctcttgggcattttatattttgcattctgatgtacctaggagttttgttaaacagatgatgtatgtgagtatttatcccattttatgcaattaaccaaatcaaccaaaaaaagtgaccatgaagtcctgtatttgtctttttactacatgtaggaactctcatgtgaatgagtactgtagtaatccattctatgggagccttatttcagaaatatttcaaactggtgcaaatggaaaagactttctcttttcctttaaagctaaagacaagaatatcatgctatacaggtgcaactcaatccccgttaataaaaaccaatgtaggtataggcattctaccctttgaaatagctgtgtcccaacctgttgccattgattttttggaaatggctttagaaatatccaagttgtccttgaattgtctaaccatggacataaacagttgtctcccttctactgtgtagaatactttgacttaattttcttccagatacagggggatacctgcctgtttttcaaagtgtttatttactgctgttactatttgattagaatgtattaaataaaaaaaacctgatttctacaa

SEQ ID NO: 187562 - DNA, 2072 bp, Homo sapiens
  Payload ID: 16916
  Gene Symbol: SOCS2
  Gene Name: suppressor of cytokine signaling 2
  Uniprot ID: O14508
  ENST ID: ENST00000549206
  CDS Start-End: 481-1077
acctgatcaaggggaccgcctccggtccccggccgtgggcaccgggacgagcacggcgtccccacgccatcgatgtgtcttagagccggagagtctggtttccgaggacccacagtcgctcctgcacgcccaccccccgcaaaagtgcggccaggagggtcgcatcgagggggcgccgccgggatgtttagaggaacccacccccgtggcaggccaagggccaaggatcgctatccttccctgaacccgggcgctcagctggcccgggcgatcagtgggtgaccgcggctgcgagggactttgtcatccgtcctccaggatctggggagaaagagccccatcccttctctctctgccaccatttcggacaccccgcagggactcgttttgggattcgcactgacttcaaggaaggacgcgaacccttctctgaccccagctcgggcggccacctgtctttgccgcggtgacccttctctcatgaccctgcggtgccttgagccctccgggaatggcggggaagggacgcggagccagtgggggaccgcggggtcggcggaggagccatccccgcaggcggcgcgtctggcgaaggccctgcgggagctcggtcagacaggatggtactggggaagtatgactgttaatgaagccaaagagaaattaaaagaggcaccagaaggaactttcttgattagagatagctcgcattcagactacctactaacaatatctgttaaaacatcagctggaccaactaatcttcgaatcgaataccaagacggaaaattcagattggactctatcatatgtgtcaaatccaagcttaaacaatttgacagtgtggttcatctgatcgactactatgttcagatgtgcaaggataagcggacaggtccagaagccccccggaacggcactgttcacctttatctgaccaaaccgctctacacgtcagcaccatctctgcagcatctctgtaggctcaccattaacaaatgtaccggtgccatctggggactgcctttaccaacaagactaaaagattacttggaagaatataaattccaggtataaatgtttctctttttttaaacatgtctcacatagagtatctccgaatgcagctatgtaaaagagaaccaaaacttgagtgctctggataactatatggaatgctttctaagaacagctgaagctaatctaatttaaatttaacagcttgaagaggtagctaggtgtttaaagttcctccagatacttttacctgagtgatgcttcccttcctaaggctgaccaagacctgttgatccttttagattaaaaataaaatgtcgcatgtaaaggctgaagtcgcgttttatcagaatgccttgccttcttaggttcttttccattatgtcaaaggtccaggctccagtaggagagaaagaactcctcataggaatactgaagaagtgggaaggaaccaagctgacacaggcctcactgcaatttgatatgcctgctgatcagagtctcttgggcattttatattttgcattctgatgtacctaggagttttgttaaacagatgatgtatgtgagtatttatcccattttatgcaattaaccaaatcaaccaaaaaaagtgaccatgaagtcctgtatttgtctttttactacatgtaggaactctcatgtgaatgagtactgtagtaatccattctatgggagccttatttcagaaatatttcaaactggtgcaaatggaaaagactttctcttttcctttaaagctaaagacaagaatatcatgctatacaggtgcaactcaatccccgttaataaaaaccaatgtaggtataggcattctaccctttgaaatagctgtgtcccaacctgttgccattgattttttggaaatggctttagaaatatccaagttgtccttgaattgtctaaccatggacataaacagttgtctcccttctactgtgtagaatactttgacttaattttcttccagatacagggggatacctgcctgtttttcaaagtgtttatttactgctgttactatttgattagaa

SEQ ID NO: 187563 - DNA, 1716 bp, Homo sapiens
  Payload ID: 16916
  Gene Symbol: SOCS2
  Gene Name: suppressor of cytokine signaling 2
  Uniprot ID: O14508
  ENST ID: ENST00000551556
  CDS Start-End: 993-1589
gaggtcgaggtaagagcgcggcgttggtggtttgcattttccgcagcgctcgcgaccgcccgctcggccccggcctcgcctcggagccccgcgagggctgcgcgctcgggccgattcctcgacagcgcccgcggcggcgagaaccaccgcagccatcctggtccgggagcgaccgccgcggcacccccaaccccgccagagcgggcaccaggaagcggggggaggggagcgaggagcctcccgggcggagatgcggcagctcccgcacctccgcaccccgggttggtgcctcggggccccgcagcgctttagggcggagaaccaagtttgtgtgggtgcttcttcctgggggccctcgggctgcgccaggtgtgagaccggaatgccaatttggggaatctctcctgttctttcctttttaattttttctacttgtccttgacaagggcctattcccactggatctgcaggtgactatttgctcttcctaggtcgccagtctttgatttcagctagtgaccctgggcgggaagacaccctgttcaccctcctcctgacctccgccccccacctcttcagccaactttatcttggatctctgctctctttatcttttctctagagctgggccagggcgctaactggaagcttggggttaaatggtgcaggaacgtagaggcggaggagtccctgggattttccacgtctatttccccacccccaccccagccgcaggggtccagtttggactgacccaacctcccgctttctctttgtaggcgatcagtgggtgaccgcggctgcgagggactttgtcatccgtcctccaggatctggggagaaagagccccatcccttctctctctgccaccatttcggacaccccgcagggactcgttttgggattcgcactgacttcaaggaaggacgcgaacccttctctgaccccagctcgggcggccacctgtctttgccgcggtgacccttctctcatgaccctgcggtgccttgagccctccgggaatggcggggaagggacgcggagccagtgggggaccgcggggtcggcggaggagccatccccgcaggcggcgcgtctggcgaaggccctgcgggagctcggtcagacaggatggtactggggaagtatgactgttaatgaagccaaagagaaattaaaagaggcaccagaaggaactttcttgattagagatagctcgcattcagactacctactaacaatatctgttaaaacatcagctggaccaactaatcttcgaatcgaataccaagacggaaaattcagattggactctatcatatgtgtcaaatccaagcttaaacaatttgacagtgtggttcatctgatcgactactatgttcagatgtgcaaggataagcggacaggtccagaagccccccggaacggcactgttcacctttatctgaccaaaccgctctacacgtcagcaccatctctgcagcatctctgtaggctcaccattaacaaatgtaccggtgccatctggggactgcctttaccaacaagactaaaagattacttggaagaatataaattccaggtataaatgtttctctttttttaaacatgtctcacatagagtatctccgaatgcagctatgtaaaagagaaccaaaacttgagtgctctggataactatatggaatgctttctaagaacagctgaagctaatc

SEQ ID NO: 187564 - DNA, 462 bp, Homo sapiens
  Payload ID: 16916
  Gene Symbol: SOCS2
  Gene Name: suppressor of cytokine signaling 2
  ENST ID: ENST00000547229
  CDS Start-End: 455-462
cgaggagcctcccgggcggagatgcggcagctcccgcacctccgcaccccgggttggtgcctcggggccccgcagcgctttagggcggagaaccaagtttgtgtgggtgcttcttcctgggggccctcgggctgcgccaggtgtgagaccggaatgccaatttggggaatctctcctgttctttcctttttaattttttctacttgtccttgacaagggcctattcccactggatctgcaggcgatcagtgggtgaccgcggctgcgagggactttgtcatccgtcctccaggatctggggagaaagagccccatcccttctctctctgccaccatttcggacaccccgcagggactcgttttgggattcgcactgacttcaaggaaggacgcgaacccttctctgaccccagctcgggcggccacctgtctttgccgcggtgacccttctctcatgaccct

SEQ ID NO: 187565 - DNA, 719 bp, Homo sapiens
  Payload ID: 16916
  Gene Symbol: SOCS2
  Gene Name: suppressor of cytokine signaling 2
  ENST ID: ENST00000551883
  CDS Start-End: 1-350
actatgttcagatgtgcaaggataagcggacaggtccagaagccccccggaacggcactgttcacctttatctgaccaaaccgctctacacgtcagcaccatctctgcagcatctctgtaggctcaccattaacaaatgtaccggtgccatctggggactgcctttaccaacaagactaaaagattacttggaagaatataaattccaggtccaggctccagtaggagagaaagaactcctcataggaatactgaagaagtgggaaggaaccaagctgacacaggcctcactgcaatttgatatgcctgctgatcagagtctcttgggcattttatattttgcattctgatgtacctaggagttttgttaaacagatgatgtatgtgagtatttatcccattttatgcaattaaccaaatcaaccaaaaaaagtgaccatgaagtcctgtatttgtctttttactacatgtaggaactctcatgtgaatgagtactgtagtaatccattctatgggagccttatttcagaaatatttcaaactggtgcaaatggaaaagactttctcttttcctttaaagctaaagacaagaatatcatgctatacaggtgcaactcaatccccgttaataaaaaccaatgtaggtataggcattctaccctttgaaatagctgtgtcccaacctgttgccattgattttttggaaatggctttagaaa

SEQ ID NO: 187566 - DNA, 581 bp, Homo sapiens
  Payload ID: 16916
  Gene Symbol: SOCS2
  Gene Name: suppressor of cytokine signaling 2
  ENST ID: ENST00000549510
  CDS Start-End: 1-140
cagcaccatctctgcagcatctctgtaggctcaccattaacaaatgtaccggtgccatctggggactgcctttaccaacaagactaaaagattacttggaagaatataaattccagccagctgttttttatcctggttagaagaattttgtgttttcttttagctatggatctttgaacattaccctatgatcgaagagttttgagttgggtttttagatgttggttgtcatggagaaacaggaatctggtgtatgccagccatcatcatcatcatcataaccctttggatgaattttcattatcaagggatctggaaggctgtcttcgctctgcttcccagctaacaaacagatgtgttcccagaagatgatgggcatagggtgtgtttttgcaagtcatttttcccatttacgtagattattcttatttccaattgatcctcaatagataagagtgccattgagctttattttcatctgtcaggcaattaagaaaaaagtaaaggaaacaaaaaagctataatatactaaggaaattcttagattctttggtaaaattaaaagaatcttggtgcatgaa

SEQ ID NO: 187567 - DNA, 2881 bp, Homo sapiens
  Payload ID: 16916
  Gene Symbol: SOCS2
  Gene Name: suppressor of cytokine signaling 2
  Uniprot ID: O14508
  ENST ID: ENST00000622746
  CDS Start-End: 720-1316
gcttttgtgtgccctctgcgcacggaactccgaccgccgcctccgagcgcggggctggttgcatccccgggcatctcgttcccaaattaaacgttaacgggggaaacaagggcagacgcccctcctctcccgggcccctcccacctccccttttccccccacccccccgccccatgtccgctgaggaggctgcctggtgcggaggcggcggcggcggccgcggccgaggtcgaggtaagagcgcggcgttggtggtttgcattttccgcagcgctcgcgaccgcccgctcggccccggcctcgcctcggagccccgcgagggctgcgcgctcgggccgattcctcgacagcgcccgcggcggcgagaaccaccgcagccatcctggtccgggagcgaccgccgcggcacccccaaccccgccagagcgggcaccaggaagcggggggaggggagcgaggagcctcccgggcggagatgcggcagctcccgcacctccgcaccccgggcgatcagtgggtgaccgcggctgcgagggactttgtcatccgtcctccaggatctggggagaaagagccccatcccttctctctctgccaccatttcggacaccccgcagggactcgttttgggattcgcactgacttcaaggaaggacgcgaacccttctctgaccccagctcgggcggccacctgtctttgccgcggtgacccttctctcatgaccctgcggtgccttgagccctccgggaatggcggggaagggacgcggagccagtgggggaccgcggggtcggcggaggagccatccccgcaggcggcgcgtctggcgaaggccctgcgggagctcggtcagacaggatggtactggggaagtatgactgttaatgaagccaaagagaaattaaaagaggcaccagaaggaactttcttgattagagatagctcgcattcagactacctactaacaatatctgttaaaacatcagctggaccaactaatcttcgaatcgaataccaagacggaaaattcagattggactctatcatatgtgtcaaatccaagcttaaacaatttgacagtgtggttcatctgatcgactactatgttcagatgtgcaaggataagcggacaggtccagaagccccccggaacggcactgttcacctttatctgaccaaaccgctctacacgtcagcaccatctctgcagcatctctgtaggctcaccattaacaaatgtaccggtgccatctggggactgcctttaccaacaagactaaaagattacttggaagaatataaattccaggtataaatgtttctctttttttaaacatgtctcacatagagtatctccgaatgcagctatgtaaaagagaaccaaaacttgagtgctctggataactatatggaatgctttctaagaacagctgaagctaatctaatttaaatttaacagcttgaagaggtagctaggtgtttaaagttcctccagatacttttacctgagtgatgcttcccttcctaaggctgaccaagacctgttgatccttttagattaaaaataaaatgtcgcatgtaaaggctgaagtcgcgttttatcagaatgccttgccttcttaggttcttttccattatgtcaaaggtccaggctccagtaggagagaaagaactcctcataggaatactgaagaagtgggaaggaaccaagctgacacaggcctcactgcaatttgatatgcctgctgatcagagtctcttgggcattttatattttgcattctgatgtacctaggagttttgttaaacagatgatgtatgtgagtatttatcccattttatgcaattaaccaaatcaaccaaaaaaagtgaccatgaagtcctgtatttgtctttttactacatgtaggaactctcatgtgaatgagtactgtagtaatccattctatgggagccttatttcagaaatatttcaaactggtgcaaatggaaaagactttctcttttcctttaaagctaaagacaagaatatcatgctatacaggtgcaactcaatccccgttaataaaaaccaatgtaggtataggcattctaccctttgaaatagctgtgtcccaacctgttgccattgattttttggaaatggctttagaaatatccaagttgtccttgaattgtctaaccatggacataaacagttgtctcccttctactgtgtagaatactttgacttaattttcttccagatacagggggatacctgcctgtttttcaaagtgtttatttactgctgttactatttgattagaatgtattaaataaaaaaaacctgatttctacaagttgcacttattgagttctagagaacgtacactttcatggtaatagaggattgccataaaaacttacgtcaagtgaaataagccaattattcaacaaaaggtagaacattacttgccattctgtaaagttatgggctgtacctgccccctttgcaatttggaaagcatggtttagaaactacaggcattgtcaagtggccgggtcttttataatttgaataggcataacactgatgtcctctgtgtttccaaaaacatggtttagaaactacaaacattatgacatggccagtcttttacaagttgagtaggcataatactaaagaaaaatacaaagttttgtggccacttattttttgctatgttagtctgcataactgttataaatgtaccatcttttctagagtccagacattatttattttatggctttaaaattttcctgcatagctacaatcctgtggtgtgtcaccataaaggtggaccctgtgtgaatgagaaaattcagttataaattgtaataaaacctgcttactgg

SEQ ID NO: 187568 - DNA, 2734 bp, Homo sapiens
  Payload ID: 16917
  Gene Symbol: SOCS3
  Gene Name: suppressor of cytokine signaling 3
  Uniprot ID: O14543
  ENST ID: ENST00000330871
  CDS Start-End: 417-1094
ggctccgacttggactccctgctccgctgctgccgcttcggccccgcacgcagccagccgccagccgcccgcccggcccagctcccgccgcggccccttgccgcggtccctctcctggtcccctcccggttggtccgggggtgcgcagggggcagggcgggcgcccaggggaagctcgagggacgcgcgcgcgaaggctcctttgtggacttcacggccgccaacatctgggcgcagcgcgggccaccgctggccgtctcgccgccgcgtcgccttggggacccgagggggctcagccccaaggacggagacttcgattcgggaccagccccccgggatgcggtagcggccgctgtgcggaggccgcgaagcagctgcagccgccgccgcgcagatccacgctggctccgtgcgccatggtcacccacagcaagtttcccgccgccgggatgagccgccccctggacaccagcctgcgcctcaagaccttcagctccaagagcgagtaccagctggtggtgaacgcagtgcgcaagctgcaggagagcggcttctactggagcgcagtgaccggcggcgaggcgaacctgctgctcagtgccgagcccgccggcacctttctgatccgcgacagctcggaccagcgccacttcttcacgctcagcgtcaagacccagtctgggaccaagaacctgcgcatccagtgtgaggggggcagcttctctctgcagagcgatccccggagcacgcagcccgtgccccgcttcgactgcgtgctcaagctggtgcaccactacatgccgccccctggagccccctccttcccctcgccacctactgaaccctcctccgaggtgcccgagcagccgtctgcccagccactccctgggagtccccccagaagagcctattacatctactccgggggcgagaagatccccctggtgttgagccggcccctctcctccaacgtggccactcttcagcatctctgtcggaagaccgtcaacggccacctggactcctatgagaaagtcacccagctgccggggcccattcgggagttcctggaccagtacgatgccccgctttaaggggtaaagggcgcaaagggcatgggtcgggagaggggacgcaggcccctctcctccgtggcacatggcacaagcacaagaagccaaccaggagagagtcctgtagctctggggggaaagagggcggacaggcccctccctctgccctctccctgcagaatgtggcaggcggacctggaatgtgttggagggaagggggagtaccacctgagtctccagcttctccggaggagccagctgtcctggtgggacgatagcaaccacaagtggattctccttcaattcctcagcttcccctctgcctccaaacaggggacacttcgggaatgctgaactaatgagaactgccagggaatcttcaaactttccaacggaacttgtttgctctttgatttggtttaaacctgagctggttgtggagcctgggaaaggtggaagagagagaggtcctgagggccccagggctgcgggctggcgaaggaaatggtcacaccccccgcccaccccaggcgaggatcctggtgacatgctcctctccctggctccggggagaagggcttggggtgacctgaagggaaccatcctggtaccccacatcctctcctccgggacagtcaccgaaaacacaggttccaaagtctacctggtgcctgagagcccagggcccttcctccgttttaagggggaagcaacatttggaggggatggatgggctggtcagctggtctccttttcctactcatactataccttcctgtacctgggtggatggagcgggaggatggaggagacgggacatctttcacctcaggctcctggtagagaagacaggggattctactctgtgcctcctgactatgtctggctaagagattcgccttaaatgctccctgtcccatggagagggacccagcataggaaagccacatactcagcctggatgggtggagaggctgagggactcactggagggcaccaagccagcccacagccagggaagtggggagggggggcggaaacccatgcctcccagctgagcactgggaatgtcagcccagtaagtattggccagtcaggcgcctcgtggtcagagcagagccaccaggtcccactgccccgagccctgcacagccctccctcctgcctgggtgggggaggctggaggtcattggagaggctggactgctgccaccccgggtgctcccgctctgccatagcactgatcagtgacaatttacaggaatgtagcagcgatggaattacctggaacagttttttgtttttgtttttgtttttgtttttgtgggggggggcaactaaacaaacacaaagtattctgtgtcaggtattgggctggacagggcagttgtgtgttggggtggtttttttctctatttttttgtttgtttcttgttttttaataatgtttacaatctgcctcaatcactctgtcttttataaagattccacctccagtcctctctcctcccccctactcaggcccttgaggctattaggagatgcttgaagaactcaacaaaatcccaatccaagtcaaactttgcacatatttatatttatattcagaaaagaaacatttcagtaatttataataaagagcactattttttaatgaaaaa

SEQ ID NO: 187569 - DNA, 361 bp, Homo sapiens
  Payload ID: 16917
  Gene Symbol: SOCS3
  Gene Name: suppressor of cytokine signaling 3
  ENST ID: ENST00000587578
  CDS Start-End: 315-361
tccgacttggactccctgctccgctgctgccgcttcggccccgcacgcagccagccgccagccgcccgcccggcccagctcccgccgcggccccttgccgcggtccctctcctggtcccctcccggttggtccgggggtgcgcagggggcagggcgggcgcccaggggaagctcgagggacgcgcgcgcgaaggctcctttgtggacttcacggccgccaacatctgggcgcagcgcgggccaccgctggccgtctcgccgccgcgaagcagctgcagccgccgccgcgcagatccacgctggctccgtgcgccatggtcacccacagcaagtttcccgccgccgggatgagccgccccct

SEQ ID NO: 187570 - DNA, 6667 bp, Homo sapiens
  Payload ID: 16918
  Gene Symbol: SOCS4
  Gene Name: suppressor of cytokine signaling 4
  Uniprot ID: Q8WXH5
  ENST ID: ENST00000339298
  CDS Start-End: 223-1545
tctggaaaagaaggcgagatcttctagagcctctaatcttggcatccttcgtgccctcaccttgtcgcttctgtagagataaagaaggaatgacttaatttctgttccggttggttctcttggtacctgaagatacatccagaaagtgcccagaagaaacttcctgctggaaaaaatgaaaaagcagtatttataacattagaatctggataatttgttaacatggcagaaaataatgaaaatattagtaaaaatgtagatgtaaggcccaaaactagtcggagcagaagtgccgacagaaaagacggttatgtgtggagtggaaagaagttatcttggtcaaaaaagagtgagagttattcagatgctgagacagtgaatggtatagagaaaaccgaagtgtctttaaggaaccaagaaaggaagcacagctgttcatccattgagttggacttagatcattcctgtgggcatcgatttttaggccgatctcttaaacagaaactgcaagatgccgtggggcagtgttttccaataaagaattgtagtagtcggcactcttcagggcttccgtctaaaaggaaaattcatatcagtgaactcatgttagataagtgtcctttcccacctcgatcagatttagcctttaggtggcattttattaaacgacacactgctcctataaattccaaatcagatgaatgggtaagcacagacttgtctcagactgaattgagggatggtcagctaaaacgaagaaatatggaagaaaatataaactgtttctcacataccaatgttcagccctgtgtcataaccaccgacaatgctttgtgtagagaaggtcctatgactggctctgtgatgaacctggtttcaaataacagtatagaagatagtgatatggattccgatgatgaaattctaacactttgcacaagttccagaaaaagaaacaaacccaaatgggatttggatgatgaaatcctgcagttggaaacacctcctaaataccacacgcagattgattatgtccactgtcttgtaccagacctccttcagatcaataacaacccatgttactggggagtgatggataaatacgcagccgaagcactactggaaggaaaaccagagggtacctttttacttcgagactcagcacaggaagactatttattctctgttagttttagacgctatagtcgttctcttcatgctagaattgaacagtggaatcacaactttagctttgatgcacatgacccctgtgtcttccattctcctgacattactgggctcctagaacattataaggacccaagcgcctgtatgttctttgaaccacttctatccactcccttaattcggactttccctttttccctgcagcatatatgcagaacagttatttgtaactgtacaacttatgatggcatcgatgcccttccaattccttcttctatgaaattatatctgaaggaatatcattataaatcaaaagttagagtactcaggattgatgcaccagaacagcaatgctagtaacaggatgggaacatgggaatgataatatatattttttcttttaatattttatttttctttttatgccactttggatttttctacaaaggcagtggtgtccaaaataaaatctctgccctaaattttactaataaatccatttttctagtgatacacaaattgtttaaggttatacactcgagcttaaatagatatttttaaccaggtgtttggtttttgtttttaccgtgtaggttgtatacttacattttttctttccttaatttatacatgatcctttttccttaatttatacatgatccaggcacatttgaaatttggtaggcattgcaaacacatttgaatattgtgtatttcatactattctttaaaagtaatcttatgtcctttcctacatgtaaaatattttgttaatctatgccattagtagtattatatataaaatatagttccccgtcccccttttcattgagtttgatattcttcagtaaagctgaatgttgtaattcaccattcatactaatgttattgacttttgtaacttactaatagggatgttaaaagtaacaaaaccaagtcaaacttggtgtatttttattttaaatattaactctaaagcaggattactaaatttgattaatctggtcaatgagaatcaaatggaaacatatcattctggaggtgcacttactcttctacaatgtggccggatcatttgtcattcctgaataggtctttctctcaacctgcaagagctaaaccatcttcaaaacataaatcttgttcctttctcattggaagctttgaaaataatgataacactattagtagctagtagttactaaagtgctaaagtaattgtggggtttttctgtattagcttatgaactgttgcttctacttagcccttttatagaaactctgagctgttactttggggaaattccacaatgtattagcagccacaaatttccactggtaaccaaagagtacctaagtagtttttcattattttaagttgaatttgaataaagattccagaaataaacatggagctcagtattcaggaagcttaatactgtttttgatctacaagatccaaataattatccctatcttcagaattaacttagtctgtaatgtggcttcaaaaaaagaaagccttttgacagctacatgacttacaccatacagaacagtactggacaaaaggggtgatattttaaatttactatcccagaaacagggcaacgtttttagaaacatctttagcccaaagtaactagtaaaaataaatggagtggtatcctatcttctttttttaaggaatcaatgaataataaatgtagatagacaattttcttctggtgagctgtctaaccctttgtacacattgacatttttaatatcgtaactgatttcttgatgctagtttagctatattaggaaactgcttctacctagattgaaagaaatttgactcataaacttccaagttagaacaaatatttcttcattattgttgcttttatgtgagtagcatttccctatcttgcagttctgttaacatgaaaatggcatttttccataatagctttaaaataattttttagtaattattacaaaattaaggaaaatctctattaccgttatcttttagcattttttttttcctcagtgatctcaagattgtcttagtctcaatgagatgtagctacaaaaatggcacctcttagcagtgatgaggctcaggatatcggatatcataacaccaatgtcaggataaatatctcttctaaagacgatatttaccttttacaaggttagaaaagtctcatactacctcatctttattgtggcgcttttgtagatcactgagaagcttatcttattaaccaatataccacttcctaaatatccatctttggtgaaagaaaatagtgtggtaagagtacccatgattatagttttttatcagaatttgataagattttctgtttctgtgaaacaattattttaaatatttttcttttaaaaataactttttatcagtacagaaaaacctaagggatgactagcttacaaatattctgttaaggggtagttttataaagaaaaatgatatatagttatgttgtcttttatagtgttaaaattagtatttatatgaaagtcaagatctaagtaccttttcatataattcaaactgattgcttgtgatatgttttctctggcttttttattttttcaacttcaaggtattaacagctgttaacacttaaaaagtactgccacatatgtagccttgaagtagttgatctaataaatgagagcagggaggagattcattgactctgaaatgatttttatttttcctttggtatttgctacagtgaaaagaagtttggaaagtagatacataaagacttgagaagggaattgtttaagggaaaagaaaagagtaataattttttttaaaacattaaggaattggaattcagaaaggttacccccttcctctgtgtctttgtaaggatacatttggaagaacatacagtattcagaaactaacctatataaaatgtaaacaatatattgattgcactatataaatgagtaaattttgagaggaacaatgtgggaatgtataaatttgtctaaaattttataactgttgaacaaagggaagatttgaacagtgtaaattccagagttgagaaagcatttagcatggtggaaatgtggagagcttattggtgagagaggatggagctaagagaaataagatcaaatattaaaattaggaatttaggcattacctcagggaaaagccttgacagtgaaaagaaactacttaatcgctaatagctagtctggaccagacacttaactgcgctttgggaatcatcctgggctaatcaggaaataaacttgacttttctatttttctctgaagctttacaggacatactcccactcccatttttttctaagcctacagcatcttgattcatagtataattcctgaagtatgctgaatggactttttaaggttcctttagcatttttgtatagagttatatgtgatctttctataaccatgccattcacttaaataattcatgaagggaatggtttaatttaaaggaagacctaataggaagaagattaaaggaagcttttagtcagcctgtggctagatttattgatttggtgatcaaacctgtgctatttcctgaatttcagctaatggccaactgtggtcaaagaatggctttcagttaaagttttgacttcttattataaataatataaagaatgtctcagtaattagaaatcccttaataagtagaacaaatgtggcaagtaggactcctatcggtatacaaattccatttctttttataagaaaaacacataaaccattatcatttattcatgagccaaagccattaagaagataaatccagttatcagcttcctgtctctgaagtttggatcattttatagatccacgcaatagagagcttccttcctatgaaacaaaaaccttgagatctctttttttttgagacagagtctcgctgttgtcagcccaggctggagtgcaatggcgcaatctcggttcactgcaacctctgccttccaggttccagcaattctcctacctcagctcccaagtagctgagatgacaggcgtgtgccaccacgcccagctaatttttgtatttttagtagcgatggtgtttcactacattggccaggctggtctcgaactcctgacctcaggtgaccacccgcctcagcctcccaaagtgctgggattacaggcatgagccactgtgcccggccaagatctaactcacgcttacttttcattaaaatatttcttgtcgcttttagctattgtcagaatccaataaacagcttacgcattcattttggtaaagcaaatttcacaggaaaatagacaaaattataagagattcctggagacaacacaaggaaaacaatgtttaaaagcaaaatagcctgtgtaatgttaggtaatgtaatgcccaagtgaataaaagatttttcgtcaagcaaactactgtttctactttgggggaaaaaagtcagttttacatttgtaatttaaggaaagaacagaaagcacaaaggtttttcttttctttattaatggcctactagaaatgagcagtgcaagagtctacctgtactattctaatacagtaagatattggacacaaaatggaggtaactttttaaaatagattggcttggaagttgaaatgtagattaatggatataacccaatagaaagggattttcaaataaaaccaaagtctatttttttatttactttctaattttgaacagatgactcagtcctaaatctttgcctttatttcctataaaatgtaggtgatacttgtaactcgacttcctggagttaattcttcagcaagaggtgaccctgggagcgtactttaaaataattgctgtacagccattgagtactaacatgatgataggttttcaaaatatctttgtagtggatgctgcataattacattcacttctcttagactgtaaaagactttcttgacttgttttaacagtagagatagcagtacaatttgaatttatggtttaggctctgcaattagaggaacaattgcagtttcctcctacccttcatatggtctgtgtaaaactgatgtttgcttaacttattttaaaagttgattacgttttcagaaaataaagataatcacttttgccatggttataatcaaatctaagctttcagacttgagagccatggtgtaaaactcaaggaggtttatttaaattatgctgactttgctagaattggataaattctgtataagccaagtatgagttcacatgtactcgaatatacagttttcacaaagctattactctcatcagtcaggcttgtatgatctattccttaccacaaaagaagtagacaattgccacttttatttctaatccttaagttgaatgtttcttcttggatgtaagttcaaataaattgatctggataaattttcatttctacttaattaaaacttcctatgtaaaatcc

SEQ ID NO: 187571 - DNA, 6779 bp, Homo sapiens
  Payload ID: 16918
  Gene Symbol: SOCS4
  Gene Name: suppressor of cytokine signaling 4
  Uniprot ID: Q8WXH5
  ENST ID: ENST00000395472
  CDS Start-End: 333-1655
ctgaacacggaagtggtggcggcgcccagggaaccggcggaggcgatgaccgtgacggctgggttgggaccggaacgccgaagcggggttgggggtggcagaaaagcatctgctttgtaagacctacacgaggtgcaggagtggttgggcctcccctctccacttaagcaagcgcccagactgatggcgatggtgatggcagcagttactcgcacaaccccagttaagctgcgctccgggagatacatccagaaagtgcccagaagaaacttcctgctggaaaaaatgaaaaagcagtatttataacattagaatctggataatttgttaacatggcagaaaataatgaaaatattagtaaaaatgtagatgtaaggcccaaaactagtcggagcagaagtgccgacagaaaagacggttatgtgtggagtggaaagaagttatcttggtcaaaaaagagtgagagttattcagatgctgagacagtgaatggtatagagaaaaccgaagtgtctttaaggaaccaagaaaggaagcacagctgttcatccattgagttggacttagatcattcctgtgggcatcgatttttaggccgatctcttaaacagaaactgcaagatgccgtggggcagtgttttccaataaagaattgtagtagtcggcactcttcagggcttccgtctaaaaggaaaattcatatcagtgaactcatgttagataagtgtcctttcccacctcgatcagatttagcctttaggtggcattttattaaacgacacactgctcctataaattccaaatcagatgaatgggtaagcacagacttgtctcagactgaattgagggatggtcagctaaaacgaagaaatatggaagaaaatataaactgtttctcacataccaatgttcagccctgtgtcataaccaccgacaatgctttgtgtagagaaggtcctatgactggctctgtgatgaacctggtttcaaataacagtatagaagatagtgatatggattccgatgatgaaattctaacactttgcacaagttccagaaaaagaaacaaacccaaatgggatttggatgatgaaatcctgcagttggaaacacctcctaaataccacacgcagattgattatgtccactgtcttgtaccagacctccttcagatcaataacaacccatgttactggggagtgatggataaatacgcagccgaagcactactggaaggaaaaccagagggtacctttttacttcgagactcagcacaggaagactatttattctctgttagttttagacgctatagtcgttctcttcatgctagaattgaacagtggaatcacaactttagctttgatgcacatgacccctgtgtcttccattctcctgacattactgggctcctagaacattataaggacccaagcgcctgtatgttctttgaaccacttctatccactcccttaattcggactttccctttttccctgcagcatatatgcagaacagttatttgtaactgtacaacttatgatggcatcgatgcccttccaattccttcttctatgaaattatatctgaaggaatatcattataaatcaaaagttagagtactcaggattgatgcaccagaacagcaatgctagtaacaggatgggaacatgggaatgataatatatattttttcttttaatattttatttttctttttatgccactttggatttttctacaaaggcagtggtgtccaaaataaaatctctgccctaaattttactaataaatccatttttctagtgatacacaaattgtttaaggttatacactcgagcttaaatagatatttttaaccaggtgtttggtttttgtttttaccgtgtaggttgtatacttacattttttctttccttaatttatacatgatcctttttccttaatttatacatgatccaggcacatttgaaatttggtaggcattgcaaacacatttgaatattgtgtatttcatactattctttaaaagtaatcttatgtcctttcctacatgtaaaatattttgttaatctatgccattagtagtattatatataaaatatagttccccgtcccccttttcattgagtttgatattcttcagtaaagctgaatgttgtaattcaccattcatactaatgttattgacttttgtaacttactaatagggatgttaaaagtaacaaaaccaagtcaaacttggtgtatttttattttaaatattaactctaaagcaggattactaaatttgattaatctggtcaatgagaatcaaatggaaacatatcattctggaggtgcacttactcttctacaatgtggccggatcatttgtcattcctgaataggtctttctctcaacctgcaagagctaaaccatcttcaaaacataaatcttgttcctttctcattggaagctttgaaaataatgataacactattagtagctagtagttactaaagtgctaaagtaattgtggggtttttctgtattagcttatgaactgttgcttctacttagcccttttatagaaactctgagctgttactttggggaaattccacaatgtattagcagccacaaatttccactggtaaccaaagagtacctaagtagtttttcattattttaagttgaatttgaataaagattccagaaataaacatggagctcagtattcaggaagcttaatactgtttttgatctacaagatccaaataattatccctatcttcagaattaacttagtctgtaatgtggcttcaaaaaaagaaagccttttgacagctacatgacttacaccatacagaacagtactggacaaaaggggtgatattttaaatttactatcccagaaacagggcaacgtttttagaaacatctttagcccaaagtaactagtaaaaataaatggagtggtatcctatcttctttttttaaggaatcaatgaataataaatgtagatagacaattttcttctggtgagctgtctaaccctttgtacacattgacatttttaatatcgtaactgatttcttgatgctagtttagctatattaggaaactgcttctacctagattgaaagaaatttgactcataaacttccaagttagaacaaatatttcttcattattgttgcttttatgtgagtagcatttccctatcttgcagttctgttaacatgaaaatggcatttttccataatagctttaaaataattttttagtaattattacaaaattaaggaaaatctctattaccgttatcttttagcattttttttttcctcagtgatctcaagattgtcttagtctcaatgagatgtagctacaaaaatggcacctcttagcagtgatgaggctcaggatatcggatatcataacaccaatgtcaggataaatatctcttctaaagacgatatttaccttttacaaggttagaaaagtctcatactacctcatctttattgtggcgcttttgtagatcactgagaagcttatcttattaaccaatataccacttcctaaatatccatctttggtgaaagaaaatagtgtggtaagagtacccatgattatagttttttatcagaatttgataagattttctgtttctgtgaaacaattattttaaatatttttcttttaaaaataactttttatcagtacagaaaaacctaagggatgactagcttacaaatattctgttaaggggtagttttataaagaaaaatgatatatagttatgttgtcttttatagtgttaaaattagtatttatatgaaagtcaagatctaagtaccttttcatataattcaaactgattgcttgtgatatgttttctctggcttttttattttttcaacttcaaggtattaacagctgttaacacttaaaaagtactgccacatatgtagccttgaagtagttgatctaataaatgagagcagggaggagattcattgactctgaaatgatttttatttttcctttggtatttgctacagtgaaaagaagtttggaaagtagatacataaagacttgagaagggaattgtttaagggaaaagaaaagagtaataattttttttaaaacattaaggaattggaattcagaaaggttacccccttcctctgtgtctttgtaaggatacatttggaagaacatacagtattcagaaactaacctatataaaatgtaaacaatatattgattgcactatataaatgagtaaattttgagaggaacaatgtgggaatgtataaatttgtctaaaattttataactgttgaacaaagggaagatttgaacagtgtaaattccagagttgagaaagcatttagcatggtggaaatgtggagagcttattggtgagagaggatggagctaagagaaataagatcaaatattaaaattaggaatttaggcattacctcagggaaaagccttgacagtgaaaagaaactacttaatcgctaatagctagtctggaccagacacttaactgcgctttgggaatcatcctgggctaatcaggaaataaacttgacttttctatttttctctgaagctttacaggacatactcccactcccatttttttctaagcctacagcatcttgattcatagtataattcctgaagtatgctgaatggactttttaaggttcctttagcatttttgtatagagttatatgtgatctttctataaccatgccattcacttaaataattcatgaagggaatggtttaatttaaaggaagacctaataggaagaagattaaaggaagcttttagtcagcctgtggctagatttattgatttggtgatcaaacctgtgctatttcctgaatttcagctaatggccaactgtggtcaaagaatggctttcagttaaagttttgacttcttattataaataatataaagaatgtctcagtaattagaaatcccttaataagtagaacaaatgtggcaagtaggactcctatcggtatacaaattccatttctttttataagaaaaacacataaaccattatcatttattcatgagccaaagccattaagaagataaatccagttatcagcttcctgtctctgaagtttggatcattttatagatccacgcaatagagagcttccttcctatgaaacaaaaaccttgagatctctttttttttgagacagagtctcgctgttgtcagcccaggctggagtgcaatggcgcaatctcggttcactgcaacctctgccttccaggttccagcaattctcctacctcagctcccaagtagctgagatgacaggcgtgtgccaccacgcccagctaatttttgtatttttagtagcgatggtgtttcactacattggccaggctggtctcgaactcctgacctcaggtgaccacccgcctcagcctcccaaagtgctgggattacaggcatgagccactgtgcccggccaagatctaactcacgcttacttttcattaaaatatttcttgtcgcttttagctattgtcagaatccaataaacagcttacgcattcattttggtaaagcaaatttcacaggaaaatagacaaaattataagagattcctggagacaacacaaggaaaacaatgtttaaaagcaaaatagcctgtgtaatgttaggtaatgtaatgcccaagtgaataaaagatttttcgtcaagcaaactactgtttctactttgggggaaaaaagtcagttttacatttgtaatttaaggaaagaacagaaagcacaaaggtttttcttttctttattaatggcctactagaaatgagcagtgcaagagtctacctgtactattctaatacagtaagatattggacacaaaatggaggtaactttttaaaatagattggcttggaagttgaaatgtagattaatggatataacccaatagaaagggattttcaaataaaaccaaagtctatttttttatttactttctaattttgaacagatgactcagtcctaaatctttgcctttatttcctataaaatgtaggtgatacttgtaactcgacttcctggagttaattcttcagcaagaggtgaccctgggagcgtactttaaaataattgctgtacagccattgagtactaacatgatgataggttttcaaaatatctttgtagtggatgctgcataattacattcacttctcttagactgtaaaagactttcttgacttgttttaacagtagagatagcagtacaatttgaatttatggtttaggctctgcaattagaggaacaattgcagtttcctcctacccttcatatggtctgtgtaaaactgatgtttgcttaacttattttaaaagttgattacgttttcagaaaataaagataatcacttttgccatggttataatcaaatctaagctttcagacttgagagccatggtgtaaaactcaaggaggtttatttaaattatgctgactttgctagaattggataaattctgtataagccaagtatgagttcacatgtactcgaatatacagttttcacaaagctattactctcatcagtcaggcttgtatgatctattccttaccacaaaagaagtagacaattgccacttttatttctaatccttaagttgaatgtttcttcttggatgtaagttcaaataaattgatctggataaattttcatttctacttaattaaaacttcctatgtaaaatccaa

SEQ ID NO: 187572 - DNA, 4110 bp, Homo sapiens
  Payload ID: 16918
  Gene Symbol: SOCS4
  Gene Name: suppressor of cytokine signaling 4
  Uniprot ID: Q8WXH5
  ENST ID: ENST00000555846
  CDS Start-End: 444-1766
gcggcgcccagggaaccggcggaggcgatgaccgtgacggctgggttgggaccggaacgccgaagcggggttgggggtggcagaaaagcatctgctttgtaagacctacacgaggtgcaggagtggttgggcctcccctctccacttaagcaagcgcccagactgatggcgatggtgatggcagcagttactcgcacaaccccagttaagctgcgctccgggaggagttcatctgttgtctgctctccagtgacttccgtttgtggagcctaagtgtttctacagaatccaactcaaatatcaaggactatgatcagaatgctttcaaggagtttttgggcacatgatggcagatacatccagaaagtgcccagaagaaacttcctgctggaaaaaatgaaaaagcagtatttataacattagaatctggataatttgttaacatggcagaaaataatgaaaatattagtaaaaatgtagatgtaaggcccaaaactagtcggagcagaagtgccgacagaaaagacggttatgtgtggagtggaaagaagttatcttggtcaaaaaagagtgagagttattcagatgctgagacagtgaatggtatagagaaaaccgaagtgtctttaaggaaccaagaaaggaagcacagctgttcatccattgagttggacttagatcattcctgtgggcatcgatttttaggccgatctcttaaacagaaactgcaagatgccgtggggcagtgttttccaataaagaattgtagtagtcggcactcttcagggcttccgtctaaaaggaaaattcatatcagtgaactcatgttagataagtgtcctttcccacctcgatcagatttagcctttaggtggcattttattaaacgacacactgctcctataaattccaaatcagatgaatgggtaagcacagacttgtctcagactgaattgagggatggtcagctaaaacgaagaaatatggaagaaaatataaactgtttctcacataccaatgttcagccctgtgtcataaccaccgacaatgctttgtgtagagaaggtcctatgactggctctgtgatgaacctggtttcaaataacagtatagaagatagtgatatggattccgatgatgaaattctaacactttgcacaagttccagaaaaagaaacaaacccaaatgggatttggatgatgaaatcctgcagttggaaacacctcctaaataccacacgcagattgattatgtccactgtcttgtaccagacctccttcagatcaataacaacccatgttactggggagtgatggataaatacgcagccgaagcactactggaaggaaaaccagagggtacctttttacttcgagactcagcacaggaagactatttattctctgttagttttagacgctatagtcgttctcttcatgctagaattgaacagtggaatcacaactttagctttgatgcacatgacccctgtgtcttccattctcctgacattactgggctcctagaacattataaggacccaagcgcctgtatgttctttgaaccacttctatccactcccttaattcggactttccctttttccctgcagcatatatgcagaacagttatttgtaactgtacaacttatgatggcatcgatgcccttccaattccttcttctatgaaattatatctgaaggaatatcattataaatcaaaagttagagtactcaggattgatgcaccagaacagcaatgctagtaacaggatgggaacatgggaatgataatatatattttttcttttaatattttatttttctttttatgccactttggatttttctacaaaggcagtggtgtccaaaataaaatctctgccctaaattttactaataaatccatttttctagtgatacacaaattgtttaaggttatacactcgagcttaaatagatatttttaaccaggtgtttggtttttgtttttaccgtgtaggttgtatacttacattttttctttccttaatttatacatgatcctttttccttaatttatacatgatccaggcacatttgaaatttggtaggcattgcaaacacatttgaatattgtgtatttcatactattctttaaaagtaatcttatgtcctttcctacatgtaaaatattttgttaatctatgccattagtagtattatatataaaatatagttccccgtcccccttttcattgagtttgatattcttcagtaaagctgaatgttgtaattcaccattcatactaatgttattgacttttgtaacttactaatagggatgttaaaagtaacaaaaccaagtcaaacttggtgtatttttattttaaatattaactctaaagcaggattactaaatttgattaatctggtcaatgagaatcaaatggaaacatatcattctggaggtgcacttactcttctacaatgtggccggatcatttgtcattcctgaataggtctttctctcaacctgcaagagctaaaccatcttcaaaacataaatcttgttcctttctcattggaagctttgaaaataatgataacactattagtagctagtagttactaaagtgctaaagtaattgtggggtttttctgtattagcttatgaactgttgcttctacttagcccttttatagaaactctgagctgttactttggggaaattccacaatgtattagcagccacaaatttccactggtaaccaaagagtacctaagtagtttttcattattttaagttgaatttgaataaagattccagaaataaacatggagctcagtattcaggaagcttaatactgtttttgatctacaagatccaaataattatccctatcttcagaattaacttagtctgtaatgtggcttcaaaaaaagaaagccttttgacagctacatgacttacaccatacagaacagtactggacaaaaggggtgatattttaaatttactatcccagaaacagggcaacgtttttagaaacatctttagcccaaagtaactagtaaaaataaatggagtggtatcctatcttctttttttaaggaatcaatgaataataaatgtagatagacaattttcttctggtgagctgtctaaccctttgtacacattgacatttttaatatcgtaactgatttcttgatgctagtttagctatattaggaaactgcttctacctagattgaaagaaatttgactcataaacttccaagttagaacaaatatttcttcattattgttgcttttatgtgagtagcatttccctatcttgcagttctgttaacatgaaaatggcatttttccataatagctttaaaataattttttagtaattattacaaaattaaggaaaatctctattaccgttatcttttagcattttttttttcctcagtgatctcaagattgtcttagtctcaatgagatgtagctacaaaaatggcacctcttagcagtgatgaggctcaggatatcggatatcataacaccaatgtcaggataaatatctcttctaaagacgatatttaccttttacaaggttagaaaagtctcatactacctcatctttattgtggcgcttttgtagatcactgagaagcttatcttattaaccaatataccacttcctaaatatccatctttggtgaaagaaaatagtgtggtaagagtacccatgattatagttttttatcagaatttgataagattttctgtttctgtgaaacaattattttaaatatttttcttttaaaaataactttttatcagtacagaaaaacctaagggatgactagcttacaaatattctgttaaggggtagttttataaagaaaaatgatatatagttatgttgtcttttatagtgttaaaattagtatttatatgaaagtcaagatctaagtaccttttcatataattcaaactgattgcttgtgatatgttttctctggcttttttattttttcaacttcaaggtattaacagctgttaacacttaaaaagtactgccacatatgtagccttgaagtagttgatctaataaatgagagcagggagg

SEQ ID NO: 187573 - DNA, 4771 bp, Homo sapiens
  Payload ID: 16919
  Gene Symbol: SOCS5
  Gene Name: suppressor of cytokine signaling 5
  Uniprot ID: O75159
  ENST ID: ENST00000306503
  CDS Start-End: 173-1783
ggcagccgcgcagagcgcgcacccaagcggccggacctccccgactcccgggccgcccccgtctcgcgccctgcctccctccttcggccttcacctacccgcctccggattggccgctaggaatcccgcccctctaaagccctgcctgctattggtcacgattttataatcaatggataaagtgggaaaaatgtggaataacttcaaatacaggtgtcagaatctcttcggtcatgagggaggaagccgtagtgaaaatgtggacatgaactccaacagatgtttgtctgtcaaagagaaaaacatcagcataggagactcaactcctcagcaacaaagcagtcccttaagagaaaatattgccttacaactgggattaagcccttcgaagaattcttcaaggagaaatcaaaattgtgccacagaaatccctcaaattgttgaaataagcatcgaaaaggataatgattcttgtgttaccccaggaacaagacttgcacgaagagattcctactctcgacatgctccatggggtgggaagaaaaaacattcctgttctacaaagacccagagttcattggatgctgataaaaagtttggtagaactcgaagtggacttcaaaggagagagaggcgctacggcgtaagttctgtacacgacatggacagtgtttccagcagaactgtaggaagtcgctctctaagacagaggttgcaggatactgtgggcttgtgttttcccatgagaacttacagcaagcagtcaaagcctctcttttccaataaaagaaaaatccatctctctgaattaatgcttgagaaatgcccttttcctgctggctcagatttagcccaaaaatggcatttgattaaacagcatacagctcctgtgagcccacattcaacattttttgatacatttgatccatctttggtttctacagaagatgaagaagataggcttagagagagaaggcggcttagtattgaagaaggggttgatccccctcccaatgcacaaatacatacatttgaagctactgcacaggttaatccattatataaactgggaccaaaattagctcctggaatgactgaaataagtggggacagttctgcaattccacaagctaattgtgactcggaagaggatacaaccaccctgtgtttgcagtcacggaggcagaagcagcgtcagatatctggagacagccatacccatgttagcagacagggagcttggaaagtccacacacagattgattacatacactgcctcgtgcctgatttgcttcaaattacagggaatccctgttactggggagtgatggaccgttatgaagcagaagcccttctcgaagggaaacctgaaggcacgtttttgctcagggactctgcgcaagaggactacctcttctctgtgagcttccgccgctacaacagatccctgcatgcccgaattgagcagtggaatcacaactttagtttcgacgcccatgacccgtgtgtatttcactcctccactgtaacgggacttttagaacattataaagatcccagttcgtgcatgttttttgaaccattgcttactatatcactaaataggactttcccttttagcctgcagtatatctgtcgcgcggtaatctgcaggtgcactacgtatgatggaattgatgggctccctctaccctcaatgttacaggattttttaaaagagtatcattataaacaaaaagttagagttcgctggttggaacgagaaccagtcaaggcaaagtaaactctccggtccccaaaggttgttaactaggtccgctttcatgtgcatcagacagtacacctatagcaagcacacgtagcagtgttaggctttttcatacagtatgtaagcttagtgttagtatctgtcagatgctacctgctgttacttattcagataaacatggtgcctattggaacaatagcggatagagctacaggtgttcagtaagactacaaaaacattttgcctatttcgctaacagtttggtttttaatggctgtggtatttgagtgaggcaactctggggcatttgttatgaagaattctatttcttactgaagaacaaattattaatattggatgagtatttcaacagtgtgactaatgtttgaaattattttttctaagagtttttctataaccttccaaaagtcgtgatgtttgtagttactataaatcaagctttggaagtccaaaaagaataaaagactgccttccttttagaaaaaaatgcaattttctggccacaagggcatagtgcagttcacttacgtgttgatgtagtttataatcagacgccttttctcttctgcaaaaggtactgttaagtaaaccagattttctaaataggcattcttaaaatttcagacttacaaagctagtagtagaattttattgaaaggcctaggtattaattttttaaatgagtgctttaacttaaaacaggcgtttggaatagctgctgcaatgtagtcttgtgtgtgatttttttttaagttgatgtgcagtctaattgttgtttcataaaagttggatctgttcctatgcccaggatgattttgtgaaccgtgaagtacgtgagactagaagacgcccaaacaagtcagataatagtaactacaatggttgctgatgttgagattattgttgaactataattaataatttggatggcagaatttatctcttttttgtaaactctcataactgaattgcttaagtataatttatagaatttcagtgcagttcattcttaatggaaaatctgaaacctaaattgcagatttaaaaggtactgtacaaccattatatctgtaaataacttagcacctttttgtcacttagaataatatgtactactacttgagtgagcgcttttggaagttatatcaagttctagtgtttgcttcttagtaactgaactgaatttacagttctgtcctagacattttgcactaaagtagccgaatccactctcatgtcttttcgttaatgtgctctgtaccactggtgagtgctccatagtttccttacctgctgctacagaatgttattttacatccctatggctattgccaaggctacaaaaaaggaaagctatatttgtatgcaacactaaccttttgactgctaatgtatgtttctgcttgctgtgccttgttatggctgctttttttgtgctaataaagtatgtttggtgttctccttgtatatctgctgttttatacatttgcaacaatttctcttgtaaatggaatggtttggggtttttaaataagcattaactaacaacctttctatagttaatgcagagttaatgaacagtctaatattgacttatcagaataagctaactctaaatttaatgctctacatcttatcagtcataattatatatactgtggaacagtatctgtagttactgcaaattactgtacagtttaggttataacagaaaactgacagagaagtaataaacctattgatttctctgcttataaatgaaagattgaaactatccaatgacatattatagtaaatgagtatctgtaacctcccactgcatcagaagcaggttaaatgaagtcttgtgaatttgtaatagatcagtaccatttattggtttggggaccatcttaattaaaaataaatgcccaaaatgtagaactttaaccaaagacttgtcccttttaaagcaaaatggggattgaagggacttataatttctgttgtttctaattaaagtccctgaagatcatataccaaagtgtttgagaacttcatccaaacctactttaaagcattatgtgcaattaagttgttatgacataattatattgcctaattgttgggtcttttttcttgagcttataatgtacctggaaaataaacctcttgagaaaaagaaaagttcatactgattattggaaaaggactatatatgtgagcaagattgtgttttagagaggaaacttgaaactccaagaaagcacttgatgtttttatatgcttgtagcaaattgatgttctaactgtagttttatagaaagtattaatgcttttatgtatttcaaaactttcatatgttaaatggaaattgttttaaatgtgtttgagtttatgtaagcatgtatacactgtgctaaaagtcacatgtttcagtttgtgtataatattaatatgcaatttttggtttaaatttttgtcttaaaatattagtggcttacattttaaaaaagaaaaatcaccagcatgaacttgcacctaagtctatattcactgtgtccttttctgaatcccattgtagcctgtcaactaaatttgagtgttaacggtctttttaaagtgcatttaaatacaaaccaggaatttctttagaagttgagatacatctttatagttgaaataattaacccaagaaaaggttgctttgatttgtacccattctcattcattttcttcattcccttacacacacacacacacctctcccttccgcatacatataagtgtgtattatatatttatgtatgcacatatatacatttatgttgttaatattactttagatggcatttccacctgatacaaaaacatttagagatcttattctatagatattacctaaagagtattcttgtactattcgaattttattatctgcactaaaagtttagccttgctactttagccttgtttataatacagtcaccttacaaagagaaa

SEQ ID NO: 187574 - DNA, 4058 bp, Homo sapiens
  Payload ID: 16919
  Gene Symbol: SOCS5
  Gene Name: suppressor of cytokine signaling 5
  Uniprot ID: O75159
  ENST ID: ENST00000394861
  CDS Start-End: 276-1886
gggggttggggggaggggggaggggaaacgggtgaagaaggggaggcggcagggaagggggtgggggcctggcgggggcatccggcggagctggggtccccgggctccgtccggaggaagcgacgctgcgctcgctgggcagtcggaggggacgggacgcaccggagggcaggcggactcgccctgtcggtgactgcgccgtccgggcccgtcctgcctggccgcaggtgccctggatgaggccgccccgcgcgccccaaacgattttataatcaatggataaagtgggaaaaatgtggaataacttcaaatacaggtgtcagaatctcttcggtcatgagggaggaagccgtagtgaaaatgtggacatgaactccaacagatgtttgtctgtcaaagagaaaaacatcagcataggagactcaactcctcagcaacaaagcagtcccttaagagaaaatattgccttacaactgggattaagcccttcgaagaattcttcaaggagaaatcaaaattgtgccacagaaatccctcaaattgttgaaataagcatcgaaaaggataatgattcttgtgttaccccaggaacaagacttgcacgaagagattcctactctcgacatgctccatggggtgggaagaaaaaacattcctgttctacaaagacccagagttcattggatgctgataaaaagtttggtagaactcgaagtggacttcaaaggagagagaggcgctacggcgtaagttctgtacacgacatggacagtgtttccagcagaactgtaggaagtcgctctctaagacagaggttgcaggatactgtgggcttgtgttttcccatgagaacttacagcaagcagtcaaagcctctcttttccaataaaagaaaaatccatctctctgaattaatgcttgagaaatgcccttttcctgctggctcagatttagcccaaaaatggcatttgattaaacagcatacagctcctgtgagcccacattcaacattttttgatacatttgatccatctttggtttctacagaagatgaagaagataggcttagagagagaaggcggcttagtattgaagaaggggttgatccccctcccaatgcacaaatacatacatttgaagctactgcacaggttaatccattatataaactgggaccaaaattagctcctggaatgactgaaataagtggggacagttctgcaattccacaagctaattgtgactcggaagaggatacaaccaccctgtgtttgcagtcacggaggcagaagcagcgtcagatatctggagacagccatacccatgttagcagacagggagcttggaaagtccacacacagattgattacatacactgcctcgtgcctgatttgcttcaaattacagggaatccctgttactggggagtgatggaccgttatgaagcagaagcccttctcgaagggaaacctgaaggcacgtttttgctcagggactctgcgcaagaggactacctcttctctgtgagcttccgccgctacaacagatccctgcatgcccgaattgagcagtggaatcacaactttagtttcgacgcccatgacccgtgtgtatttcactcctccactgtaacgggacttttagaacattataaagatcccagttcgtgcatgttttttgaaccattgcttactatatcactaaataggactttcccttttagcctgcagtatatctgtcgcgcggtaatctgcaggtgcactacgtatgatggaattgatgggctccctctaccctcaatgttacaggattttttaaaagagtatcattataaacaaaaagttagagttcgctggttggaacgagaaccagtcaaggcaaagtaaactctccggtccccaaaggttgttaactaggtccgctttcatgtgcatcagacagtacacctatagcaagcacacgtagcagtgttaggctttttcatacagtatgtaagcttagtgttagtatctgtcagatgctacctgctgttacttattcagataaacatggtgcctattggaacaatagcggatagagctacaggtgttcagtaagactacaaaaacattttgcctatttcgctaacagtttggtttttaatggctgtggtatttgagtgaggcaactctggggcatttgttatgaagaattctatttcttactgaagaacaaattattaatattggatgagtatttcaacagtgtgactaatgtttgaaattattttttctaagagtttttctataaccttccaaaagtcgtgatgtttgtagttactataaatcaagctttggaagtccaaaaagaataaaagactgccttccttttagaaaaaaatgcaattttctggccacaagggcatagtgcagttcacttacgtgttgatgtagtttataatcagacgccttttctcttctgcaaaaggtactgttaagtaaaccagattttctaaataggcattcttaaaatttcagacttacaaagctagtagtagaattttattgaaaggcctaggtattaattttttaaatgagtgctttaacttaaaacaggcgtttggaatagctgctgcaatgtagtcttgtgtgtgatttttttttaagttgatgtgcagtctaattgttgtttcataaaagttggatctgttcctatgcccaggatgattttgtgaaccgtgaagtacgtgagactagaagacgcccaaacaagtcagataatagtaactacaatggttgctgatgttgagattattgttgaactataattaataatttggatggcagaatttatctcttttttgtaaactctcataactgaattgcttaagtataatttatagaatttcagtgcagttcattcttaatggaaaatctgaaacctaaattgcagatttaaaaggtactgtacaaccattatatctgtaaataacttagcacctttttgtcacttagaataatatgtactactacttgagtgagcgcttttggaagttatatcaagttctagtgtttgcttcttagtaactgaactgaatttacagttctgtcctagacattttgcactaaagtagccgaatccactctcatgtcttttcgttaatgtgctctgtaccactggtgagtgctccatagtttccttacctgctgctacagaatgttattttacatccctatggctattgccaaggctacaaaaaaggaaagctatatttgtatgcaacactaaccttttgactgctaatgtatgtttctgcttgctgtgccttgttatggctgctttttttgtgctaataaagtatgtttggtgttctccttgtatatctgctgttttatacatttgcaacaatttctcttgtaaatggaatggtttggggtttttaaataagcattaactaacaacctttctatagttaatgcagagttaatgaacagtctaatattgacttatcagaataagctaactctaaatttaatgctctacatcttatcagtcataattatatatactgtggaacagtatctgtagttactgcaaattactgtacagtttaggttataacagaaaactgacagagaagtaataaacctattgatttctctgcttataaatgaaagattgaaactatccaatgacatattatagtaaatgagtatctgtaacctcccactgcatcagaagcaggttaaatgaagtcttgtgaatttgtaatagatcagtaccatttattggtttggggaccatcttaattaaaaataaatgcccaaaatgtagaactttaaccaaagacttgtcccttttaaagcaaaatggggattgaagggacttataatttctgttgtttctaattaaagtccctgaagatcatataccaaagtgtttgagaacttcatccaaacctactttaaagcattatgtgcaattaagttgttatgacataattatattgcctaattgttgggtcttttttcttgagcttataatgtacctggaaaataaacctcttgagaaaaagaaaa

SEQ ID NO: 187575 - DNA, 5848 bp, Homo sapiens
  Payload ID: 16920
  Gene Symbol: SOCS6
  Gene Name: suppressor of cytokine signaling 6
  Uniprot ID: O14544
  ENST ID: ENST00000397942
  CDS Start-End: 317-1924
agtagtggacggggggcggcccgctcggctcctccgcacccgctccccgctcgggccgaggcgccgcggccgcgcgcccctcctggaggaggaggaggaaggaggcgggaggaggagttgccgagaggagaaggcgagcgcggcagtcgcgccggcgctgggcgaggaagcggagccgggccgcctccggaaaatggctccaaaggttaaatgaagcaggaaaaatacatagatgcagccttgcagcctctccagatgtttggggataatattccagatagaaatattgatcccttggattaggtaactagtcataatgaagaaaattagtcttaaaaccttacggaaatcttttaacttgaataaaagtaaagaagaaactgatttcatggtagtacaacaaccatcgctagccagtgactttggaaaagatgattccttatttggtagctgctatggtaaagatatggccagctgcgatatcaacggtgaagatgaaaaaggcggaaaaaacagatcaaaaagcgagagcctgatgggtacgctaaaaaggcggctttctgcaaaacagaagtcaaaaggcaaggcgggcacaccctctgggagctctgccgacgaggacaccttctcctcctcctcagcacccatagtctttaaagacgtgagagctcagaggccgataaggtccacgtcgctccgcagccatcactacagtcccgcgccgtggcctctgcggcccacaaactccgaggagacctgcatcaagatggaggtgagagtcaaggccttggttcactcttccagcccgagtccagccctgaatggcgtccggaaggatttccacgacctccagtctgagaccacgtgccaggagcaagccaattcactgaagagctcggcttctcataatggagacctgcatcttcacctggatgaacatgtgcctgtcgttattggacttatgcctcaggactacattcagtatactgtgcctttagatgaggggatgtatcctttggaaggatcacggagctattgtctggacagctcttctcccatggaagtctctgcggttcctcctcaagtgggagggcgcgctttccccgaggatgagagtcaggtagaccaggacctagttgtcgccccagagatcttcgtggatcagtccgtgaatggcttgttgattggcaccacgggagtcatgttgcagagcccgagagcgggtcacgatgatgtccctccactctcaccattgctacctccaatgcagaataatcaaatccaaaggaacttcagtggactcactggcacagaagcccacgtggctgaaagtatgcgctgtcatttgaattttgatccgaactctgctcctggggttgcaagagtttatgactcagtgcaaagtagtggtcccatggttgtgacaagccttacagaggagctgaaaaaacttgcaaagcaaggatggtactggggaccaatcacacgttgggaggcagaagggaagctagcaaacgtgccagatggttcttttcttgttcgggacagttctgacgaccgttaccttttaagcttgagctttcgctcccatggtaaaacacttcacactagaattgagcactcaaatggtaggtttagcttttatgaacagccagatgtggaaggacatacgtccatagttgatctaattgagcattcaatcagggactctgaaaatggagctttttgttattcaaggtctcggctgcctggatctgcaacttaccccgtcagactgaccaacccagtgtcccggttcatgcaggtgcgctcgttgcagtacctgtgtcgttttgttatacgtcagtataccagaatagacttaattcagaaactgcctttgccaaacaaaatgaaggattatttacaggagaagcactactgaaagattgagaaccctgcatcttgcactttgggaataagaacaagagattgaaatacagtttacaaactttcattgccatcaaaatcttttgctgccataactatttcagttttatgtgtaaaagagtcatcagtttgtttaggggtggggaagtgtcagcaaggtgtcttgggtttattttggttctttaaaaaagggaagtcttgaggttttagaggtgtgaattatgtttcatcaatgtgcagaataatcacaatgtgaattatcaaattctcctcaatgccccccccgcccagtcctttgctgctatccactgtgatttttatgcattaaaagcacatttcatgtgtattcaaccctaagtaaagttgaatgaaacttaacagaatggaaattgctatgtctttttaaatggtccattttcaaaagacagtgttgaataaacatacctgtgtgataaaacacagaatttacatatacactgaagatgagtttttaatctcttactttaaaaagatttatttagaatcgtgaattgacataatcttgggtaatggaacggagatctgcaacatatcttttaacaacacttttttctaaattatttctaaggttgtgctaattcttttggttgtgaaaagttgaatttttctgttgccttcgttttcatcttctagtttgtctattttaataaatggccttacattaaaaaattgtaaagaaatgtataccaccaatttagaaattgttgccttttctgtaattaaactcgggtacaaattggcataacatgaaaacctatggaactagaattattattaaagaaatattagatgatcatagcttcctgtgatagcatttttttgtgtgttacctatccttttggtaaaatgttttatctgtgatttctttagcttagtcaacattttcttgggtgaacttgattgtcaactaattttcataaatggactggattctcttgcaacattaatgtttataaaaagttttaaattgatttgaatagaaagaaaacattgttttaaagttggatttatatttttcttctatgtagttactataaaagtgtgctggatttgaccaatccttacccccactataaagagaacccgtgatgactttagtttaaaaattgtggaaattgtggagcaatttttctcacaatgtgagaaaaattctaaaccatattagataatgtggaagtcatattgtctatcatatatactgccatttaaaaataggtttttaaaatttagctaagtcttaagtaatttgccgttgctaataattttatctccttgagtcggttgttggggagagatgttatattcaataatttttagttattttgtaatgcagagtgtttattcatttcacagttctgcaatggatgtagtattttgggattgccctgtccagaaaattttcagctacacacctttaaaggaaaatgtttctatctcagatgaaacatgtaatttgggatggttcttcctttgtcacttaaaggaagagataggaaaagtctcttacccactttaaacatgagggtaaaggtttaggtcaaacttactggctttgtcattcaagcatatctgaatcctcacttttttctctttgctttttagggtcagaactgagatattaccaagaaaaggcacaatgccataatattatggtgttatggtattttgacttaaaggggaaaaggtacttaattttggtgggatgttgattgtaccttgttaaaaagactctcattttctcatatgttttctcctaataagatggaatatggagtatactgtaataatataagtgttcattataagctatttggattaagaactattgcagagttgtaagcttgttatcaaattaatgcaagacatttaaactatttttttgcaaaactatttatttttaaaacaacttaaagtatatctagggtgagttaaaagtccctgtgcatctatattagatggcaggttttgtcacagagtcactgtgtattaataataaatgttgaaatggcttctccgtgtctccagaagcatttacatgtcctccttgtgagatcatggtgcacagaggtctttggactgccctgaacccgtcttatgtggacataacctattcccttcgttttctcatcatgccatgtgtttaagatctacccgcttagtgtcaagattattgagattttcatctaaatgtttttaaaattgtattttgtgttttagtggaggacagtcttgatactgttctaattcagaaagccaaattttgatgcgcttttgtatattcataatatatactttaatatgccctattctaatctagtttgaaattgttagattctgatagtataatgataaaatcaaactatttgccaaaaagttaaatttacaagcagaaagatgttttgcgatattttctacttttgtgtagaaagataaccatttggggtaggcagcacaacagaatgtgaaagattggctttatatgatactaacacagtccagttaaaagtggaaacagggaaaagagagagagaaaactcatcatttagtttggtctagacacaatttggttaaattttaggattctattggcagttaacatagatgacatggacacagcctatgagtgctttttaaatacgtgcttctaaaaatctgagctcaaagcaagaaaaagaaaacaggaaagctgtatccatttgccataatagatgaatcagaattgttttctattaaatatttcatcacgaaatatgatggaggccagaagctatttttaggcttactataacactattatgcatttttataaataagaagaaggctgtagaaagtacttgaaaaatatctaattctctttctgtctaaggaaaactctttctacttggtgcaataatctgaaaatttagaaggtcaaaatatgtcacaggaaatgatcatagacctaaaaatagtttttaaggaaaccagctacacggggcaaccaaccatcttgctgttgaagaaaacagttccaaaaggctaaatcattggcataaaggaaacaaaacccaaagtatgcgttgtaattcttgagccagtattactgaaacaggataaaagttataaaatctaacataggttaatgcaatgtctctgctagtgctacaagtctaaaatatctttgtaacaatgctttcagaaatgccagttttaattacatttcacattgtatatgagagatactgctttatgaatgaatcggaataatacattttcatttaaatcttaattgcttttcattaaatgcgaagtcttaatttcaaaatgaaatcacactaccagcaatagacagttttcttgaaaactctaataaggaacaatagccagttccgtaaataactttaaaattctaaaagtgttggtacactagcaatcacaaatatggtttcttttaatacttttttaatcctgtaaagaagggtttttataaacattctttttattaatcagtcataacatggcgaagtgtgtagttgctgtttctgaaaagtgatccaaactctacatccagagattatgaaaaattcttatagaattttgtaacaagtatttacatgttgggtgaaagaaatttcatagtcgttggagtgccatgaaattaatacttgcaattcagattgcggtagtttacactttttctgtatgtttcaaatcaggtgtgtaccatttgtactgagaacaccacagaatgaattatccaaagtccattgattttaatacgtgttttggtttgtaaacaaattatagtaatttcttgcacatttttggaaattaattgtataagaatttatgtatctgcttctagatacagtgtgtaaataaaaaatttcgttcacaagac

SEQ ID NO: 187576 - DNA, 894 bp, Homo sapiens
  Payload ID: 16920
  Gene Symbol: SOCS6
  Gene Name: suppressor of cytokine signaling 6
  ENST ID: ENST00000578377
  CDS Start-End: 212-894
cttggaatattgcaggcattgctccgttgtcgtccggttttcagtgttactgttaagtcacatgccgccagtttcccaggcagttaaaatggctccaaaggttaaatgaagcaggaaaaatacatagatgcagccttgcagcctctccagatgtttggggataatattccagatagaaatattgatcccttggattaggtaactagtcataatgaagaaaattagtcttaaaaccttacggaaatcttttaacttgaataaaagtaaagaagaaactgatttcatggtagtacaacaaccatcgctagccagtgactttggaaaagatgattccttatttggtagctgctatggtaaagatatggccagctgcgatatcaacggtgaagatgaaaaaggcggaaaaaacagatcaaaaagcgagagcctgatgggtacgctaaaaaggcggctttctgcaaaacagaagtcaaaaggcaaggcgggcacaccctctgggagctctgccgacgaggacaccttctcctcctcctcagcacccatagtctttaaagacgtgagagctcagaggccgataaggtccacgtcgctccgcagccatcactacagtcccgcgccgtggcctctgcggcccacaaactccgaggagacctgcatcaagatggaggtgagagtcaaggccttggttcactcttccagcccgagtccagccctgaatggcgtccggaaggatttccacgacctccagtctgagaccacgtgccaggagcaagccaattcactgaagagctcggcttctcataatggagacctgcatcttcacctggatgaacatgtgcctgtcgttattggacttatgcctcaggactacattcagtatactgtgcctttaga

SEQ ID NO: 187577 - DNA, 2625 bp, Homo sapiens
  Payload ID: 16920
  Gene Symbol: SOCS6
  Gene Name: suppressor of cytokine signaling 6
  Uniprot ID: O14544
  ENST ID: ENST00000582322
  CDS Start-End: 178-1785
aggttgcagtgagctgagatggcaccaccacactccagcctgggcgacagaaaaatggctccaaaggttaaatgaagcaggaaaaatacatagatgcagccttgcagcctctccagatgtttggggataatattccagatagaaatattgatcccttggattaggtaactagtcataatgaagaaaattagtcttaaaaccttacggaaatcttttaacttgaataaaagtaaagaagaaactgatttcatggtagtacaacaaccatcgctagccagtgactttggaaaagatgattccttatttggtagctgctatggtaaagatatggccagctgcgatatcaacggtgaagatgaaaaaggcggaaaaaacagatcaaaaagcgagagcctgatgggtacgctaaaaaggcggctttctgcaaaacagaagtcaaaaggcaaggcgggcacaccctctgggagctctgccgacgaggacaccttctcctcctcctcagcacccatagtctttaaagacgtgagagctcagaggccgataaggtccacgtcgctccgcagccatcactacagtcccgcgccgtggcctctgcggcccacaaactccgaggagacctgcatcaagatggaggtgagagtcaaggccttggttcactcttccagcccgagtccagccctgaatggcgtccggaaggatttccacgacctccagtctgagaccacgtgccaggagcaagccaattcactgaagagctcggcttctcataatggagacctgcatcttcacctggatgaacatgtgcctgtcgttattggacttatgcctcaggactacattcagtatactgtgcctttagatgaggggatgtatcctttggaaggatcacggagctattgtctggacagctcttctcccatggaagtctctgcggttcctcctcaagtgggagggcgcgctttccccgaggatgagagtcaggtagaccaggacctagttgtcgccccagagatcttcgtggatcagtccgtgaatggcttgttgattggcaccacgggagtcatgttgcagagcccgagagcgggtcacgatgatgtccctccactctcaccattgctacctccaatgcagaataatcaaatccaaaggaacttcagtggactcactggcacagaagcccacgtggctgaaagtatgcgctgtcatttgaattttgatccgaactctgctcctggggttgcaagagtttatgactcagtgcaaagtagtggtcccatggttgtgacaagccttacagaggagctgaaaaaacttgcaaagcaaggatggtactggggaccaatcacacgttgggaggcagaagggaagctagcaaacgtgccagatggttcttttcttgttcgggacagttctgacgaccgttaccttttaagcttgagctttcgctcccatggtaaaacacttcacactagaattgagcactcaaatggtaggtttagcttttatgaacagccagatgtggaaggacatacgtccatagttgatctaattgagcattcaatcagggactctgaaaatggagctttttgttattcaaggtctcggctgcctggatctgcaacttaccccgtcagactgaccaacccagtgtcccggttcatgcaggtgcgctcgttgcagtacctgtgtcgttttgttatacgtcagtataccagaatagacttaattcagaaactgcctttgccaaacaaaatgaaggattatttacaggagaagcactactgaaagattgagaaccctgcatcttgcactttgggaataagaacaagagattgaaatacagtttacaaactttcattgccatcaaaatcttttgctgccataactatttcagttttatgtgtaaaagagtcatcagtttgtttaggggtggggaagtgtcagcaaggtgtcttgggtttattttggttctttaaaaaagggaagtcttgaggttttagaggtgtgaattatgtttcatcaatgtgcagaataatcacaatgtgaattatcaaattctcctcaatgccccccccgcccagtcctttgctgctatccactgtgatttttatgcattaaaagcacatttcatgtgtattcaaccctaagtaaagttgaatgaaacttaacagaatggaaattgctatgtctttttaaatggtccattttcaaaagacagtgttgaataaacatacctgtgtgataaaacacagaatttacatatacactgaagatgagtttttaatctcttactttaaaaagatttatttagaatcgtgaattgacataatcttgggtaatggaacggagatctgcaacatatcttttaacaacacttttttctaaattatttctaaggttgtgctaattcttttggttgtgaaaagttgaatttttctgttgccttcgttttcatcttctagtttgtctattttaataaatggccttacattaaaaaattgtaaagaaatgtataccaccaatttagaaattgttgccttttctgtaattaaactcgggtacaaattggcataacatgaaaacctatggaactagaattattattaaagaaatattagatgatca

SEQ ID NO: 187578 - DNA, 7857 bp, Homo sapiens
  Payload ID: 16921
  Gene Symbol: SOCS7
  Gene Name: suppressor of cytokine signaling 7
  Uniprot ID: O14512
  ENST ID: ENST00000615473
  CDS Start-End: 1-1746
atggtgttccgcaacgtgggtcggccgccggaggaggaggacgtggaggcggccccggagccgggaccctcggaactgctgtgtccccggcaccgctgtgccctggaccccaaggccctgccgccgggcttggcgctcgagcggacctggggcccggcggctggactagaggcgcagttggcggctctggggctcgggcagccggcggggccgggggtcaagacagtcggtgggggttgctgcccgtgtccgtgtcctcctcagccgccccctccgcagccccagccgcctgctgccgccccgcaggccggggaggaccccacggaaacgagcgacgcgctgctggtcctggagggcttggaatcggaggccgagagcctggagactaacagctgctcggaagaggagctcagcagcccgggtcgcggaggaggagggggcggccggcttctgctgcagcccccaggccctgaattacctccggtgcccttcccgctgcaggacttggtccctctggggcgcctgagtagaggggagcagcagcagcagcagcagcagcaacctcccccgcccccgcctcctcccgggcccctccggccactcgcgggtccttctcggaagggctccttcaaaatccgcctcagtcgcctctttcgcaccaagagctgcaacggtggctccggcggtggggatgggaccggcaagaggccttctggagagctggctgcttcagctgcgagcctgacagacatgggaggctctgcgggccgggagctggacgcggggaggaaacccaagttgacaagaactcaaagtgccttttctccggtctccttcagccccctgttcacaggtgaaactgtgtcgcttgtggatgtggacatttctcagcggggcctgacctctccacaccctccaactccccctcctcctccgagaagaagcctcagcctcctagatgatatcagtgggacgctgcctacatctgtccttgtggctccgatggggtcttccttgcagtctttccccctacctccgcctcctccaccccatgccccagatgcatttccccggattgctcccatccgagcagctgaatccctgcacagccaacccccacagcacctccagtgtcccctctaccggcctgactcgagcagctttgcagccagccttcgagagttggagaagtgtggttggtattgggggccaatgaattgggaagatgcagagatgaagctgaaagggaaaccagatggttctttcctggtacgagacagttctgatcctcgttacatcctgagcctcagtttccgatcacagggtatcacccaccacactagaatggagcactacagaggaaccttcagcctgtggtgtcatcccaagtttgaggaccgctgtcaatctgttgtagagtttattaagagagccattatgcactccaagaatggaaagtttctctatttcttaagatccagggttccaggactgccaccaactcctgtccagctgctctatccagtgtcccgattcagcaatgtcaaatccctccagcacctttgcagattccggatacgacagctcgtcaggatagatcacatcccagatctcccactgcctaaacctctgatctcttatatccgaaagttctactactatgatcctcaggaagaggtatacctgtctctaaaggaagcgcagctcatttccaaacagaagcaagaggtggaaccctccacgtagcgaggggctccctgctggtcaccaccaagggcatttggttgccaagctccagctttgaagaaccaaattaagctaccatgaaaagaagaggaaaagtgagggaacaggaaggttgggattctctgtgcagagactttggttccccacgcagccctggggcttggaagaagcacatgaccgtactctgcgtggggctccacctcacacccacccctgggcatcttaggactggaggggctccttggaaaactggaagaagtctcaacactgtttctttttcagaagttttgtttttgatatttatattacttggtatggaaaactcaccttgaaggcagttggggtttgtgcccgttggattgaaagtggtgcgaagggtgagcaggtccaaagaaggggtgggaggagggaacaggggacggccattcagctggtgccaaaggcagagttagagtctgtgctgtgggcctggaagatgggaggaggggcttgaggtttgcaaaggactgggagttcctgaggaagggggaatctgcctcttgttgccatgggcagctgttgtaggagcaggagagaaaggagggtgggtggtctcgaaaagaatattgggcaaaacctagccaattggccttagctgggagaagtagtgactcctgcatccttttttaaggtttaggaacctgagttcagaaacacctctcatggaagctgtactagttgtgatttacttaattccttaagttccatgacctgaagttaaccccgttcttcctctgctctcaacccattgccccttgagataactgtacatgtcactctgatcatggtaacagcatccctattgcttctgccagctgtcatggcaatcgtgtttcccatcacctgggcggttcagagccagtcatgggctgctgaatttaatggagcatgtttccaggttcttcatggcaaactgtactcatgacttaggagtgagtgttacttccatgtgcctgtcagcttgtgagggggaatgtggaggaaggtgagaaatacagctcccacagttgtgctcttcctagaggaagctctcagaacgcagccctcacgggatttccttaggtcagaggagagcatcgcatctcacgtttttaggtttatcactgccatcccacttctgggatgggaggtagcaagggcttctgtattttcttgtgttcattctagcaacccagacatttccggatcagatcctgctggtctccactcactggaaagtctgccagatgccgatttgagagctgcctgtccctgctttcaggaggagcggggagaaaaactccaatggtctttaatggtttctgcagctggccatggccaattcatatgacattgtgagtttgctttcttatagagctgctctggggagaggtttgctattgagatgtaacagtggagctgttgggtcttcatgactcctttgcgtgtgttccatgggactctctttctgggttccccatgcttatagttgcctcgtgtcacaagacagatactaatgtcaggtttgtggcttcctgatggtttgggtggggccccagtgtcctggtaatttataggactgcctcatctgggagcattgccttcttccttagtcccacgtggagtgaccagtcttcctccttgtagctgaacagggaggaaacttgcaccattacctgactgtggaagggtggcccacaagatgagctgtgcaccataaacacagcccacctctgatttgtcatgtggtacctcttctttccttggcttccatggtagtattaccaactaagcaagattgtgatcccagaaattggcttagcatgtgagtgttgcctcgtgagagtacaagtaatataactcgccatcttgcaggaagtgccaccccaatatagagcctgaagttggaatctgttgagatccttgggtggctgatatacagcctgggatctttcttttttttgttccttttcaaccacccataattttaatattattttttagtgtgtgtgtgcctggctttgcgctagatattgtagaaaacaaaaaaggtaaaagacgtaatatgtggcctaagggagcttttaggtgactgctgcacatcaagcagaaaatcaaggactatctaaagacgtttatagtagataagatcagggtagaccagatggtctgggaaagttctgtgcctctgaggctttgggttgtagtcaatggcaggacagacagtgagatgaaaaacacatgagcaaaagcaaggaagcagaaatctgcatggcatgtactgaacagtgcacagccctgttagagcaacatggttaaagaatcctttccagtgcggttttctagatggaagcttcccagccaccaggcagacctgagtgccgaggggttatgatggtgaggtggagcccaaagcccaaaggagtcagcaaggctcctgcccattgccagggcctcactatggtcagctcaggccatgtgagggaggcagagcctccgcaccccctgtgttactggggtttcttctggagaactcatacattcaggtacaaaacaaaccaactgaggaggtgtgacccaacctcaccacccacctttctcctcctggggagtgtcgtgttgaactgtgtctgtgtcagtgcactggtcccagccctggccgcagcctagtcctttctctgtggagtgggctgcaaaacagcagcgcaagaggagacagtcttcgtcaggtgtgggtgtttggtgcctgcatgggtggccttgcacagagcagttaggggaagatgagggggaggcatggggctgggccagctctctgggatacagcctggtcagagagtaaatggagcagaggaacaggtgtggcagcacctgcccttcacctccctgaccaggcccgtccctccttcgccagtgctgtgcagagctcatttaaatgtattcctttctaggtctgggcgcggtggctcacgcctgtaatcccagcactttgggaggctgaggtgggtggatcatgaggtcgggagttcaagaccagcttggccaaacagtgaaaccctatctctactaaaatacaaaaattagctgggcatggtggcatgcgcctgtagtcccagctacttgggaggctgagacaggagaattgcttgaacccaggaggcggaggttgcactgagccgagattgcgccactgccctctagcctagacgacagagtgagactccatctcaaaaaaaataaataatttctttctggttgtattttcaagtcacaaattggaaaaggcttacatctagggacccactgttgattcctaagttgtgggtgggtgatatcagtggcctcagtgcctgcataaccctcacctgtttatgactgatctactgtaaccttcctcaggttgagagtgagctgctgtgagccagtgacaactactgctacaacttgctgttacttgaaattcgtgtgctatgttggtagcacaggagtaggcgggcgggggttttggtgtgggcactaggtaagtgggtggcaaccggctctttgggaccattggtgctgacctttgcctggtcacctgcctgtgcctaggccaagtgaatgttacatcttggaacctgagccatggaggtggcgccacctccctgaggagaaaggtgtggccaaaggaaactcctgcatggctcctgctccttccccttccctacatttcacttgggctaatgatgtaagccccccttgaggttggggatggtgtggagatagctgcagacacccctgtaacagacatccaggaagaattagggagtgggggtaattatagttcctaggtctaggggtgagaggtgggagtagaaccagaagtgccctggaatccagccgtgtcagccctcaccccagggcccccaggaaagcatggcctgcttgaagccctctgctccctgcagaaactggggcgaggaggagctttttccttcagttagatctttcccttccctgctgcctcgctcccttagctttggagccctaaagttagtggacaagacactgggataaagctctatggctgctggaaggaggtctgagtctgtgtgtgtgcatatgcatgcatgtgtgtgtgtgtgtgtgtcctcatttgcagaagtcttgctaccagttagggtgttaagagcatctccactgggcggagacctggcatttgttttccactgttaagagaatgacacaccccctgtcatgtaagggaggagctattgagttagacattttccctatgggaatcctcggtttggtttgtgggaaaggagggaatggataagtgatttttatctctaatcgtcaacacagctgttcttccactgaatttgtgctattgcatacatgtagccatctttcttttcactgcagcagtgtttatcagtagttcaaaatgatttatttgctcctggggagtaaaaccttttttattaaaaaaagaaaaagaaaaaaaaaagaaagaaaagtgtgcccccctcctatgctgcgatagctataaaatgattgggtcacaaaggtcaagtctgcacgtccctgtggtagaccctgctttcacattggagccttcacactcagcacaaaatgattggaggccttgataaaatggagagcaaagtcttgggagcagtgaaatgggggttggatcatagagacaggcgctggggactcgggtactgcagttaggaaagtagcgttatgagttgtactgaaaatgttgattctctaatctgccagaaaaggacctgtcttttcatgcagatttcatattgtctttgtccttttcattgcttcttgaccttcctggcaggtgtcgctcagtttcttcctgtttcccttcctgtcctctccacacctgctatcccgtcccactcccatctacctcccgggaagccagccctgcatgctgagtttgtgacctgcttcattcccatttcatttctagagggtttagaggtgacctggaaccgttccctttccctctcctaccccctcctctgcaacaccaagaggcctggaggggcagacagaaagcagccagccacggcgggaagacatgcatgtttggttgcagctggactgcgatcgtagttcctcctggagatagagtgtgaggaacttaggacactcttcctcagactctgggatcatcacataccacactgccccgctcagagtttcgtcctgagctccctaaccagctcaggtggagcagaagcctgctctcactcctccatctctggtgctcccttgggcggggacctgtccctcactcttaggcccagaacctgtccaagggacaggtagggtccaggtgccactttgggtagctggctgttggaatgcccacactggtgctgcctgtggcatagccactgctgtacgtttttggttgtttttaagaaactcgatgaagaggggtgtcattctgggctcggggtggttgccaatttttcaccagaaagggagccaccccttgcaaccacttctgtctccgttagccccccctctgccctcctccaagccaaagcgtggcctggcttttgtcttcccatttagttttcctcttttacccttccttttgtgcttaatttattaaaatagttgctgtataatttattttcataaactataaaaaaatactaaatggttaaaatagacttgcaggccaatcttaaatggggtgggaggggtctgagggtgggatggggaaagggaaagaggttttgatataaacaaaacaaatgcactttgggtgtgttttggtatttttctggggatagagggggtggggttagggatgtccctgtagattagttccagaatggggtgtctgtatatactgtattaataggcatgtttgactctcgtaaagggacgttagtagctgctgcaggtcctgtttggaaaccccatgtacaattcccagttttttgtaagtgtcagtgcgagagacatttgactcttgtgtttgtatctcctttttatgattgctgtacctacccatgtctttttggggaggggtgaaaagagatttgaaataaaaatgtttagaaatta

SEQ ID NO: 187579 - DNA, 7857 bp, Homo sapiens
  Payload ID: 16921
  Gene Symbol: SOCS7
  Gene Name: suppressor of cytokine signaling 7
  Uniprot ID: O14512
  ENST ID: ENST00000612932
  CDS Start-End: 1-1746
atggtgttccgcaacgtgggtcggccgccggaggaggaggacgtggaggcggccccggagccgggaccctcggaactgctgtgtccccggcaccgctgtgccctggaccccaaggccctgccgccgggcttggcgctcgagcggacctggggcccggcggctggactagaggcgcagttggcggctctggggctcgggcagccggcggggccgggggtcaagacagtcggtgggggttgctgcccgtgtccgtgtcctcctcagccgccccctccgcagccccagccgcctgctgccgccccgcaggccggggaggaccccacggaaacgagcgacgcgctgctggtcctggagggcttggaatcggaggccgagagcctggagactaacagctgctcggaagaggagctcagcagcccgggtcgcggaggaggagggggcggccggcttctgctgcagcccccaggccctgaattacctccggtgcccttcccgctgcaggacttggtccctctggggcgcctgagtagaggggagcagcagcagcagcagcagcagcaacctcccccgcccccgcctcctcccgggcccctccggccactcgcgggtccttctcggaagggctccttcaaaatccgcctcagtcgcctctttcgcaccaagagctgcaacggtggctccggcggtggggatgggaccggcaagaggccttctggagagctggctgcttcagctgcgagcctgacagacatgggaggctctgcgggccgggagctggacgcggggaggaaacccaagttgacaagaactcaaagtgccttttctccggtctccttcagccccctgttcacaggtgaaactgtgtcgcttgtggatgtggacatttctcagcggggcctgacctctccacaccctccaactccccctcctcctccgagaagaagcctcagcctcctagatgatatcagtgggacgctgcctacatctgtccttgtggctccgatggggtcttccttgcagtctttccccctacctccgcctcctccaccccatgccccagatgcatttccccggattgctcccatccgagcagctgaatccctgcacagccaacccccacagcacctccagtgtcccctctaccggcctgactcgagcagctttgcagccagccttcgagagttggagaagtgtggttggtattgggggccaatgaattgggaagatgcagagatgaagctgaaagggaaaccagatggttctttcctggtacgagacagttctgatcctcgttacatcctgagcctcagtttccgatcacagggtatcacccaccacactagaatggagcactacagaggaaccttcagcctgtggtgtcatcccaagtttgaggaccgctgtcaatctgttgtagagtttattaagagagccattatgcactccaagaatggaaagtttctctatttcttaagatccagggttccaggactgccaccaactcctgtccagctgctctatccagtgtcccgattcagcaatgtcaaatccctccagcacctttgcagattccggatacgacagctcgtcaggatagatcacatcccagatctcccactgcctaaacctctgatctcttatatccgaaagttctactactatgatcctcaggaagaggtatacctgtctctaaaggaagcgcagctcatttccaaacagaagcaagaggtggaaccctccacgtagcgaggggctccctgctggtcaccaccaagggcatttggttgccaagctccagctttgaagaaccaaattaagctaccatgaaaagaagaggaaaagtgagggaacaggaaggttgggattctctgtgcagagactttggttccccacgcagccctggggcttggaagaagcacatgaccgtactctgcgtggggctccacctcacacccacccctgggcatcttaggactggaggggctccttggaaaactggaagaagtctcaacactgtttctttttcagaagttttgtttttgatatttatattacttggtatggaaaactcaccttgaaggcagttggggtttgtgcccgttggattgaaagtggtgcgaagggtgagcaggtccaaagaaggggtgggaggagggaacaggggacggccattcagctggtgccaaaggcagagttagagtctgtgctgtgggcctggaagatgggaggaggggcttgaggtttgcaaaggactgggagttcctgaggaagggggaatctgcctcttgttgccatgggcagctgttgtaggagcaggagagaaaggagggtgggtggtctcgaaaagaatattgggcaaaacctagccaattggccttagctgggagaagtagtgactcctgcatccttttttaaggtttaggaacctgagttcagaaacacctctcatggaagctgtactagttgtgatttacttaattccttaagttccatgacctgaagttaaccccgttcttcctctgctctcaacccattgccccttgagataactgtacatgtcactctgatcatggtaacagcatccctattgcttctgccagctgtcatggcaatcgtgtttcccatcacctgggcggttcagagccagtcatgggctgctgaatttaatggagcatgtttccaggttcttcatggcaaactgtactcatgacttaggagtgagtgttacttccatgtgcctgtcagcttgtgagggggaatgtggaggaaggtgagaaatacagctcccacagttgtgctcttcctagaggaagctctcagaacgcagccctcacgggatttccttaggtcagaggagagcatcgcatctcacgtttttaggtttatcactgccatcccacttctgggatgggaggtagcaagggcttctgtattttcttgtgttcattctagcaacccagacatttccggatcagatcctgctggtctccactcactggaaagtctgccagatgccgatttgagagctgcctgtccctgctttcaggaggagcggggagaaaaactccaatggtctttaatggtttctgcagctggccatggccaattcatatgacattgtgagtttgctttcttatagagctgctctggggagaggtttgctattgagatgtaacagtggagctgttgggtcttcatgactcctttgcgtgtgttccatgggactctctttctgggttccccatgcttatagttgcctcgtgtcacaagacagatactaatgtcaggtttgtggcttcctgatggtttgggtggggccccagtgtcctggtaatttataggactgcctcatctgggagcattgccttcttccttagtcccacgtggagtgaccagtcttcctccttgtagctgaacagggaggaaacttgcaccattacctgactgtggaagggtggcccacaagatgagctgtgcaccataaacacagcccacctctgatttgtcatgtggtacctcttctttccttggcttccatggtagtattatcaactaagcaagattgtgatcccagaaattggcttagcatgtgagtgttgcctcgtgagagtacaagtaatataactcgccatcttgcaggaagtgccaccccaatatagagcctgaagttggaatctgttgagatccttgggtggctgatatacagcctgggatctttcttttttttgttccttttcaaccacccataattttaatattattttttagtgtgtgtgtgcctggctttgcgctagatattgtagaaaacaaaaaaggtaaaagacgtaatatgtggcctaagggagcttttaggtgactgctgcacatcaagcagaaaatcaaggactatctaaagacgtttatagtagataagatcagggtagaccagatggtctgggaaagttctgtgcctctgaggctttgggttgtagtcaatggcaggacagacagtgagatgaaaaacacatgagcaaaagcaaggaagcagaaatctgcatggcatgtactgaacagtgcacagccctgttagagcaacatggttaaagaatcctttccagtgcggttttctagatggaagcttcccagccaccaggcagacctgagtgccaaggggttatgatggtgaggtggagcccaaagcccaaaggagtcagcaaggctcctgcccattgccagggcctcactatggtcagctcaggccatgtgagggaggcagagcctctgcaccccctgtgttactggggtttcttctggagaactcatacattcaggtacaaaacaaaccaactgaggaggtgtgacccaacctcaccacccacctttctcctcctggggagtgtcgtgttgaactgtgtctgtgtcagtgcactggtcccagccctggccgcagcctagtcctttctctgtggagtgggctgcaaaacagcagcgcaagaggagacagtcttcgtcaggtgtgggtgtttggtgcctgcatgggtggccttgcacagagcagttaggggaagatgagggggaggcatggggctgggccagctctctgggatacagcctggtcagagagtaaatggagcagaggagcaggtgtggcagcacctgcccttcacctccctgaccaggcccgtccctccttcgccagtgctgtgcagagctcatttaaatgtattcctttctaggtctgggcgcggtggctcacgcctgtaatcccagcactttgggaggctgaggtgggtggatcatgaggtcgggagttcaagaccagcttggccaaacagtgaaaccctatctctactaaaatacaaaaattagctgggcatggtggcatgcgcctgtagtcccagctacttgggaggctgagacaggagaattgcttgaacccaggaggcggaggttgcactgagccgagattgcgccactgccctctagcctagacgacagagtgagactccatctcaaaaaaaataaataatttctttctggttgtattttcaagtcacaaattggaaaaggcttacatctagggacccactgttgattcctaagttgtgggtgggtgatatcagtggcctcagtgcctgcataaccctcacctgtttatgactgatctactgtaaccttcctcaggttgagagtgagctgctgtgagccagtgacaactactgctacaacttgctgttacttgaaattcgtgtgctatgttggtagcacaggagtaggcgggcgggggttttggtgtgggcactaggtaagtgggtggcaaccggctctttgggaccattggtgctgacctttgcctggtcacctgcctgtgcctaggccaagtgaatgttacatcttggaacctgagccatggaggtggcgccacctccctgaggagaaaggtgtggccaaaggaaactcctgcatggctcctgctccttccccttccctacatttcacttgggctaatgatgtaagccccccttgaggttggggatggtgtggagatagctgcagacacccctgtaacagacatccaggaagaattagggagtgggggtaattatagttcctaggtctaggggtgagaggtgggagtagaaccagaagtgccctggaatccagccgtgtcagccctcaccccagggcccccaggaaagcatggcctgcttgaagccctctgctccctgcagaaactggggcgaggaggagctttttccttcagttagatctttcccttccctgctgcctcgctcccttagctttggagccctaaagttagtggacaagacactgggataaagctctatggctgctggaaggaggtctgagtctgtgtgtgtgcatatgcatgcatgtgtgtgtgtgtgtgtgtcctcatttgcagaagtcttgctaccagttagggtgttaagagcatctccactgggcggagacctggcatttgttttccactgttaagagaatgacacaccccctgtcatgtaagggaggagctattgagttagacattttccctatgggaatcctcggtttggtttgtgggaaaggagggaatggataagtgatttttatctctaatcgtcaacacagctgttcttccactgaatttgtgctattgcatacatgtagccatctttcttttcactgcagcagtgtttatcagtagttcaaaatgatttatttgctcctggggagtaaaaccttttttattaaaaaaagaaaaagaaaaaaaaaagaaagaaaagtgtgcccccctcctatgctgcgatagctataaaatgattgggtcacaaaggtcaagtctgcacgtccctgtggtagaccctgctttcacattggagccttcacactcagcacaaaatgattggaggccttgataaaatggagagcaaagtcttgggagcagtgaaatgggggttggatcatagagacaggcgctggggactcgggtactgcagttaggaaagtagcgttatgagttgtactgaaaatgttgattctctaatctgccagaaaaggacctgtcttttcatgcagatttcatattgtctttgtccttttcattgcttcttgaccttcctggcaggtgtcgctcagtttcttcctgtttcccttcctgtcctctccacacctgctatcccgtcccactcccatctacctcccgggaagccagccctgcatgctgagtttgtgacctgcttcattcccatttcatttctagagggtttagaggtgacctggaaccgttccctttccctctcctaccccctcctctgcaacaccaagaggcctggaggggcagacagaaagcagccagccacggcgggaagacatgcatgtttggttgcagctggactgcgatcgtagttcctcctggagatagagtgtgaggaacttaggacactcttcctcagactctgggatcatcacataccacactgccccgctcagagtttcgtcctgagctccctaaccagctcaggtggagcagaagcctgctctcactcctccatctctggtgctcccttgggcggggacctgtccctcactcttaggcccagaacctgtccaagggacaggtagggtccaggtgccactttgggtagctggctgttggaatgcccacactggtgctgcctgtggcatagccactgctgtacgtttttggttgtttttaagaaactcgatgaagaggggtgtcattctgggctcggggtggttgccaatttttcaccagaaagggagccaccccttgcaaccacttctgtctccgttagccccccctctgccctcctccaagccaaagcgtggcctggcttttgtcttcccatttagttttcctcttttacccttccttttgtgcttaatttattaaaatagttgctgtataatttattttcataaactataaaaaaatactaaatggttaaaatagacttgcaggccaatcttaaatggggtgggaggggtctgagggtgggatggggaaagggaaagaggttttgatataaacaaaacaaatgcactttgggtgtgttttggtatttttctggggatagagggggtggggttagggatgtccctgtagattagttccagaatggggtgtctgtatatactgtattaataggcatgtttgactctcgtaaagggacgttagtagctgctgcaggtcctgtttggaaaccccatgtacaattcccagttttttgtaagtgtcagtgcgagagacatttgactcttgtgtttgtatctcctttttatgattgctgtacctacccatgtctttttggggaggggtgaaaagagatttgaaataaaaatgtttagaaatta

SEQ ID NO: 187580 - DNA, 480 bp, Homo sapiens
  Payload ID: 16921
  Gene Symbol: SOCS7
  Gene Name: suppressor of cytokine signaling 7
  ENST ID: ENST00000617765
  CDS Start-End: 1-480
cggcaagaggccttctggagagctggctgcttcagctgcgagcctgacagacatgggaggctctgcgggccgggagctggacgcggggaggaaacccaagttgacaagaactcaaagtgccttttctccggtctccttcagccccctgttcacagatgcatttccccggattgctcccatccgagcagctgaatccctgcacagccaacccccacagcacctccagtgtcccctctaccggcctgactcgagcagctttgcagccagccttcgagagttggagaagtgtggttggtattgggggccaatgaattgggaagatgcagagatgaagctgaaagggaaaccagatggttctttcctggtacgagacagttctgatcctcgttacatcctgagcctcagtttccgatcacagggtatcacccaccacactagaatggagcactacagaggaaccttcagcctgtggtgtcatcc

SEQ ID NO: 187581 - DNA, 1827 bp, Homo sapiens
  Payload ID: 16921
  Gene Symbol: SOCS7
  Gene Name: suppressor of cytokine signaling 7
  ENST ID: ENST00000613678
  CDS Start-End: 18-1661
cccggccgccgcagctgatggtgttccgcaacgtgggtcggccgccggaggaggaggacgtggaggcggccccggagccgggaccctcggaactgctgtgtccccggcaccgctgtgccctggaccccaaggccctgccgccgggcttggcgctcgagcggacctggggcccggcggctggactagaggcgcagttggcggctctggggctcgggcagccggcggggccgggggtcaagacagtcggtgggggttgctgcccgtgtccgtgtcctcctcagccgccccctccgcagccccagccgcctgctgccgccccgcaggccggggaggaccccacggaaacgagcgacgcgctgctggtcctggagggcttggaatcggaggccgagagcctggagactaacagctgctcggaagaggagctcagcagcccgggtcgcggaggaggagggggcggccggcttctgctgcagcccccaggccctgaattacctccggtgcccttcccgctgcaggacttggtccctctggggcgcctgagtagaggggagcagcagcagcagcagcagcagcaacctcccccgcccccgcctcctcccgggcccctccggccactcgcgggtccttctcggaagggctccttcaaaatccgcctcagtcgcctctttcgcaccaagagctgcaacggtggctccggcggtggggatgggaccggcaagaggccttctggagagctggctgcttcagctgcgagcctgacagacatgggaggctctgcgggccgggagctggacgcggggaggaaacccaagttgacaagaactcaaagtgccttttctccggtctccttcagccccctgttcacaggtgaaactgtgtcgcttgtggatgtggacatttctcagcggggcctgacctctccacaccctccaactccccctcctcctccgagaagaagcctcagcctcctagatgcatttccccggattgctcccatccgagcagctgaatccctgcacagccaacccccacagcacctccagtgtcccctctaccggcctgactcgagcagctttgcagccagccttcgagagttggagaagtgtggttggtattgggggccaatgaattgggaagatgcagagatgaagctgaaagggaaaccagatggttctttcctggtacgagacagttctgatcctcgttacatcctgagcctcagtttccgatcacagggtatcacccaccacactagaatggagcactacagaggaaccttcagcctgtggtgtcatcccaagtttgaggaccgctgtcaatctgttgtagagtttattaagagagccattatgcactccaagaatggaaagtttctctatttcttaagatccagggttccaggactgccaccaactcctgtccagctgctctatccagtgtcccgattcagcaatgtcaaatccctccagcacctttgcagattccggatacgacagctcgtcaggatagatcacatcccagatctcccactgcctaaacctctgatctcttatatccgaaagttctactactatgatcctcaggaagaggtatacctgtctctaaaggaagcgcagctcatttccaaacagaagcaagaggtggaaccctccacgtagcgaggggctccctgctggtcaccaccaagggcatttggttgccaagctccagctttgaagaaccaaattaagctaccatgaaaagaagaggaaaagtgagggaacaggaaggttgggattctctgtgcagagactttggttccccacgcagccctggggcttggaa

SEQ ID NO: 187582 - DNA, 480 bp, Homo sapiens; identical to SEQ ID NO: 187580
  Payload ID: 16921
  Gene Symbol: SOCS7
  Gene Name: suppressor of cytokine signaling 7
  ENST ID: ENST00000632687
  CDS Start-End: 1-480

SEQ ID NO: 187583 - DNA, 1827 bp, Homo sapiens; identical to SEQ ID NO: 187581
  Payload ID: 16921
  Gene Symbol: SOCS7
  Gene Name: suppressor of cytokine signaling 7
  ENST ID: ENST00000631692
  CDS Start-End: 18-1661

SEQ ID NO: 187584 - DNA, 1839 bp, Homo sapiens
  Payload ID: 16922
  Gene Symbol: SUFU
  Gene Name: suppressor of fused homolog (Drosophila)
  Uniprot ID: Q9UMX1
  ENST ID: ENST00000369899
  CDS Start-End: 147-1448
cgccgtgcgcaggcgcggagctagacctcgctgcagcccccatcgcctcggggagtctcacccaccgagtccgcccgctggcccgtcagtgctctccccgtcgtttgccctctccagttcccccagtgcctgccctacgcaccccgatggcggagctgcggcctagcggcgcccccggccccaccgcgcccccggcccctggcccgactgcccccccggccttcgcttcgctctttcccccgggactgcacgccatctacggagagtgccgccgcctttaccctgaccagccgaacccgctccaggttaccgctatcgtcaagtactggttgggtggcccagaccccttggactatgttagcatgtacaggaatgtggggagcccttctgctaacatccccgagcactggcactacatcagcttcggcctgagtgatctctatggtgacaacagagtccatgagtttacaggaacagatggacctagtggttttggctttgagttgacctttcgtctgaagagagaaactggggagtctgccccaccaacatggcccgcagagttaatgcagggcttggcacgatacgtgttccagtcagagaacaccttctgcagtggggaccatgtgtcctggcacagccctttggataacagtgagtcaagaattcagcacatgctgctgacagaggacccacagatgcagcccgtgcagacaccctttggggtagttaccttcctccagatcgttggtgtctgcactgaagagctacactcagcccagcagtggaacgggcagggcatcctggagctgctgcggacagtgcctattgctggcggcccctggctgataactgacatgcggaggggagagaccatatttgagatcgatccacacctgcaagagagagttgacaaaggcatcgagacagatggctccaacctgagtggtgtcagtgccaagtgtgcctgggatgacctgagccggccccccgaggatgacgaggacagccggagcatctgcatcggcacacagccccggcgactctctggcaaagacacagagcagatccgggagaccctgaggagaggactcgagatcaacagcaaacctgtccttccaccaatcaaccctcagcggcagaatggcctcgcccacgaccgggccccgagccgcaaagacagcctggaaagtgacagctccacggccatcattccccatgagctgattcgcacgcggcagcttgagagcgtacatctgaaattcaaccaggagtccggagccctcattcctctctgcctaaggggcaggctcctgcatggacggcactttacatataaaagtatcacaggtgacatggccatcacgtttgtctccacgggagtggaaggcgcctttgccactgaggagcatccttacgcggctcatggaccctggttacaactctgaacctatcctcggagctctgccctcccgtcctggaacgtctttctgccctgaggagagggtagtcagcatctccaattttcagcagctcaagaaccttggcccccacaggacttcgcagatgtcacattgcccctcagtcccctgaatgcccttcggacccaaccccaattccccaagcccctgaccccctagctgccggggttcccactcccagtgccacaaccccctcacctccctggcagcccctcagcgagcctgaggcccagcacccgctggctccccagcacatggtcccctcccatgggctgttgcccagggaaccggggcgcggtgggaacgagctgctggcctcggcatgtttcaataaagttgctgtgctgggagctactca

SEQ ID NO: 187585 - DNA, 5001 bp, Homo sapiens
  Payload ID: 16922
  Gene Symbol: SUFU
  Gene Name: suppressor of fused homolog (Drosophila)
  Uniprot ID: Q9UMX1
  ENST ID: ENST00000369902
  CDS Start-End: 167-1621
gacagcctgggcggacagtgcgccgtgcgcaggcgcggagctagacctcgctgcagcccccatcgcctcggggagtctcacccaccgagtccgcccgctggcccgtcagtgctctccccgtcgtttgccctctccagttcccccagtgcctgccctacgcaccccgatggcggagctgcggcctagcggcgcccccggccccaccgcgcccccggcccctggcccgactgcccccccggccttcgcttcgctctttcccccgggactgcacgccatctacggagagtgccgccgcctttaccctgaccagccgaacccgctccaggttaccgctatcgtcaagtactggttgggtggcccagaccccttggactatgttagcatgtacaggaatgtggggagcccttctgctaacatccccgagcactggcactacatcagcttcggcctgagtgatctctatggtgacaacagagtccatgagtttacaggaacagatggacctagtggttttggctttgagttgacctttcgtctgaagagagaaactggggagtctgccccaccaacatggcccgcagagttaatgcagggcttggcacgatacgtgttccagtcagagaacaccttctgcagtggggaccatgtgtcctggcacagccctttggataacagtgagtcaagaattcagcacatgctgctgacagaggacccacagatgcagcccgtgcagacaccctttggggtagttaccttcctccagatcgttggtgtctgcactgaagagctacactcagcccagcagtggaacgggcagggcatcctggagctgctgcggacagtgcctattgctggcggcccctggctgataactgacatgcggaggggagagaccatatttgagatcgatccacacctgcaagagagagttgacaaaggcatcgagacagatggctccaacctgagtggtgtcagtgccaagtgtgcctgggatgacctgagccggccccccgaggatgacgaggacagccggagcatctgcatcggcacacagccccggcgactctctggcaaagacacagagcagatccgggagaccctgaggagaggactcgagatcaacagcaaacctgtccttccaccaatcaaccctcagcggcagaatggcctcgcccacgaccgggccccgagccgcaaagacagcctggaaagtgacagctccacggccatcattccccatgagctgattcgcacgcggcagcttgagagcgtacatctgaaattcaaccaggagtccggagccctcattcctctctgcctaaggggcaggctcctgcatggacggcactttacatataaaagtatcacaggtgacatggccatcacgtttgtctccacgggagtggaaggcgcctttgccactgaggagcatccttacgcggctcatggaccctggttacaaattctgttgaccgaagagtttgtagagaaaatgttggaggatttagaagatttgacttctccagaggaattcaaacttcccaaagagtacagctggcctgaaaagaagctgaaggtctccatcctgcctgacgtggtgttcgacagtccgctacactagcctgggctgggccctgcagtggccagcagggagcccagctgctccccagtgacttccagtgtaacagttgtgtcaacgagatctccacaaataaaaggacaagtgtgaggaagactgcgcagtgccaccccgcagcccagtggggtgccatgcacaggccacaggccctccacctcacctccagctcaggggccgcaccccgccgctggctaagccttgtgacccatcaggccagtgagtgggcaaatgcggaccctccctgcctgcagcctgcacagattctggtttgaggtttgactctggaccctggctgtgcccctaggtggagacagccctctttctcacctaccccctgccgcacagcccagcaggagggaggcggacagccagatgcagagcgagtggatgcacttcccagctcatctctggaagcctttgctactcaagctcctctggccgcggaacaattcctctgatcatgtttggttttcttcttccttattttattttgtagaaaccgggtggtattttattgctctgcaaagatgtccagaagccatgtatataatgttttttaaacagaacttcattccccgttgaactttcgcattctctgacagaggcctagggctgtatctctccctgggctgccaccagagaaggtgcttggtgttcgcctgccagcccagagccctggaggagccggctgcacagagaggcttttcttcccagctgggcctggtggagcccggggcagggggagagtagagacactcccttgtgcagctttgagcctagtttagctggggccagggaggggtgctactgttttccaagtgaatgggtctcaaagacttggtgaccccagcctcatcttctaggccttttccacccaaccaggcctacctgggagagggtgaggttcagcacatcacacaccatccccactgtcattcagggcctgggtctccagctctgtaaccagtcctgtcccatttcctcagtccctgggcctcccagccttcaggctgtagggctgccttactaaaattgaaaaatccacctcttaacatctctttcactttggttttgctaacactgctctctgctgccctcccatcctccctgtatccattcatgccctatctttcattctccactcctaatccctctcctttctggcatcctggcctctcgtggtcctcagcccctcacccccagtactgcagatctcacagtttgccttccagaagccagcctatctctagcccatggttttggagttcctctcgggttatctcccacgcctgacctggaaccagcaagcccctttcctgccttcttacccccaactctagggatgggactgttacaatacttcaagatcactctttacacctcttcaaagcaaagtcatgacaatgcagggctcctcattgctcccatctgcctctgctgcacacacaggcaccagcagggatgccacaggagtgcccacagggtgcaggactccactgatgagagatccagccaaagagctgcccccaggggtatgagggcaccagctgggttctccagggagcaggagttggacctccatggagccactaggcctggcctcctctacacatccccagggctatctggttaattccatcaagctcagagttaaaaggcatatcagcctggagtatttgggagagactggctgcagatccccgccagccaagatgcaagccactcgggacctgatgtcggcagctgtgcctctactgccctgaggacttaccagagggagccctactggccttcccccaccacagcagccctgcctgtgaagctcttgtttctgacatttcacaggcagagaggtgccatcagttcgcctccattccttgccaccatgaccagcctctccctgaactctctcttgctcgggacctgcctgagggctccctgctgcagttcgccgtacttccatctgctgggtgcctccatcgttggttgggtggggatggggcattttctgagctaagctttgtcattagtttgtgaagcacctggtcagcaacctgccccagacctggagggtctttgtggactgaaggtagacaccagccagcatggtggccctgttctgggggagcagggtaaggcaggaggaagtgggtgagctccgagatgatgagcacatgaagcctgtggccccttcgtacctgcaatatgtcaggagcctcacgctcacccaagatcctgcaggggccaggctccatctcactggctctgagggcaggacagggtatcacacatttctcaccaggcctcctttcctatgggcattggtgcctcccagaggtttcttgggctgctggctggtgagagaggacccttaaagaagatcaagccaagctgaccttggaccctgtccagcacagcttctggcacaggatgcttggtgaatgtaccctttctttccctccctgcagctctgagggagcccctgaccttgtagtgggtggaggaggtaaggggcctccctccctaaatctgcctcttctgcaagctacttggagacttgcctagttgtacccacccctccaggtccctggtgctagagcttctgagaagggcctttccctttcctctttgcctgctatataaggcaggctcctgtggctctgctggctcagtgtgggctgcaggaggactgcagactcagctgcaattctgaggggggtttgggaggcttgtgcgaggtctcaggcctgtgtggggagctggtgcctcttcctgcccgtatctttctcttccaagggcagtgctccaaggcagggactggagaagccaaggggagagtctaaaagggctagagcatttttaaaaatagacacagggtcttgggactggggtttcggattgagttgcaagcagggagaaaacctgaaggtcggtgcccctatggggctgaccagtagagaatttcctttactgtatttttgtgtctggtcttccctttctggcttctaggacatccatgccaggtgaggtgcctgggtccctgttacaagtcaggagccctgtagggagacccctccttttgtacaagtacctgaatgctgcgacaagcagatttttgtaaaattttatattagtttttaatgtcagtggcgactcggttcctggggctgcagccagcctgggacttttgtaagaatttttgggtgactcacttagatgtcgtttccttcttgccccctcttcctctctgtaatctaagtgcattaaacatctttgcagaagtgcctgggttgtgtgctcatttctggctgcctgaagtagtggagccggaagcccggggccctggcagagggagtgggttg

SEQ ID NO: 187586 - DNA, 2601 bp, Homo sapiens
  Payload ID: 16922
  Gene Symbol: SUFU
  Gene Name: suppressor of fused homolog (Drosophila)
  Uniprot ID: Q9UMX1
  ENST ID: ENST00000423559
  CDS Start-End: 75-1520
gcccgctggcccgtcagtgctctccccgtcgtttgccctctccagttcccccagtgcctgccctacgcaccccgatggcggagctgcggcctagcggcgcccccggccccaccgcgcccccggcccctggcccgactgcccccccggccttcgcttcgctctttcccccgggactgcacgccatctacggagagtgccgccgcctttaccctgaccagccgaacccgctccaggttaccgctatcgtcaagtactggttgggtggcccagaccccttggactatgttagcatgtacaggaatgtggggagcccttctgctaacatccccgagcactggcactacatcagcttcggcctgagtgatctctatggtgacaacagagtccatgagtttacaggaacagatggacctagtggttttggctttgagttgacctttcgtctgaagagagaaactggggagtctgccccaccaacatggcccgcagagttaatgcagggcttggcacgatacgtgttccagtcagagaacaccttctgcagtggggaccatgtgtcctggcacagccctttggataacagtgagtcaagaattcagcacatgctgctgacagaggacccacagatgcagcccgtgcagacaccctttggggtagttaccttcctccagatcgttggtgtctgcactgaagagctacactcagcccagcagtggaacgggcagggcatcctggagctgctgcggacagtgcctattgctggcggcccctggctgataactgacatgcggaggggagagaccatatttgagatcgatccacacctgcaagagagagttgacaaaggcatcgagacagatggctccaacctgagtggtgtcagtgccaagtgtgcctgggatgacctgagccggccccccgaggatgacgaggacagccggagcatctgcatcggcacacagccccggcgactctctggcaaagacacagagcagatccgggagaccctgaggagaggactcgagatcaacagcaaacctgtccttccaccaatcaaccctcagcggcagaatggcctcgcccacgaccgggccccgagccgcaaagacagcctggaaagtgacagctccacggccatcattccccatgagctgattcgcacgcggcagcttgagagcgtacatctgaaattcaaccaggagtccggagccctcattcctctctgcctaaggggcaggctcctgcatggacggcactttacatataaaagtatcacaggtgacatggccatcacgtttgtctccacgggagtggaaggcgcctttgccactgaggagcatccttacgcggctcatggaccctggttacaagtgagaaggccctttttcttctccctccttcctttcatagacttccttgcccacccctcctcttctcccttggcagctcttgatggcaccccttcctggggggctggtcatgaatgcctcatggattcagggcctggggcctgtgtgtaggtatggagtgtggatgctgctacccactccagcagcttaggagcacttcctgaccttctccccctgtcacctgagacacaagtgttaactctccaggccctggctcttggtaattctggttccccgtggaaatccaggttggagggatataagactttctgcaccttgggtaaaccaaggtacaagaactcaaggatgaagcaagatgggaggatgtgtggaggccactctccaatggctacatggaaatcccaccagaattcagacagtggcatgtgtgcctggaccagggctgggcaggcctcagtgggaagagcctccccttcttagcctacccccatctgacagccctcccgttcctcctgagtttgtgtgaccagagacctgctggcttatccggagcactttgtccttcctttgctcttctggctggagcgagcttcagagctgttgccaagcagggtaccagggcctcagagccataggcctccttccagtccccaccccgtcccgggtctctaacaggtgctcaacctactccaccacactcccgagtgtcttggagggacagcatccttttttggcatttgtttgttgcgggtggggagaggattgaacccttaacctcacctcgctcgcaagtatcaagaaagggaacctgaccctaaacctaaaggtggccatacctggtttgtgaatgtattggagaggcatgcagcattacagtagaggggaagagaatgatgctaggtttgtgagtttcacccagtctggggagtctgtgaagcatatgtagtcaatacagacacactttttgtccctgcatgtctacagaatttctcctccttcaggccaggcccctcttctcccgccaccaccaaaatacaacccttaattaaaacaaacagcaaacaaaggacaccaaccacactccccagactaagccgagatagaaatggaagctagtgctttagggatattgtgttccataaattatcttgcctttttccactgttgttattatatcgtttcataacaaaattactttgaaccataaagttataaatacattttaaaagtc

SEQ ID NO: 187587 - DNA, 14371 bp, Homo sapiens
  Payload ID: 16923
  Gene Symbol: SOGA1
  Gene Name: suppressor of glucose, autophagy associated 1
  Uniprot ID: O94964
  ENST ID: ENST00000237536
  CDS Start-End: 343-5328
cgggccgcagccggactcggagcccgagggagcgatcggcgtgcgggcggcgggggcccgggcgcgctccgggggcgcggcgaggccgagggggcgggcgccgggcggagccgcagccggagccggggcgcctggaggcggtcgggccgcactctccgagcccagagcagcggagagaccgcgcggcggggcttgggacggggacgcggtgtcggggccgaggtgggccgagagcagccgcagccccagcggccggagccgcgccgggtccctccccagggacgtcgaggccgggcgggcctgggccatgcgcgcagctcgctgaggccgagggaggccgcgatggaggcgccggcggccgagcccccggtccggggctgcggtccccagcccgcgcctgcacccgcgcctgccccggagaggaaaaagagccaccgcgcgccgtcgccggcccggcccaaagacgtggccggctggtcgctggctaagggccgccgcggcccaggcccgggctcagcagtcgcctgcagcgccgcgttctcctcacggccggacaagaaggggcgcgcagtggctcccggggcgcgcggtgcgggtgtgcgggtggccggggtccgcaccggggtccgtgccaagggccgtccgcgctcgggtgcggggccgcgaccgccaccgccgccccccagcctcacggatagcagctcggaggtgtcggactgcgcgtcggaggaggcgcgcctgctgggcctggagctggcgctgagcagcgacgccgagtccgcggccgggggcccggcgggggtccgtacggggcagccggcccagcccgcgccctccgcgcagcagcccccgcggccgcccgcctccccggacgagccgtcggtggccgcgtcgtcggtgggcagcagccgcttgccgctcagcgcctcgcttgccttctccgacctcaccgaggagatgctggactgcgggcccagcggcttggtgcgggagctggaggagctgcgctcggagaacgactatctcaaggacgagattgaggagctgcgggccgagatgctggagatgcgggacgtctatatggaggaggacgtgtatcagctgcaggagctgcgacagcagctggaccaggccagcaagacctgccgcatcctgcagtaccggctgcgcaaagccgagcgccgcagtctccgtgccgcccagaccggccaggtggacggcgagcttatccgtggtctggagcaggatgtcaaggtctctaaggacatctccatgcggctgcataaggagctcgaggtggtggagaagaaacgggcgcggctggaggaggagaacgaagagcttcgtcagcggctcatcgagactgagctggctaagcaggtgctgcagacggagctggagcgaccgagagagcattccttgaagaaaagaggaacccgctccctggggaaggccgataagaagactttggtgcaggaggacagtgcagacctgaagtgccagttgcactttgcaaaggaggagtcagccctcatgtgcaagaagctcactaagcttgccaaggagaatgacagcatgaaggaggagctgctgaagtaccgctcgctctatggggacctggacagcgcgctgtcagccgaggagctggccgatgccccccactcgcgggagaccgagctgaaggtgcacctgaagctggtggaggaggaagccaacctgctgagccgccgcatcgtggagctggaggtggagaaccgaggcctgcgggctgagatggacgacatgaaggatcatggaggtggctgtgggggtcctgaggcacgcctggccttctccgcgctgggtggcggagagtgcggggagagcttggcagagctgcggcgacacctgcagtttgtcgaagaggaggccgagctgctgcggcgctcctctgccgagctcgaggaccagaacaagctgctgctgaacgagctggccaagttccgctcggagcacgagctggacgtggcgctgtcggaggacagttgttctgtgctcagcgaaccttcacaggaggagctggcggccgccaagctgcagatcggcgagctcagcggcaaggtcaagaagctgcagtacgagaaccgcgtgctcctctccaacctccagcgctgtgacctcgcctcctgccagagtacgcggcccatgctggagacggacgccgaggccggggactctgcccagtgtgtgcctgctcccctgggcgagacacacgagtcccatgcggtccgactctgcagagccagggaggccgaggtgctgcctgggctgagagagcaggccgccctggtcagtaaggccatcgatgtcctggtggctgatgccaatggcttcacggctggcctccggctgtgtctggacaacgagtgtgctgacttccggctgcatgaggcccccgacaacagcgagggccccagggacaccaagctcatccatgccatcctggtgcgcctgagcgtgctgcagcaggagctgaatgccttcacgcggaaggcagatgcagtcctcgggtgctctgtcaaggaacagcaggagtccttctcatcactgccccccttgggctcccaggggctctctaaggagattcttctggcaaaagaccttggctcagactttcagccacctgacttcagggacctgccggaatgggagcccaggatccgagaggctttccgcactggtgacttggactctaagcccgaccccagccggagcttcaggccttaccgagctgaagacaatgattcctatgcctctgagatcaaggagctgcagctggtgctggctgaggcccacgacagcctccggggcttgcaagagcagctctcccaggagcggcagctacgaaaggaggaggccgacaatttcaaccagaaaatggtccagctgaaggaggaccagcagagggcgctcctgaggcgggagtttgagctgcagagtctgagcctccagcggaggctggagcagaaattctggagccaggagaagaacatgctggtgcaggagtcccagcaattcaagcacaacttcctgctgctcttcatgaagctcaggtggttcctcaagcgctggcggcagggcaaggttttgcccagcgaaggggatgacttcctcgaggtgaacagcatgaaggagctgtacttgctgatggaggaagaggagataaacgctcagcattctgataacaaggcctgcacgggggacagctggacccagaacacgcccaatgagtacatcaagacactggccgacatgaaggtgacgctgaaggagctgtgctggctgctccgggatgaacgccgtggtctgacggagcttcagcaacagtttgccaaggccaaggctacctgggagacagagcgggcagagctcaagggccatacctcccagatggagctgaagacagggaagggggccggggagcgggcagggcccgactggaaggcagccctacagcgggagcgtgaggagcagcagcacctcctagctgagtcctacagcgctgtcatggagctgactcggcagctgcagatcagtgagcgcaactggagccaggaaaagctgcagctggtggagcggctgcagggtgagaagcagcaggtggagcagcaggtgaaggagctgcagaaccgcctaagccagctgcagaaggctgccgacccctgggtcctgaagcactcggagctggagaagcaggacaacagctggaaggagacacgcagtgagaagatccacgacaaggaggctgtttccgaagttgagcttggaggaaatggtttaaagagaaccaaatctgtttcttccatgtctgagtttgaaagtttgctcgactgttccccttaccttgctggcggagatgcccggggcaagaagctgcctaacaaccctgcctttggctttgtgagctccgagccaggggatccagagaaagacaccaaggagaagcctgggctctcgtcgagggactgcaaccacctgggtgccctggcctgccaggaccccccagggaggcagatgcagcgcagctacacggctcctgacaagacgggcatccgagtctactatagtcccccggtggcccggcgcctcggagtccctgtggttcatgacaaagagggcaagatcattatcgagcccggcttcctcttcaccacagccaagcccaaagagtcggccgaggctgatgggctggctgagagctcctatggtcggtggctctgcaacttctcacggcagcgcctggacggaggctcagcgggcagcccctcggcggccgggcctggcttcccagcggccctgcatgactttgagatgtcaggcaacatgagtgatgacatgaaggagatcaccaactgtgtgcgccaggccatgcgctccggctcactggagaggaaagtgaagagcacatccagccagacggtgggcctggccagtgtgggcacacagaccatccgcacggtcagcgtgggcctgcagaccgacccaccccgcagcagcctccatggcaaggcctggtcaccccgcagctcttcgctcgtgtctgtgcgcagcaagcagatctcctcctccctggacaaggtccattcgcgcatcgagcggccctgctgctcccccaagtatggctcaccaaagctccagaggcggtctgtgtccaagctggacagcagcaaggaccgcagcctgtggaacctgcaccagggcaagcagaacggctcggcctgggcccgctccaccaccacgcgggacagccctgtattgagaaacatcaacgatggactctccagcctcttcagtgtggtggagcactcagggagcacggagtctgtctggaaactaggcatgtctgagacgcgggccaagcccgagcctcccaagtacggcattgtgcaggaattcttccgtaatgtgtgtggccgggcaccgagccccacctcatcagcaggagaggagggcaccaagaagccagagcccctctccccagccagctaccatcagccagagggtgtggccaggatcctgaacaagaaggcagccaagttgggcagcagtgaggaggtcagactcaccatgctcccccaggtggggaaggatggtgtcctccgggacggagatggagccgtggtccttcccaatgaggacgctgtttgtgactgtagtacccagtctctcacctcctgcttcgcccgatcgtcccgctctgccatccgccactctccttccaagtgcaggctgcacccttcagagtccagctggggtggggaggagagggcactcccccccagcgagtgacagagcagccaagctccccgcctcaaccagcccagcccctggatagcagaagggaaccagcagagacgagacgaggtgaggcgaggggctgtgtcctcagcattgcctggccctggagggacagcagtgatgccactgccagaatgcagctttcacatcaaggtaaagccgggtctcctgctggcccctgggtggtgagcttcgacttcccaggggaaggcagtgagtgggagagagaccaaacctgggcttcccaagcatccactgagagatctgtcaagagccgatccctgggtcctaagagagagccttgcctggttctgcccatgccaccctcttggaagagcccaagaaggatacatgtctggccatgcctttggggaaaaggagtcggagagatgtttcctgctgaccatccaccccttcatttgggaggagacactgctgagaagaacaggctttgctctagggctccatgtttggttcctggtggagccctgttgggcatcatcaccatcacctccttctctccaccacctcctcctcccagccccactgctctagattgctgggacactagggagtatgatagggcagtagccagggccattgcttagtgtcctggagccctggatctccctgcccatagcctggatgcagcaagagctgggaggcgaagtggaaacatgcagggctcagggttggggagtgattgcaattgccttccttgccaaagtgacttggggccccaacgttcccagcagaccccttgaggacagaaataggtagagtcagtctcaagacctggtgcatagataaatgcctaaatacactgccttgatctcaagtgatctcagaggcctctttccctggcaccctgagaggcagcaggcactacatctccactgtgtttacatcctgcagctggtcggggggcaaagatattcccagtaagagattcttggttggccaggtcaggcccaggagaacaccaagaggccagagcccaggacacagcagtagactggggcctggaaacacgtatcttgcctagattgtttatttgaatttttcctactataaatatttaaggtggtttactttattttaataatttaatttaccccaaagtccctaaggtaatttattggaggttgaaacatgcattcttgccactgggacaacatgaggcctctaacagcacgggcaggcatggggtcccctgggtggacgaggccgcttggcagccaggtttggagacctggcctcctggtcagctttggagggcccctcaacagagctggagccctgcaccccaacacggctggccatgtggcctcagaacactacttattactcaatgcctggtacttggccagccccagcggtcagtctataaatactcactgacaaggtggagggctggacggccatcaccactccccagacgttctccattgcctgtctcatttccctccctccctctgacacctttcttcatgagtcgaacgtggattactaaagctctattaagagtgtggagatccctccaagtttcccaaatgagaactcacaggaaaacaggactgaactttgagaatgttgtttatcgcagctttgcacataaacctgagtgtctcccagcctgcctcggttctcaccagcctgccagccttttcaccagcctctctccttagccttatggcctttcacggctcttctccctgccccagctctgctgcccgcccttcctcacgtcccctgtgagctgcctgagccattggttggatttcgatgtggctcattgcagcatgtggggcagcgcctcccatggcctcgccttggtgccggtgaaccccttttggttgcacacatgctccccacacacacatagacatcagccttcctgtaactgactggggacccagagtggaaacaccaggatggatcagcttgtctgcagaattgcccatcaggaagaccaaaagccagtagctttgctgatctgcccccaggactctggaggcgcccctgcactcccacctcccacctgccagttcccagacccacccattcgggatcacctggaccagttaccccaagtcctgcatctcccttccctgcaggctgaacaccagggtcatgccagtcccgccagccgcctcctccatgccccagtgactggtgtgggcagagcaggcagccagtggagctgtgggccagttccgctcttggatgctgctgctctcacccatgaggtcaggggggccctccaaggttatctccaggtgaggggattcacatcaggccacaagccaccagaggccttctgccacctcccagagcgacagccagggaggctgcgtactcagcctcggggagaaatccccgtgggacctgagccccaagacctacggaccactcagccttaccatcgtaccgtccaggattgtccttgccatctttgttgtctcagccagaccttggttttcagtaaagccccagtttctacttcctgcatgccactgtgcaaggccactcatcactgttcctgcagaagcctctggacgtggggctggatggggttgaaaatgttacatgtaaatattggtttggttcggtttttagcattttacttggtaactggttgttttcttttttggggtggggggattggtttgtaaaaattctctactcttttggaatgtgatttctaagtttgttggtttcttcaaatgccttttaagtcttggtaacattcccaaagcagaaaactgcctgacccacagtggggattccctggagaattggggtcccaagaaggaatgctgcccttctcgaacccgttctcccccttcctcctgcctctctgccttttactgctattcccttcttctcctcctttatccttctttctgttttccccatctccactctctcttcaaccaaagtcccaaggaaccctcggggctcaatcccccatagaccacttggcttgggtccatggggttggcatcagttggttggcggaaatgggggaccagttggcatgatggccctaaactgggaaacctcatgtttcttatgtctcacctctttccagagccaaatcagccccttttggaatgatgacttcattggaatgcaaatcaagtcattttggtgcatcagtggctcttaggcctgcacacacgagacatcagaatccaatcctctgaccctgtgccagccctttcccccagtttatttcccaccaaaggctgacctctaagaggtcttgctttctatgaactcaagatgggtcccacctctaggtgtccccaggtgcactcttctaccggttggcttccgatgtgacaaggccaagggcccaaagacttgaccctcttacacccttgctgacatggttccatcatgtccacccgcatgcacttttatggtttcatcacccagcctcttctcctctggcccacccagcgtccaggctctttctccctctcccctcctatctagaatgtcccctgcttctagcctcaccagaccccccaagctcccactacttcttccataataatagtaataacaatggttatcatcatcccctgcacatcccgcctaaagcactttactatatagaaaacgtttcccctggccgggcatggtggctcacgcctgaaatcccagctctttgggaggctgaggcgagcggatcagttgaggtcaggagttcaacgccagcctggccaacgtggtgaatccctgtctgtactaaaagtacaaaaaattagctgagcatggtggtgcgtgcctgtaatcccagctactcgggaggctgaggtgggagaatcgcttgagcccaggaggcggaggttgcaggagcagagattgcgccactgcactccagcctggatgacagagtgagacccaatctcaaaaaagaaatcgtttcccaccccacatctccttcagacctctcagggacaactctgggaggcagccttggcaggacatgggttagtgcgcccattttgctgtgaggaaactgaggtacaggtctcatcccagagcatgagaagtcactgagtttagatgagaacttgggtccaactctgtcctgtttgctgtgcaaatccgctgccctgctgggggcttttggtgggtccagaatacccagaatatgctgctggccaacccaggcataaaacaagtccattctagatcactgagccttgtgtattccagagggtgatctgaggtccccattcagcagaattctctgagggcatgttcagaatgtagattcctgggccccaccttgaatttgcatgtttaacaaactctcctggggttgaggggtgggtgcagtggtcacacctgtaatcccagcactttgggaggctgaggcgggtggatcacttgagctcaggagttcgagcctggccaatatggtgaaaccctgtctctactaaaaatgcaaaaattagccaggtgtggtggcacatgcctgtaatcccagctacttgggaggctgaggcaggagaatcacttgaacctggtggggagcagcggttgcagtgagccgagattgtgccattgcgctctagcctgggcaacggaatgagacttgtctcaaaaaaaataaaaaataaaaccagccctccccgggggatcttaggcactattggccacaccattggtgttcgtggccctgattattaggctatctttctttttttaagtttttttagatttattttttattttatttatttatttatttattatttattattattatttttagagacagggggtctccctatgttgcccaggctggtttcaaactcctgggctcaagtgatctgccctcctcagcctcccaaagtgctggggttacaggcaggcatcagccaccgtgccaggtcatcttcctttttcttttttttttggagacagagtcttgctctgtcattcaggctggagtacagtggcgccatttcagctcaccgcagcctccacctcccaggttcaagcagttctcctgcctcaacctcccgagtaactgggattacaggtgtgtgccaccacacccgactaatttttttatttttagtagagacggggtttcaccatgttggccaggctggtcttgaactcctgacctcaggtgatccacccacctcggcctcccaaagtactgggattataggcgtgagccacggcatccagcctcatctttcttttaaccaataaacatgatgctgtatcttaaaaagagcactgagcagggacttaagggatcgagtcctcaaccaaactgatttaattactcaggattttcaaaaagcatcagaggctatttacaatcttaatcataggggttcagtaaaataaaaataagaagtaaaaaagcaagagaaattattctgtaaatctaactggtgtaattcccataatcatgcaattaagttttactcttgagtttcctgacagccattggtaaaaagagaaacacatcaggatttataatttttatcatccaattatgggaagcaagcatgttggccccaggagacgaactcttctactaatttatagcatgtatcctttcatcaagggccactgagccagttggtgagtcaacgggtgaacctaagatgcaaggatgttttccaggtgactatttaaaaaaataaataatccaccaacgtgattgaccttggcgagatcatgtttctagtctatacctcagtttccccatctgtaaagtgaggataatgtcccaccccatgtaactgtggtgaggaccaactgcaacactgtgcctgcgagtctccttggaaaagtgtaaggttctacacaaatggaaagtgatctgatcacactcagtgtccccagcccagcctttcagtgccctggccctggggtgggggacaatactctcctcacccccttcactagtcttcatgaatagcaaggaggccataacataatttggtctaaaccccttcctttttaaaagaatgatggcaaaatgtgcataacattaaatttaccattttaaagatttctaagtgtctcgaagtacatttgcaatgtgtaactgccacctccagaactttttcatcatcctaaactgaaactctgtacccactaaacagtaactccccactccccctgtccccagtccctggtaacctctattctactttttttttttctctgtggattggcctattctaggtatctcttttaagtagaatcatatagtatttgtccttttgtgtccagccccctcattttttgagatgaggaatcaggcccagagaaggcagtggctcacccaaggtcacatcgcaaaccagaggcagagccaagaccagaacccaggtttcctgactcctaacaggtcttgcatccccagtagtgaatgagacactgctttgactttctgtaatcttggtttagccccttcctttctctgggctcagtctgcttcccaccactcacccattctttctttatcatctccctccaaagcctcttgtcctcctgcctcctcttctccttggctggttcctgccagcaaatggagtggccctggtccatgccaggttttcctcttctgggtccggagctcactatagtattcagccctcagtcctcccaggatgttcttcccagcactgctgcctcgtgcggattttcccgtaacctcagtaactggcttcttgtccccctgcttcctaccagggaagccttcctgtccgcgtctgtggtttcccaactctgatatttgctctcaaatgtggtggtgtcctggttctgtgtttatttattttgtgttttctcacacacacaaaaaaaagcctcttcctccaatgcatcaggaggcaccagccctgccagcccttctcactgggctcaccctgccccagcaaccccccggtgccacccttaagccacactgtcttctctgtaagcagcctgccagcagcagccccagcactttgcaatgggcgtgtgtgtggtggtgggtggggggggcttggatccctcctttttcctcccctgccctgcccaggcccagatggccttgactgtaaagcaggtgctgcctgacaggttcttctctccctgtctctggtcattgatccatctctttgtccattcagtatccaaccatcctctccattctcctctggacctcaccactctcagagctgcttgtcctggcagaatctacagttcaccccaactctatgccttacccctcccaacccaacagcatttgcagtttgcaaaatatacagacccaagtcctgaggggactgaggacatgatgctgggcccaagtctcctgctcagggcttctctccaatgccagccctgccactccttcctcaccctccttggagcctcctctgctgcttgtctatcccaacggccctgctcccctcccttcctgcccttcaccagctttctggacaccatgccctgaggaagggacctttggttttctctaaacatctttgaagggctgaggcagtcagggctggctgccttgtcactctttatttggaagccactcaaaccattcccaagaagagggacctcagctggcaatctggaaacctggcccaggtctgggcagatgtcttcacttctcctaccttcccagtcttgtgatcctgtgatgagcaccaggatggccctgtggtccctagagcacccctcatgctgtagggtcctgcagccccatcctttctctactgggccctggtatcctggctcctctctcagctctgccactgatctctgtgccttagtttacttctctgcacgggggactcaccccaagaccatttccagcagcttcccaggtgatgtggtgccccaaggctgggctttgccagctgtggcccagctccttagtgctgcccaggagacaccaggctgctcagaatgaggtgactgcgggcaccattctcagccagtggttcttgtattgcattccagcagcaggaatatcacctgggaacttgatagaagtgcagattagcagccccacccaagacccactgaattagagcttgtggagtggggccctacaagctggggttttaaggagccctccaaatgattctgacgcataagaatatgccaactgctgatctgggctagccattagtagagcctggggagggactgggactggctaggccaagaacaggtggaaaacaccagccttatctggactcctgagattgggaaccaccaccaacaaaaaccaaccctatagtcgctcctcttggaagaggaagagaagttgaagggcctggagaaagcacacattgtttgtttccctgctcctgctcacctctctcacttgtcttggttttacaaaaggctgtgtggatggtgccagccagggagggggtgggagtcctggggaggcaggaggcagaagaccctgactgtttctcccttgggaacctcaccataggccagatagcgcctcttcaaactgaaagaaatcttaactccacaaagaaagcatcctaaatccccagttcctcctcctcccaaccccagggataccttgtagacagtgccaaaaaacagctccaacccccagcagctgggaagagagccagaagctgcccttcctcctcatcctggcccctccccagcccccgccaatactgtgaacccccttcccactcagcctggtttcctggtgagggtcctgcagtcatgggccctgggggacccccagggcaaggcccatgggagggaagggaccaagggcatccttgggccaactgtccacctctcttgtccactattctctcctttccacttctgtcttcaaaaggctccttcctaggatggatcgggtgctaggacaactgcagtccaatccaccagctctccctgcccctgtgtcttatttcagacatgagaataactgtacagtgtaaacttataaagcgtttttaatggttgtagattggaaataaagtatgtcatatgaacagct

SEQ ID NO: 187588 - DNA, 3703 bp, Homo sapiens
  Payload ID: 16923
  Gene Symbol: SOGA1
  Gene Name: suppressor of glucose, autophagy associated 1
  ENST ID: ENST00000279034
  CDS Start-End: 328-3378
gatgtgttttctgcctttctggactactttgcctctaagatgcagaaactgagtacaagggaaaggactccaaatccccagtatgtcccctgcaggagcagagttgaaggaggtcccaccaggtctggtgggtggccctgctcaggcttacctcccccttgtaggggtcactgggaactgtcaactgcgaaggactgtgatctccagtctggtatggtctgctctggggtccaagtgaggaaagcataaatcgggcaactctctcccagtgagaagatagaaggagcttctacagagaaggacgagattgaggagctgcgggccgagatgctggagatgcgggacgtctatatggaggaggacgtgtatcagctgcaggagctgcgacagcagctggaccaggccagcaagacctgccgcatcctgcagtaccggctgcgcaaagccgagcgccgcagtctccgtgccgcccagaccggccaggtggacggcgagcttatccgtggtctggagcaggatgtcaaggtctctaaggacatctccatgcggctgcataaggagctcgaggtggtggagaagaaacgggcgcggctggaggaggagaacgaagagcttcgtcagcggctcatcgagactgagctggctaagcaggtgctgcagacggagctggagcgaccgagagagcattccttgaagaaaagaggaacccgctccctggggaaggccgataagaagactttggtgcaggaggacagtgcagacctgaagtgccagttgcactttgcaaaggaggagtcagccctcatgtgcaagaagctcactaagcttgccaaggagaatgacagcatgaaggaggagctgctgaagtaccgctcgctctatggggacctggacagcgcgctgtcagccgaggagctggccgatgccccccactcgcgggagaccgagctgaaggtgcacctgaagctggtggaggaggaagccaacctgctgagccgccgcatcgtggagctggaggtggagaaccgaggcctgcgggctgagatggacgacatgaaggatcatggaggtggctgtgggggtcctgaggcacgcctggccttctccgcgctgggtggcggagagtgcggggagagcttggcagagctgcggcgacacctgcagtttgtcgaagaggaggccgagctgctgcggcgctcctctgccgagctcgaggaccagaacaagctgctgctgaacgagctggccaagttccgctcggagcacgagctggacgtggcgctgtcggaggacagttgttctgtgctcagcgaaccttcacaggaggagctggcggccgccaagctgcagatcggcgagctcagcggcaaggtcaagaagctgcagtacgagaaccgcgtgctcctctccaacctccagcgctgtgacctcgcctcctgccagagtacgcggcccatgctggagacggacgccgaggccggggactctgcccagtgtgtgcctgctcccctgggcgagacacacgagtcccatgcggtccgactctgcagagccagggaggccgaggtgctgcctgggctgagagagcaggccgccctggtcagtaaggccatcgatgtcctggtggctgatgccaatggcttcacggctggcctccggctgtgtctggacaacgagtgtgctgacttccggctgcatgaggcccccgacaacagcgagggccccagggacaccaagctcatccatgccatcctggtgcgcctgagcgtgctgcagcaggagctgaatgccttcacgcggaaggcagatgcagtcctcgggtgctctgtcaaggaacagcaggagtccttctcatcactgccccccttgggctcccaggggctctctaaggagattcttctggcaaaagaccttggctcagactttcagccacctgacttcagggacctgccggaatgggagcccaggatccgagaggctttccgcactggtgacttggactctaagcccgaccccagccggagcttcaggccttaccgagctgaagacaatgattcctatgcctctgagatcaaggagctgcagctggtgctggctgaggcccacgacagcctccggggcttgcaagagcagctctcccaggagcggcagctacgaaaggaggaggccgacaatttcaaccagaaaatggtccagctgaaggaggaccagcagagggcgctcctgaggcgggagtttgagctgcagagtctgagcctccagcggaggctggagcagaaattctggagccaggagaagaacatgctggtgcaggagtcccagcaattcaagcacaacttcctgctgctcttcatgaagctcaggtggttcctcaagcgctggcggcagggcaaggttttgcccagcgaaggggatgacttcctcgaggtgaacagcatgaaggagctgtacttgctgatggaggaagaggagataaacgctcagcattctgataacaaggcctgcacgggggacagctggacccagaacacgcccaatgagtacatcaagacactggccgacatgaaggtgacgctgaaggagctgtgctggctgctccgggatgaacgccgtggtctgacggagcttcagcaacagtttgccaaggccaaggctacctgggagacagagcgggcagagctcaagggccatacctcccagatggagctgaagacagggaagggggccggggagcgggcagggcccgactggaaggcagccctacagcgggagcgtgaggagcagcagcacctcctagctgagtcctacagcgctgtcatggagctgactcggcagctgcagatcagtgagcgcaactggagccaggaaaagctgcagctggtggagcggctgcagggtgagaagcagcaggtggagcagcaggtgaaggagctgcagaaccgcctaagccagctgcagaaggctgccgacccctgggtcctgaagcactcggagctggagaagcaggacaacagctggaaggagacacgcagtgagaagatccacgacaaggaggctgtttccgaagttgagcttggaggaaatggtttaaagagaaccaaatctgtttcttccatgtctgagtttgaaagtttgctcgactgttccccttaccttgctggcggagatgcccggggcaagaagctgcctaacaaccctgcctttggctttgtgagctccgagccaggggatccagagaaagacaccaaggagaagcctgggctctcgtcgagggactgcaaccacctgggtgccctggcctgccaggaccccccagggagccagaagctgcccttcctcctcatcctggcccctccccagcccccgccaatactgtgaacccccttcccactcagcctggtttcctggtgagggtcctgcagtcatgggccctgggggacccccagggcaaggcccatgggagggaagggaccaagggcatccttgggccaactgtccacctctcttgtccactattctctcctttccacttctgtcttcaaaaggctccttcctaggatggatcgggtgctaggacaactgcagtccaatccaccagctctccctgcccctgtgtcttatttcagacatgagaataactgtacagtgtaaacttataaagcgtttttaatggttgtagattggaaataaagtatgtcatatg

SEQ ID NO: 187589 - DNA, 4478 bp, Homo sapiens
  Payload ID: 16923
  Gene Symbol: SOGA1
  Gene Name: suppressor of glucose, autophagy associated 1
  ENST ID: ENST00000465671
  CDS Start-End: 1-3826
gttgcactttgcaaaggaggagtcagccctcatgtgcaagaagctcactaagcttgccaaggagaatgacagcatgaaggaggagctgctgaagtaccgctcgctctatggggacctggacagcgcgctgtcagccgaggagctggccgatgccccccactcgcgggagaccgagctgaaggtgcacctgaagctggtggaggaggaagccaacctgctgagccgccgcatcgtggagctggaggtggagaaccgaggcctgcgggctgagatggacgacatgaaggatcatggaggtggctgtgggggtcctgaggcacgcctggccttctccgcgctgggtggcggagagtgcggggagagcttggcagagctgcggcgacacctgcagtttgtcgaagaggaggccgagctgctgcggcgctcctctgccgagctcgaggaccagaacaagctgctgctgaacgagctggccaagttccgctcggagcacgagctggacgtggcgctgtcggaggacagttgttctgtgctcagcgaaccttcacaggaggagctggcggccgccaagctgcagatcggcgagctcagcggcaaggtcaagaagctgcagtacgagaaccgcgtgctcctctccaacctccagcgctgtgacctcgcctcctgccagagtacgcggcccatgctggagacggacgccgaggccggggactctgcccagtgtgtgcctgctcccctgggcgagacacacgagtcccatgcggtccgactctgcagagccagggaggccgaggtgctgcctgggctgagagagcaggccgccctggtcagtaaggccatcgatgtcctggtggctgatgccaatggcttcacggctggcctccggctgtgtctggacaacgagtgtgctgacttccggctgcatgaggcccccgacaacagcgagggccccagggacaccaagctcatccatgccatcctggtgcgcctgagcgtgctgcagcaggagctgaatgccttcacgcggaaggcagatgcagtcctcgggtgctctgtcaaggaacagcaggagtccttctcatcactgccccccttgggctcccaggggctctctaaggagattcttctggcaaaagaccttggctcagactttcagccacctgacttcagggacctgccggaatgggagcccaggatccgagaggctttccgcactggtgacttggactctaagcccgaccccagccggagcttcaggccttaccgagctgaagacaatgattcctatgcctctgagatcaaggagctgcagctggtgctggctgaggcccacgacagcctccggggcttgcaagagcagctctcccaggagcggcagctacgaaaggaggaggccgacaatttcaaccagaaaatggtccagctgaaggaggaccagcagagggcgctcctgaggcgggagtttgagctgcagagtctgagcctccagcggaggctggagcagaaattctggagccaggagaagaacatgctggtgcaggagtcccagcaattcaagcacaacttcctgctgctcttcatgaagctcaggtggttcctcaagcgctggcggcagggcaaggttttgcccagcgaaggggatgacttcctcgaggtgaacagcatgaaggagctgtacttgctgatggaggaagaggagataaacgctcagcattctgataacaaggcctgcacgggggacagctggacccagaacacgcccaatgagtacatcaagacactggccgacatgaaggtgacgctgaaggagctgtgctggctgctccgggatgaacgccgtggtctgacggagcttcagcaacagtttgccaaggccaaggctacctgggagacagagcgggcagagctcaagggccatacctcccagatggagctgaagacagggaagggggccggggagcgggcagggcccgactggaaggcagccctacagcgggagcgtgaggagcagcagcacctcctagctgagtcctacagcgctgtcatggagctgactcggcagctgcagatcagtgagcgcaactggagccaggaaaagctgcagctggtggagcggctgcagggtgagaagcagcaggtggagcagcaggtgaaggagctgcagaaccgcctaagccagctgcagaaggctgccgacccctgggtcctgaagcactcggagctggagaagcaggacaacagctggaaggagacacgcagtgagaagatccacgacaaggaggctgtttccgaagttgagcttggaggaaatggtttaaagagaaccaaatctgtttcttccatgtctgagtttgaaagtttgctcgactgttccccttaccttgctggcggagatgcccggggcaagaagctgcctaacaaccctgcctttggctttgtgagctccgagccaggggatccagagaaagacaccaaggagaagcctgggctctcgtcgagggactgcaaccacctgggtgccctggcctgccaggaccccccagggaggcagatgcagcgcagctacacggctcctgacaagacgggcatccgagtctactatagtcccccggtggcccggcgcctcggagtccctgtggttcatgacaaagagggcaagatcattatcgagcccggcttcctcttcaccacagccaagcccaaagagtcggccgaggctgatgggctggctgagagctcctatggtcggtggctctgcaacttctcacggcagcgcctggacggaggctcagcgggcagcccctcggcggccgggcctggcttcccagcggccctgcatgactttgagatgtcaggcaacatgagtgatgacatgaaggagatcaccaactgtgtgcgccaggccatgcgctccggctcactggagaggaaagtgaagagcacatccagccagacggtgggcctggccagtgtgggcacacagaccatccgcacggtcagcgtgggcctgcagaccgacccaccccgcagcagcctccatggcaaggcctggtcaccccgcagctcttcgctcgtgtctgtgcgcagcaagcagatctcctcctccctggacaaggtccattcgcgcatcgagcggccctgctgctcccccaagtatggctcaccaaagctccagaggcggtctgtgtccaagctggacagcagcaaggaccgcagcctgtggaacctgcaccagggcaagcagaacggctcggcctgggcccgctccaccaccacgcgggacagccctgtattgagaaacatcaacgatggactctccagcctcttcagtgtggtggagcactcagggagcacggagtctgtctggaaactaggcatgtctgagacgcgggccaagcccgagcctcccaagtacggcattgtgcaggaattcttccgtaatgtgtgtggccgggcaccgagccccacctcatcagcaggagaggagggcaccaagaagccagagcccctctccccagccagctaccatcagccagagggtgtggccaggatcctgaacaagaaggcagccaagttgggcagcagtgaggaggtcagactcaccatgctcccccaggtggggaaggatggtgtcctccgggacggagatggagccgtggtccttcccaatgaggacgctgtttgtgactgtagtacccagtctctcacctcctgcttcgcccgatcgtcccgctctgccatccgccactctccttccaagtgcaggctgcacccttcagagtccagctggggtggggaggagagggcactcccccccagcgagtgacagagcagccaagctccccgcctcaaccagcccagcccctggatagcagaagggaaccagcagagacgagacgaggctgaacaccagggtcatgccagtcccgccagccgcctcctccatgccccagtgactggtgtgggcagagcaggcagccagtggagctgtgggccagttccgctcttggatgctgctgctctcacccatgaggtcaggggggccctccaaggttatctccaggtgaggggattcacatcaggccacaagccaccagaggccttctgccacctcccagagcgacagccagggaggctgcgtactcagcctcggggagaaatccccgtgggacctgagccccaagacctacggaccactcagccttaccatcgtaccgtccaggattgtccttgccatctttgttgtctcagccagaccttggttttcagtaaagccccagtttctacttcctgcatgccactgtgcaaggccactcatcactgttcctgcagaagcctctggacgtggggctggatggggttgaaaatgttacatgtaaatattggtttggttcggtttttagcattttacttggtaactggttgttttcttttttggggtggggggattggtttgtaaaaattctctactcttttgg

SEQ ID NO: 187590 - DNA, 2190 bp, Homo sapiens
  Payload ID: 16924
  Gene Symbol: SIKE1
  Gene Name: suppressor of IKBKE 1
  Uniprot ID: Q9BRV8
  ENST ID: ENST00000060969
  CDS Start-End: 71-694
gacagactcccagaagatctgagcgagtcgcgtagctgagcccggcaggggctggggtggtgctgctgctatgagctgcaccatcgagaagatcctgacagacgccaagacgctgctggagaggctacgggagcacgatgcggccgccgagtcgctggtggatcagtcggcggcgctgcaccggcgggtagcagctatgcgggaggcggggacagcgcttccggaccagtatcaagaggatgcatccgatatgaaggacatgtccaaatacaaacctcacattctgctgtcccaagagaacacacagattagagacttgcaacaggaaaacagagagctatggatttccttggaggaacaccaggatgctttggaacttatcatgagcaaatatcggaaacagatgttacagttaatggttgctaaaaaagcggtggatgctgaaccagtcctgaaagctcaccagtctcactctgcagaaattgagagtcagattgacagaatctgtgaaatgggagaagtgatgaggaaagcagttcaggtggatgatgaccagttttgtaagattcaggaaaaattagcccaattagagcttgaaaataaggaacttcgagaattattgtccatcagcagtgagtctcttcaagccagaaaggaaaactcaatggacactgcttcccaagccatcaaataactgaactctgaatgatggctggagattgtctatcaaggaaggaagttactgtcttcccattcaagtactgtccattaagtgtcttgcctcagatttgatttaatcttaattaaaggtatcaggtggcaatttagaattccagtcaatattggctgtccacagttctcagatgtgttaatgtgaatactacatgctgaatttcaccattcctttctcaaagagactacttttaattttcatttctgggaccttgatttatataaactatgttttcagttctttgttatttttcacatctctgaaactttgagcattttttataagccagcaatttattttacatagcattgtaaaatacacttctaggaaattttaggaaagatttaactgtttaaatctatttggcataaaccttgattttttttttccatttgacaaaaataatacaattccacagaactagatcagcagattctctgatttgtaatgtcattcacctgtgacattttaagtctctctggtgctaagaattggcactttatagcctggtgcctttacttttaatttgagagaacctactgctagtcccaggaaacacacttggaaataagtcagctattttttttgcccagtgatgctatagttgtcatattgtccaaagttcatattgttcaaagctgaggagcttgtcctgtgtatgtgaatgcacacatgtgcacttagttcaaatactaaaagtagcttttattaaatataatcagccaaaaacacacacaaaataaaaaaaacaaatataagtagtcagtttttcaatgttatcctactagttctacattctattttaatttttatacaatttccattttatagttaagaaccatcacttacttggattggatgtctttcattcctagcactaatagttggctttctttttttttgtttacatagaagcagggtttttttttatcttttttctttttttttgtttaagctatataaaaaggtgaggaagcagttttgttacctaatgaaaattattacactcataatgctgtgtaggcaacattgagattcaaatgcccagtggtcaactgggttcactcatcaactcattcccgtcccagtttactcacatttcaaatttataaatttcttcatgttatactattctatttagatttgcccagaattagttgaaataatgctaaacctgtcaatattttccagtaacattaagcaccatactgcatgggagagacacagtactaaaaagagttgttagtgctttatgtgagtgatatttctttcgtaatgctataaagaactacagttaaaataacaaaatattttaaagatgtcctaaaagcatctgatcccagtaataactaatggatgtcatctagagcagtgggtgttaatgaataggtatatgtcatttaagaatttttcaaatttctgtttgatatcctgcatagaatttgacaaaaaaaaca

SEQ ID NO: 187591 - DNA, 5506 bp, Homo sapiens
  Payload ID: 16924
  Gene Symbol: SIKE1
  Gene Name: suppressor of IKBKE 1
  Uniprot ID: Q9BRV8
  ENST ID: ENST00000369528
  CDS Start-End: 79-714
aatgctgagacagactcccagaagatctgagcgagtcgcgtagctgagcccggcaggggctggggtggtgctgctgctatgagctgcaccatcgagaagatcctgacagacgccaagacgctgctggagaggctacgggagcacgatgcggccgccgagtcgctggtggatcagtcggcggcgctgcaccggcgggtagcagctatgcgggaggcggggacagcgcttccggaccaggtcaggcagaggtatcaagaggatgcatccgatatgaaggacatgtccaaatacaaacctcacattctgctgtcccaagagaacacacagattagagacttgcaacaggaaaacagagagctatggatttccttggaggaacaccaggatgctttggaacttatcatgagcaaatatcggaaacagatgttacagttaatggttgctaaaaaagcggtggatgctgaaccagtcctgaaagctcaccagtctcactctgcagaaattgagagtcagattgacagaatctgtgaaatgggagaagtgatgaggaaagcagttcaggtggatgatgaccagttttgtaagattcaggaaaaattagcccaattagagcttgaaaataaggaacttcgagaattattgtccatcagcagtgagtctcttcaagccagaaaggaaaactcaatggacactgcttcccaagccatcaaataactgaactctgaatgatggctggagattgtctatcaaggaaggaagttactgtcttcccattcaagtactgtccattaagtgtcttgcctcagatttgatttaatcttaattaaaggtatcaggtggcaatttagaattccagtcaatattggctgtccacagttctcagatgtgttaatgtgaatactacatgctgaatttcaccattcctttctcaaagagactacttttaattttcatttctgggaccttgatttatataaactatgttttcagttctttgttatttttcacatctctgaaactttgagcattttttataagccagcaatttattttacatagcattgtaaaatacacttctaggaaattttaggaaagatttaactgtttaaatctatttggcataaaccttgattttttttttccatttgacaaaaataatacaattccacagaactagatcagcagattctctgatttgtaatgtcattcacctgtgacattttaagtctctctggtgctaagaattggcactttatagcctggtgcctttacttttaatttgagagaacctactgctagtcccaggaaacacacttggaaataagtcagctattttttttgcccagtgatgctatagttgtcatattgtccaaagttcatattgttcaaagctgaggagcttgtcctgtgtatgtgaatgcacacatgtgcacttagttcaaatactaaaagtagcttttattaaatataatcagccaaaaacacacacaaaataaaaaaaacaaatataagtagtcagtttttcaatgttatcctactagttctacattctattttaatttttatacaatttccattttatagttaagaaccatcacttacttggattggatgtctttcattcctagcactaatagttggctttctttttttttgtttacatagaagcagggtttttttttatcttttttctttttttttgtttaagctatataaaaaggtgaggaagcagttttgttacctaatgaaaattattacactcataatgctgtgtaggcaacattgagattcaaatgcccagtggtcaactgggttcactcatcaactcattcccgtcccagtttactcacatttcaaatttataaatttcttcatgttatactattctatttagatttgcccagaattagttgaaataatgctaaacctgtcaatattttccagtaacattaagcaccatactgcatgggagagacacagtactaaaaagagttgttagtgctttatgtgagtgatatttctttcgtaatgctataaagaactacagttaaaataacaaaatattttaaagatgtcctaaaagcatctgatcccagtaataactaatggatgtcatctagagcagtgggtgttaatgaataggtatatgtcatttaagaatttttcaaatttctgtttgatatcctgcatagaatttgacaaaaaaaacacttccaagtgtgagcattttttatttcatttcccaagagtaagtaagtaactattagcccagccatctgcctcgaagtataccttaagtgaccccataaatccattcaagaggcaggtactctataccatttggcagccacggccaaacctaccatggccagatttcagtgaaaatgatgaagtaatcaaatcaaggtataatatggtgtccctttatgtgctttatgttcctttagagctgtttataaagttctttatatctcaagtgttaggataaatcgacatactaacttttccccctgcaaaattaaaagcctgaggtacaagtctaagaagcttttagtgctctacataatataaattctggctggtgttaatgctatgaagataatatgtagttagaaaattgagtcggggaggaatgctcttcattttaagtggattttaaagtttctccttgagtggatgaagaacttgcctggtttgcaaaaatcttagttcaaaattatattttctaacaaaaactgcattttgagaagataagctaattttactcagtagtaagtcaaatgaggaagtgcagagggtttttttacatatatatagcaaccttgtcaagtggtcctcacaagagtcataaatactttgtaattagcacagtatattcagcagtgtataactctacaaatagtaccttatattagtgtagtattatatcaatatcttatgtataattcttatattaataccttatgcataattggattcaaacattgaaggtctattttagtgttcttcaaaatgtgcttccctgacctactgaaatagaaacttggtgatgaagttcaagaatttgtattctaatcatctcaaacaattcctaaagacactgattttaaaatatctagtctaggccccattgtgtaatagttagcactctaaaagatgaaaaagaaaatagtctatgtgccaaccacttcattagtacttatgaatttaaaaatgaaaaagtctggtacaggagacaagtatatatataaaattataatgcagtgtgataaatccattatagtatgtataagatacagaagagggactttaaacttgagaattcaatagagataataaatgggtaggagggaaatagaaaactttggtgccacaaaagcaaagtatgtatggtattgccaataatagctaccatctattgagtgctttactacctgtcaggtactgtattatataaactccattttaactgtacctcattttgcagatactcaggcacaaggaggtggttatttgtccaaactggaaccaagattcaaacccagacagagtcttaagcacatttttaatcactaactaacttgagatgcctaaatgccaaatactgttgggagttcaagtggttcttgattagcaaaatctatttttattagtgcaaaagaaacaccacagcttataaagtattatgaattcaataaatggagtcttaactaatgagatattattttctagaatggtgtagctgagagtatgtgtgattcaactgaaaggaataatgtttaatcagtgactcttactatatacaggaaaaggtgcagttctgtctttcaaatctgcctccttaccatattggcttacatccctcatgctgttttcttgtgtttgctagaaagttgttgccaagccaaatgtcatggccatgttgaaggcaaggaagaaaaaatggaaatggcctgtgccagctatatatatcgccttttatgagggaaagcaaagctttctcagaaatcccaaatggattttcccttgacttaattgcctgaccagttaaatggccactggtacctgcaaagaaagcagggtacatagctgtcccaaataaaatcagtattagcaagaagaaagaatattgagaaagcaattaacagtgtctgtgactgtgacatgtctgtgactttatattgtcaagtcctttccccttgaatatagttttggaagaattagctgaaggagtgtgttgacattgaatggccaagagaatgggctgtagcagacatctgtcatttctcttttggctgcccagtatcctaactcctgtgtttaaggaatccctcacctaatgaggcagagcatttcttcctcctaaagaatttgaaagtaccaggtaatgttttctcagcctccttttgcagctaaggaagaaacatctgccttcaattttaaaattagtgatacaaagaaggagggaaccatgcagattcctttgaagatggtgattaacaacactactgcattcatctccacagaggtacagcaaaagtgatttagttagcgataacctctaattctatttttttatttttattttttgagacagtcttgctctgtcaaccaggctggagtgcagtagcactgtcttaactcactgcaacctccacctcctgggttcaagcgattctcctgcctcagcctcccaagtcgctgggattacaagtgcccaccaccatgcacagctaatttttgtgtttttagtagatggggtttctccatgttggccaggctggtctcgaacttatgacttcaggtgatccgcccgccttggcctcccaaagtgctgggattataggcgtgagccactgtgcctggcctgtaacctctaattcttgtttgctggctgtcctagagatcctgagaattacttttaataaaatcatttttttgctgttattaaaactaacctgaattgcctaaaaccaagaactctgcttgataaaataagcatagttttaggaacagccatgcagatataaattttatcaacactttatacataatttgggacttatatttaaatgtaatatttgatgcttataaaagggtaaatggggaatgcaaataaattatcaagcataataactcatcacctaacttaagaataacattatgagtgcttgtattttatctatttgagctcttctcctatctttgccgacccccccgctctctttttaatagatttgttcgaatgtagaaagacctaaaatacatatgtatccctaaagtgacttattttatagttttctttctttttgaacttcaaaaaaattgtatcatactctatgtagtctaaggatttggtttttttcactcaacatgtctctagaattcacaagttttattgttttatagctgtcattttcattgatgtatatttcattgttgggttatacaacatattgttaaggaatacatacatatataataaattatacattttttaaaaaaa

SEQ ID NO: 187592 - DNA, 1004 bp, Homo sapiens
  Payload ID: 16925
  Gene Symbol: ST20
  Gene Name: suppressor of tumorigenicity 20
  Uniprot ID: Q9HBF5
  ENST ID: ENST00000478497
  CDS Start-End: 681-920
gtttgttcctaaatctaatcgagctcccaaggaactagtatcttatagaacacacatagaaaatagtgctctacagtagtcactttcacatttttttcttggatccaacttcatgataagaaatacattttaactcataatctattcacatgtatatgaataactgaaacagaagtttcacaaaattatgattatgtttgccacaaatggtgtgctctaatattttccttctgtttcatcagaagaaaaatactggttactatccagctaagctgattttgtgacccattaatgagtttcagttctcactttgaaaacactgttctagaattacagaaaggtctagggatgagaactaacaccactgtgcatcacagtgtgtcagtctgtgccaggcagcttataaatattttttgcctctaatttttatacatttatgaggtaagtatcattttctaggtaaggatgctaatctgtctccaagccaaataacacacagtaaatcatggcaccaggatttgaatctgggtctttatacatcatagcccatgctgttctcactgtattttgctttttccaagtataaccccgttttcacacgaatggccccttcacatatttgaagactaccgtcgtgtccgtgctgaccctttctccctgccacacatggctggagtgcaatggcgcgatctcggctcactgcaacctctgtctcccaggttcaggaaaatggctttgtaaagaagcttgagcctaaatctggctggatgacttttctagaagttacaggaaagatctgtgaaatgctcttctgtcctgaagcaatactgttgaccagaaaggacactccatattgtgaaaccggcctaatttttctgactcttacgaaaacgattgccaacacatacttctacttttaaataaacaactttgatgatgtaacttgaccttccagagttacagaaattttgtccctatttaatgaataaattgtatgtattttt

SEQ ID NO: 187593 - DNA, 529 bp, Homo sapiens
  Payload ID: 16925
  Gene Symbol: ST20
  Gene Name: suppressor of tumorigenicity 20
  Uniprot ID: Q9HBF5
  ENST ID: ENST00000485386
  CDS Start-End: 263-502
cccgaatcccggacctgcgctgaggaggcggttcatctgtggccagcggtgcttcgggacccgcgctgggggaaccctggcgacggggcctggccctgctatatgcgggggcctcggctggagtgagcggcgtggacgcctctttcctccggctcttcccttgttgctgcgagagcgagagggccgcgggcggcggaggcagcggggccgggatggaggacgttaactctaacgtgaacgcggaccaggaggctggagtgcaatggcgcgatctcggctcactgcaacctctgtctcccaggttcaggaaaatggctttgtaaagaagcttgagcctaaatctggctggatgacttttctagaagttacaggaaagatctgtgaaatgctcttctgtcctgaagcaatactgttgaccagaaaggacactccatattgtgaaaccggcctaatttttctgactcttacgaaaacgattgccaacacatacttctacttttaaataaacaactttgatgatgtaacttga

SEQ ID NO: 187594 - DNA, 694 bp, Homo sapiens
  Payload ID: 16925
  Gene Symbol: ST20
  Gene Name: suppressor of tumorigenicity 20
  Uniprot ID: Q9HBF5
  ENST ID: ENST00000562759
  CDS Start-End: 364-603
cccaaaagggctacttgccttctccttccacttacccagacccctgcctcccttacccttctgctaggaacatgtctacaactatataaattcgtgtaattttgacatgatatttgaaaaagacaatttgggcagtaaatagcagaattaagtagtgtcttaatgtaaatggtttgtgttaccacaatacactgttctagccaaagcacattgcatgtgactcctgttgcactagtttttagtagcaaaaatgaacctgtaaaagaatgtaggttttaaggctttggtaatataagttatttctttcttatttatttatttatttttaagagagtttcattctgtcgcccaggctggagtgcaatggcgcgatctcggctcactgcaacctctgtctcccaggttcaggaaaatggctttgtaaagaagcttgagcctaaatctggctggatgacttttctagaagttacaggaaagatctgtgaaatgctcttctgtcctgaagcaatactgttgaccagaaaggacactccatattgtgaaaccggcctaatttttctgactcttacgaaaacgattgccaacacatacttctacttttaaataaacaactttgatgatgtaacttgaccttccagagttacagaaattttgtccctatttaatgaataaattgtatgtatttttctctata

SEQ ID NO: 187595 - DNA, 2978 bp, Homo sapiens
  Payload ID: 16926
  Gene Symbol: SUV39H1
  Gene Name: suppressor of variegation 3-9 homolog 1 (Drosophila)
  Uniprot ID: O43463
  ENST ID: ENST00000337852
  CDS Start-End: 267-1538
gatcaactatccacgctgctcgaatcacagcatgctggagggcctggctgggtgctctgactgactgatcacctgacagacggtgcggtcagtcggatgctgagaatgactgacgatgtgatgaggggcggattgaacgagtcacaggccagctggccaggagcaaaatcggcatagctgtctgactcgatggctgtacgtggttacggactgtctgccctgatagaatctcagcttcaacgcatcagaggagactgacttgaccaatggtggggatgagtcgcctgagaaatgacagactggctgacccactgacaggctgcagcgtgtgttgcaagtcttcttggaatcagctgcaggacctgtgccgcctggccaagctctcctgccctgccctcggtatctctaagaggaacctctatgactttgaagtcgagtacctgtgcgattacaagaagatccgcgaacaggaatattacctggtgaaatggcgtggatatccagactcagagagcacctgggagccacggcagaatctcaagtgtgtgcgtatcctcaagcagttccacaaggacttagaaagggagctgctccggcggcaccaccggtcaaagaccccccggcacctggacccaagcttggccaactacctggtgcagaaggccaagcagaggcgggcgctccgtcgctgggagcaggagctcaatgccaagcgcagccatctgggacgcatcactgtagagaatgaggtggacctggacggccctccgcgggccttcgtgtacatcaatgagtaccgtgttggtgagggcatcaccctcaaccaggtggctgtgggctgcgagtgccaggactgtctgtgggcacccactggaggctgctgcccgggggcgtcactgcacaagtttgcctacaatgaccagggccaggtgcggcttcgagccgggctgcccatctacgagtgcaactcccgctgccgctgcggctatgactgcccaaatcgtgtggtacagaagggtatccgatatgacctctgcatcttccgcacggatgatgggcgtggctggggcgtccgcaccctggagaagattcgcaagaacagcttcgtcatggagtacgtgggagagatcattacctcagaggaggcagagcggcggggccagatctacgaccgtcagggcgccacctacctctttgacctggactacgtggaggacgtgtacaccgtggatgccgcctactatggcaacatctcccactttgtcaaccacagttgtgaccccaacctgcaggtgtacaacgtcttcatagacaaccttgacgagcggctgccccgcatcgctttctttgccacaagaaccatccgggcaggcgaggagctcacctttgattacaacatgcaagtggaccccgtggacatggagagcacccgcatggactccaactttggcctggctgggctccctggctcccctaagaagcgggtccgtattgaatgcaagtgtgggactgagtcctgccgcaaatacctcttctagcccttagaagtctgaggccagactgactgagggggcctgaagctacatgcacctcccccactgctgccctcctgtcgagaatgactgccagggcctcgcctgcctccacctgcccccacctgctcctacctgctctacgttcagggctgtggccgtggtgaggaccgactccaggagtcccctttccctgtcccagccccatctgtgggttgcacttacaaacccccacccaccttcagaaatagtttttcaacatcaagactctctgtcgttgggattcatggcctattaaggaggtccaaggggtgagtcccaacccagccccagaatatatttgtttttgcacctgcttctgcctggagattgaggggtctgctgcaggcctcctccctgctgccccaaaggtatggggaagcaaccccagagcaggcagacatcagaggccagagtgcctagcccgacatgaagctggttccccaaccacagaaactttgtactagtgaaagaaagggggtccctgggctacgggctgaggctggtttctgctcgtgcttacagtgctgggtagtgttggccctaagagctgtagggtctcttcttcagggctgcatatctgagaagtggatgcccacatgccactggaagggaagtgggtgtccatgggccactgagcagtgagaggaaggcagtgcagagctggccagccctggaggtaggctgggaccaagctctgccttcacagtgcagtgaaggtacctagggctcttgggagctctgcggttgctaggggccctgacctggggtgtcatgaccgctgacaccactcagagctggaaccaagatctagatagtccgtagatagcacttaggacaagaatgtgcattgatggggtggtgatgaggtgccaggcactgggtagagcacctggtccacgtggattgtctcagggaagccttgaaaaccacggaggtggatgccaggaaagggcccatgtggcagaaggcaaagtacaggccaagaattgggggtgggggagatggcttccccactatgggatgacgaggcgagagggaagcccttgctgcctgccattcccagaccccagccctttgtgctcaccctggttccactggtctcaaaagtcacctgcctacaaatgtacaaaaggcgaaggttctgatggctgccttgctccttgctcccccaccccctgtgaggacttctctaggaagtccttcctgactacctgtgcccagagtgcccctacatgagactgtatgccctgctatcagatgccagatctatgtgtctgtctgtgtgtccatcccgccggccccccagactaacctccaggcatggactgaatctggttctcctcttgtacacccctcaaccctatgcagcctggagtgggcatcaataaaatgaactgtcgactg

SEQ ID NO: 187596 - DNA, 2871 bp, Homo sapiens
  Payload ID: 16926
  Gene Symbol: SUV39H1
  Gene Name: suppressor of variegation 3-9 homolog 1 (Drosophila)
  Uniprot ID: O43463
  ENST ID: ENST00000376687
  CDS Start-End: 191-1429
gcggcgagcacccgcctccgggaccgagccgggcggcagggaggggttcggtcacggctctccggttggtccgcgcgggtgctgcgagtcgggagccgcggccaataggctgcgcgttcccggccacgcccgcgcgagcgctcttctcgcgaggccggctaggcccgaatgtcgttagccgtggggaaagatggcggaaaatttaaaaggctgcagcgtgtgttgcaagtcttcttggaatcagctgcaggacctgtgccgcctggccaagctctcctgccctgccctcggtatctctaagaggaacctctatgactttgaagtcgagtacctgtgcgattacaagaagatccgcgaacaggaatattacctggtgaaatggcgtggatatccagactcagagagcacctgggagccacggcagaatctcaagtgtgtgcgtatcctcaagcagttccacaaggacttagaaagggagctgctccggcggcaccaccggtcaaagaccccccggcacctggacccaagcttggccaactacctggtgcagaaggccaagcagaggcgggcgctccgtcgctgggagcaggagctcaatgccaagcgcagccatctgggacgcatcactgtagagaatgaggtggacctggacggccctccgcgggccttcgtgtacatcaatgagtaccgtgttggtgagggcatcaccctcaaccaggtggctgtgggctgcgagtgccaggactgtctgtgggcacccactggaggctgctgcccgggggcgtcactgcacaagtttgcctacaatgaccagggccaggtgcggcttcgagccgggctgcccatctacgagtgcaactcccgctgccgctgcggctatgactgcccaaatcgtgtggtacagaagggtatccgatatgacctctgcatcttccgcacggatgatgggcgtggctggggcgtccgcaccctggagaagattcgcaagaacagcttcgtcatggagtacgtgggagagatcattacctcagaggaggcagagcggcggggccagatctacgaccgtcagggcgccacctacctctttgacctggactacgtggaggacgtgtacaccgtggatgccgcctactatggcaacatctcccactttgtcaaccacagttgtgaccccaacctgcaggtgtacaacgtcttcatagacaaccttgacgagcggctgccccgcatcgctttctttgccacaagaaccatccgggcaggcgaggagctcacctttgattacaacatgcaagtggaccccgtggacatggagagcacccgcatggactccaactttggcctggctgggctccctggctcccctaagaagcgggtccgtattgaatgcaagtgtgggactgagtcctgccgcaaatacctcttctagcccttagaagtctgaggccagactgactgagggggcctgaagctacatgcacctcccccactgctgccctcctgtcgagaatgactgccagggcctcgcctgcctccacctgcccccacctgctcctacctgctctacgttcagggctgtggccgtggtgaggaccgactccaggagtcccctttccctgtcccagccccatctgtgggttgcacttacaaacccccacccaccttcagaaatagtttttcaacatcaagactctctgtcgttgggattcatggcctattaaggaggtccaaggggtgagtcccaacccagccccagaatatatttgtttttgcacctgcttctgcctggagattgaggggtctgctgcaggcctcctccctgctgccccaaaggtatggggaagcaaccccagagcaggcagacatcagaggccagagtgcctagcccgacatgaagctggttccccaaccacagaaactttgtactagtgaaagaaagggggtccctgggctacgggctgaggctggtttctgctcgtgcttacagtgctgggtagtgttggccctaagagctgtagggtctcttcttcagggctgcatatctgagaagtggatgcccacatgccactggaagggaagtgggtgtccatgggccactgagcagtgagaggaaggcagtgcagagctggccagccctggaggtaggctgggaccaagctctgccttcacagtgcagtgaaggtacctagggctcttgggagctctgcggttgctaggggccctgacctggggtgtcatgaccgctgacaccactcagagctggaaccaagatctagatagtccgtagatagcacttaggacaagaatgtgcattgatggggtggtgatgaggtgccaggcactgggtagagcacctggtccacgtggattgtctcagggaagccttgaaaaccacggaggtggatgccaggaaagggcccatgtggcagaaggcaaagtacaggccaagaattgggggtgggggagatggcttccccactatgggatgacgaggcgagagggaagcccttgctgcctgccattcccagaccccagccctttgtgctcaccctggttccactggtctcaaaagtcacctgcctacaaatgtacaaaaggcgaaggttctgatggctgccttgctccttgctcccccaccccctgtgaggacttctctaggaagtccttcctgactacctgtgcccagagtgcccctacatgagactgtatgccctgctatcagatgccagatctatgtgtctgtctgtgtgtccatcccgccggccccccagactaacctccaggcatggactgaatctggttctcctcttgtacacccctcaaccctatgcagcctggagtgggcatcaataaaatgaactgtcgactgaa

SEQ ID NO: 187597 - DNA, 3087 bp, Homo sapiens
  Payload ID: 16927
  Gene Symbol: SUV39H2
  Gene Name: suppressor of variegation 3-9 homolog 2 (Drosophila)
  Uniprot ID: Q9H5I1
  ENST ID: ENST00000313519
  CDS Start-End: 232-1284
cggggccgaggcgcgaggaggtgaggctggagcgcggccccctcgccttccctgttcccaggcaagctcccaaggcccgggcggcggggccgtcccgcgggccagccagatggcgacgtggcggttccccgcccgccgcgaccccaactccgggacgcacgctgcggacgcctatcctcccccaggccgctgacccgcctccctgcccggccggctcccgccgcggaggatatggaatattatcttgtaaaatggaaaggatggccagattctacaaatacttgggaacctttgcaaaatctgaagtgcccgttactgcttcagcaattctctaatgacaagcataattatttatctcaggtaaagaaaggcaaagcaataactccaaaagacaataacaaaactttgaaacctgccattgctgagtacattgtgaagaaggctaaacaaaggatagctctgcagagatggcaagatgaactcaacagaagaaagaatcataaaggaatgatatttgttgaaaatactgttgatttagagggcccaccttcagacttctattacattaacgaatacaaaccagctcctggaatcagcttagtcaatgaagctacctttggttgttcatgcacagattgcttctttcaaaaatgttgtcctgctgaagctggagttcttttggcttataataaaaaccaacaaattaaaatcccacctggtactcccatctatgaatgcaactcaaggtgtcagtgtggtcctgattgtcccaataggattgtacaaaaaggcacacagtattcgctttgcatctttcgaactagcaatggacgtggctggggtgtaaagacccttgtgaagattaaaagaatgagttttgtcatggaatatgttggagaggtaatcacaagtgaagaagctgaaagacgaggacagttctatgacaacaagggaatcacgtatctctttgatctggactatgagtctgatgaattcacagtggatgcggctcgatacggcaatgtgtctcattttgtgaatcacagctgtgacccaaatcttcaggtgttcaatgttttcattgataacctcgatactcgtcttccccgaatagcattgttttccacaagaaccataaatgctggagaagagctgacttttgattatcaaatgaaaggttctggagatatatcttcagattctattgaccacagcccagccaaaaagagggtcagaacagtatgtaaatgtggagctgtgacttgcagaggttacctcaactgaactttttcaggaaatagagctgatgattataatatttttttcctaatgttaacatttttaaaaatacatatttgggactcttattatcaaggttctacctatgttaatttacaattcatgtttcaagacatttgccaaatgtattaccgatgcctctgaaaagggggtcactgggtctcatagactgatatgaagtcgacatatttatagtgcttagagaccaaactaatggaaggcagactatttacagcttagtatatgtgtacttaagtctatgtgaacagagaaatgcctcccgtagtgtttgaaagcgttaagctgataatgtaattaacaactgctgagagatcaaagattcaacttgccatacacctcaaattcggagaaacagttaatttgggcaaatctacagttctgtttttgctactctattgtcattcctgtttaatactcactgtacttgtatttgagacaaataggtgatactgaattttatactgttttctacttttccattaaaacattggcacctcaatgataaagaaatttaaggtataaaattaaatgtaaaaattaatttcagcttcatttcgtatttcgaagcaatctagactgttgtgatgagtgtatgtctgaacctgtaattcttaaaagacttcttaatcttctagaagaaaaatctccgaagagctctctctagaagtccaaaatggctagccattatgcttctttgaaaggacatgataatgggaccaggatggttttttggagtaccaagcaaggggaatggagcactttaagggcgcctgttagtaacatgaattggaaatctgtgtcgagtacctctgatctaaacggtaaaacaagctgcctggagagcagctgtacctaacaatactgtaatgtacattaacattacagcctctcaatttcaggcaggtgtaacagttcctttccaccagatttaatatttttatacttcctgcaggttcttcttaaaaagtaatctatatttttgaactgatacttgttttatacataaattttttttagatgtgataaagctaaacttggccaaagtgtgtgcctgaattattagacctttttattagtcaacctacgaagactaaaatagaatatattagttttcaagggagtgggaggcttccaacatagtattgaatctcaggaaaaactattctttcatgtctgattctgagatttctaattgtgttgtgaaaatgataaatgcagcaaatctagctttcagtattcctaatttttacctaagctcattgctccaggctttgattacctaaaataagcttggataaaattgaaccaacttcaagaatgcagcacttcttaatctttagctctttcttgggagaagctagactttattcattatattgctatgacaacttcactctttcataatatataggataaattgtttacatgattggaccctcagattctgttaaccaaaattgcagaatggggggccaggcctgtgtggtggctcacacctgtgatcccagcactttgggaggctgaggtaggaggatcacgtgaggtcgggagttcaagaccagcctggccatcatggtgaaaccctgtctctactgaaaatacaaaaattagccgggcgtggtggcacacgcctgtagtcccagctactcaggaggctgaggcaggagaatcacttgaattcaggaggcggaggttgcagtgagccaagatcataccactgcactgcagcctgagtgacacagtaagactgtctccaaaaaaaaaaaa

SEQ ID NO: 187598 - DNA, 1233 bp, Homo sapiens
  Payload ID: 16927
  Gene Symbol: SUV39H2
  Gene Name: suppressor of variegation 3-9 homolog 2 (Drosophila)
  Uniprot ID: Q9H5I1
  ENST ID: ENST00000354919
  CDS Start-End: 1-1233
atggcggcggtcggggccgaggcgcgaggagcttggtgtgtgccttgcctagtttcacttgatactcttcaggaattatgtagaaaagaaaagctcacatgtaaatcgattggaatcaccaaaaggaatctaaacaattatgaggtggaatacttgtgtgactacaaggtagtaaaggatatggaatattatcttgtaaaatggaaaggatggccagattctacaaatacttgggaacctttgcaaaatctgaagtgcccgttactgcttcagcaattctctaatgacaagcataattatttatctcaggtaaagaaaggcaaagcaataactccaaaagacaataacaaaactttgaaacctgccattgctgagtacattgtgaagaaggctaaacaaaggatagctctgcagagatggcaagatgaactcaacagaagaaagaatcataaaggaatgatatttgttgaaaatactgttgatttagagggcccaccttcagacttctattacattaacgaatacaaaccagctcctggaatcagcttagtcaatgaagctacctttggttgttcatgcacagattgcttctttcaaaaatgttgtcctgctgaagctggagttcttttggcttataataaaaaccaacaaattaaaatcccacctggtactcccatctatgaatgcaactcaaggtgtcagtgtggtcctgattgtcccaataggattgtacaaaaaggcacacagtattcgctttgcatctttcgaactagcaatggacgtggctggggtgtaaagacccttgtgaagattaaaagaatgagttttgtcatggaatatgttggagaggtaatcacaagtgaagaagctgaaagacgaggacagttctatgacaacaagggaatcacgtatctctttgatctggactatgagtctgatgaattcacagtggatgcggctcgatacggcaatgtgtctcattttgtgaatcacagctgtgacccaaatcttcaggtgttcaatgttttcattgataacctcgatactcgtcttccccgaatagcattgttttccacaagaaccataaatgctggagaagagctgacttttgattatcaaatgaaaggttctggagatatatcttcagattctattgaccacagcccagccaaaaagagggtcagaacagtatgtaaatgtggagctgtgacttgcagaggttacctcaactga

SEQ ID NO: 187599 - DNA, 1611 bp, Homo sapiens
  Payload ID: 16927
  Gene Symbol: SUV39H2
  Gene Name: suppressor of variegation 3-9 homolog 2 (Drosophila)
  ENST ID: ENST00000358298
  CDS Start-End: 1-530
cttggtgtgtgccttgcctagtttcacttgatactcttcaggaattatgtagaaaagaaaagctcacatgtaaatcgattggaatcaccaaaaggaatctaaacaattatgaggtggaatacttgtgtgactacaaggtagtaaaggtaatcacaagtgaagaagctgaaagacgaggacagttctatgacaacaagggaatcacgtatctctttgatctggactatgagtctgatgaattcacagtggatgcggctcgatacggcaatgtgtctcattttgtgaatcacagctgtgacccaaatcttcaggtgttcaatgttttcattgataacctcgatactcgtcttccccgaatagcattgttttccacaagaaccataaatgctggagaagagctgacttttgattatcaaatgaaaggttctggagatatatcttcagattctattgaccacagcccagccaaaaagagggtcagaacagtatgtaaatgtggagctgtgacttgcagaggttacctcaactgaactttttcaggaaatagagctgatgattataatatttttttcctaatgttaacatttttaaaaatacatatttgggactcttattatcaaggttctacctatgttaatttacaattcatgtttcaagacatttgccaaatgtattaccgatgcctctgaaaagggggtcactgggtctcatagactgatatgaagtcgacatatttatagtgcttagagaccaaactaatggaaggcagactatttacagcttagtatatgtgtacttaagtctatgtgaacagagaaatgcctcccgtagtgtttgaaagcgttaagctgataatgtaattaacaactgctgagagatcaaagattcaacttgccatacacctcaaattcggagaaacagttaatttgggcaaatctacagttctgtttttgctactctattgtcattcctgtttaatactcactgtacttgtatttgagacaaataggtgatactgaattttatactgttttctacttttccattaaaacattggcacctcaatgataaagaaatttaaggtataaaattaaatgtaaaaattaatttcagcttcatttcgtatttcgaagcaatctagactgttgtgatgagtgtatgtctgaacctgtaattcttaaaagacttcttaatcttctagaagaaaaatctccgaagagctctctctagaagtccaaaatggctagccattatgcttctttgaaaggacatgataatgggaccaggatggttttttggagtaccaagcaaggggaatggagcactttaagggcgcctgttagtaacatgaattggaaatctgtgtcgagtacctctgatctaaacggtaaaacaagctgcctggagagcagctgtacctaacaatactgtaatgtacattaacattacagcctctcaatttcaggcaggtgtaacagttcctttccaccagatttaatatttttatacttcctgcaggttcttcttaaaaagtaatctatatttttgaactgatacttgttttatacataaattttttttagatgtgataaagctaaacttggccaaagt

SEQ ID NO: 187600 - DNA, 1292 bp, Homo sapiens
  Payload ID: 16927
  Gene Symbol: SUV39H2
  Gene Name: suppressor of variegation 3-9 homolog 2 (Drosophila)
  Uniprot ID: Q9H5I1
  ENST ID: ENST00000378325
  CDS Start-End: 27-719
gccagtttgaatgaaagctctacaagatggcggcggtcggggccgaggcgcgaggagcttggtgtgtgccttgcctagtttcacttgatactcttcaggaattatgtagaaaagaaaagctcacatgtaaatcgattggaatcaccaaaaggaatctaaacaattatgaggtggaatacttgtgtgactacaaggtagtaaaggatatggaatattatcttgtaaaatggaaaggatggccagattctacaaatacttgggaacctttgcaaaatctgaagtgcccgttactgcttcagcaattctctaatgacaagcataattatttatctcaggtaatcacaagtgaagaagctgaaagacgaggacagttctatgacaacaagggaatcacgtatctctttgatctggactatgagtctgatgaattcacagtggatgcggctcgatacggcaatgtgtctcattttgtgaatcacagctgtgacccaaatcttcaggtgttcaatgttttcattgataacctcgatactcgtcttccccgaatagcattgttttccacaagaaccataaatgctggagaagagctgacttttgattatcaaatgaaaggttctggagatatatcttcagattctattgaccacagcccagccaaaaagagggtcagaacagtatgtaaatgtggagctgtgacttgcagaggttacctcaactgaactttttcaggaaatagagctgatgattataatatttttttcctaatgttaacatttttaaaaatacatatttgggactcttattatcaaggttctacctatgttaatttacaattcatgtttcaagacatttgccaaatgtattaccgatgcctctgaaaagggggtcactgggtctcatagactgatatgaagtcgacatatttatagtgcttagagaccaaactaatggaaggcagactatttacagcttagtatatgtgtacttaagtctatgtgaacagagaaatgcctcccgtagtgtttgaaagcgttaagctgataatgtaattaacaactgctgagagatcaaagattcaacttgccatacacctcaaattcggagaaacagttaatttgggcaaatctacagttctgtttttgctactctattgtcattcctgtttaatactcactgtacttgtatttgagacaaataggtgatactgaattttatactgttttctacttttccattaaaacattggcacctcaatgataaagaaatttaaggtataaaattaaatgtaaaaa

SEQ ID NO: 187601 - DNA, 2959 bp, Homo sapiens
  Payload ID: 16927
  Gene Symbol: SUV39H2
  Gene Name: suppressor of variegation 3-9 homolog 2 (Drosophila)
  ENST ID: ENST00000378331
  CDS Start-End: 70-207
aggggcggggcgtcgggccagctgagctatcccgtcagaccgcgccagtttgaatgaaagctctacaagatggcggcggtcggggccgaggcgcgaggaggatatggaatattatcttgtaaaatggaaaggatggccagattctacaaatacttgggaacctttgcaaaatctgaagtgcccgttactgcttcagcaattctctaatgacaagcataattatttatctcaggtaaagaaaggcaaagcaataactccaaaagacaataacaaaactttgaaacctgccattgctgagtacattgtgaagaaggctaaacaaaggatagctctgcagagatggcaagatgaactcaacagaagaaagaatcataaaggaatgatatttgttgaaaatactgttgatttagagggcccaccttcagacttctattacattaacgaatacaaaccagctcctggaatcagcttagtcaatgaagctacctttggttgttcatgcacagattgcttctttcaaaaatgttgtcctgctgaagctggagttcttttggcttataataaaaaccaacaaattaaaatcccacctggtactcccatctatgaatgcaactcaaggtgtcagtgtggtcctgattgtcccaataggattgtacaaaaaggcacacagtattcgctttgcatctttcgaactagcaatggacgtggctggggtgtaaagacccttgtgaagattaaaagaatgagttttgtcatggaatatgttggagaggtaatcacaagtgaagaagctgaaagacgaggacagttctatgacaacaagggaatcacgtatctctttgatctggactatgagtctgatgaattcacagtggatgcggctcgatacggcaatgtgtctcattttgtgaatcacagctgtgacccaaatcttcaggtgttcaatgttttcattgataacctcgatactcgtcttccccgaatagcattgttttccacaagaaccataaatgctggagaagagctgacttttgattatcaaatgaaaggttctggagatatatcttcagattctattgaccacagcccagccaaaaagagggtcagaacagtatgtaaatgtggagctgtgacttgcagaggttacctcaactgaactttttcaggaaatagagctgatgattataatatttttttcctaatgttaacatttttaaaaatacatatttgggactcttattatcaaggttctacctatgttaatttacaattcatgtttcaagacatttgccaaatgtattaccgatgcctctgaaaagggggtcactgggtctcatagactgatatgaagtcgacatatttatagtgcttagagaccaaactaatggaaggcagactatttacagcttagtatatgtgtacttaagtctatgtgaacagagaaatgcctcccgtagtgtttgaaagcgttaagctgataatgtaattaacaactgctgagagatcaaagattcaacttgccatacacctcaaattcggagaaacagttaatttgggcaaatctacagttctgtttttgctactctattgtcattcctgtttaatactcactgtacttgtatttgagacaaataggtgatactgaattttatactgttttctacttttccattaaaacattggcacctcaatgataaagaaatttaaggtataaaattaaatgtaaaaattaatttcagcttcatttcgtatttcgaagcaatctagactgttgtgatgagtgtatgtctgaacctgtaattcttaaaagacttcttaatcttctagaagaaaaatctccgaagagctctctctagaagtccaaaatggctagccattatgcttctttgaaaggacatgataatgggaccaggatggttttttggagtaccaagcaaggggaatggagcactttaagggcgcctgttagtaacatgaattggaaatctgtgtcgagtacctctgatctaaacggtaaaacaagctgcctggagagcagctgtacctaacaatactgtaatgtacattaacattacagcctctcaatttcaggcaggtgtaacagttcctttccaccagatttaatatttttatacttcctgcaggttcttcttaaaaagtaatctatatttttgaactgatacttgttttatacataaattttttttagatgtgataaagctaaacttggccaaagtgtgtgcctgaattattagacctttttattagtcaacctacgaagactaaaatagaatatattagttttcaagggagtgggaggcttccaacatagtattgaatctcaggaaaaactattctttcatgtctgattctgagatttctaattgtgttgtgaaaatgataaatgcagcaaatctagctttcagtattcctaatttttacctaagctcattgctccaggctttgattacctaaaataagcttggataaaattgaaccaacttcaagaatgcagcacttcttaatctttagctctttcttgggagaagctagactttattcattatattgctatgacaacttcactctttcataatatataggataaattgtttacatgattggaccctcagattctgttaaccaaaattgcagaatggggggccaggcctgtgtggtggctcacacctgtgatcccagcactttgggaggctgaggtaggaggatcacgtgaggtcgggagttcaagaccagcctggccatcatggtgaaaccctgtctctactgaaaatacaaaaattagccgggcgtggtggcacacgcctgtagtcccagctactcaggaggctgaggcaggagaatcacttgaattcaggaggcggaggttgcagtgagccaagatcataccactgcactgcagcctgagtgacacagtaagactgtctccaaaaaaaaaaaa

SEQ ID NO: 187602 - DNA, 688 bp, Homo sapiens
  Payload ID: 16927
  Gene Symbol: SUV39H2
  Gene Name: suppressor of variegation 3-9 homolog 2 (Drosophila)
  ENST ID: ENST00000412254
  CDS Start-End: 402-688
tgaactatttaattttgtcagtgaaatctttttctgcattactggagactgtcgagagattgtctttctttttttaaccacgtgtttgcagtttttcatgttcactttttttttttttttaattttcaaagagcatttcctttgcgggttgtgttttgaatcctcaactagataaaaatgtttaggaaaagcacacaaacacaccttgagtagataagaggaacctcctttatacgtgattcccttaatgagcttggtgtgtgccttgcctagtttcacttgatactcttcaggaattatgtagaaaagaaaagctcacatgtaaatcgattggaatcaccaaaaggaatctaaacaattatgaggtggaatacttgtgtgactacaaggtagtaaaggatatggaatattatcttgtaaaatggaaaggatggccagattctacaaatacttgggaacctttgcaaaatctgaagtgcccgttactgcttcagcaattctctaatgacaagcataattatttatctcaggtaaagaaaggcaaagcaataactccaaaagacaataacaaaactttgaaacctgccattgctgagtacattgtgaagaaggctaaacaaaggatagctctgcagagatggcaagatgaactcaacagaagaaagaatcataaaggaatgatatttgt

SEQ ID NO: 187603 - DNA, 719 bp, Homo sapiens
  Payload ID: 16927
  Gene Symbol: SUV39H2
  Gene Name: suppressor of variegation 3-9 homolog 2 (Drosophila)
  ENST ID: ENST00000433779
  CDS Start-End: 263-719
atcccgtcagaccgcgccagtttgaatgaaagctctacaagatggcggcggtcggggccgaggcgcgaggaggtgaggctggagcgcggccccctcgccttccctgttcccagcttggtgtgtgccttgcctagtttcacttgatactcttcaggaattatgtagaaaagaaaagctcacatgtaaatcgattggaatcaccaaaaggaatctaaacaattatgaggtggaatacttgtgtgactacaaggtagtaaaggatatggaatattatcttgtaaaatggaaaggatggccagattctacaaatacttgggaacctttgcaaaatctgaagtgcccgttactgcttcagcaattctctaatgacaagcataattatttatctcaggtaatcacaagtgaagaagctgaaagacgaggacagttctatgacaacaagggaatcacgtatctctttgatctggactatgagtctgatgaattcacagtggatgcggctcgatacggcaatgtgtctcattttgtgaatcacagctgtgacccaaatcttcaggtgttcaatgttttcattgataacctcgatactcgtcttccccgaatagcattgttttccacaagaaccataaatgctggagaagagctgacttttgattatcaaatgaaaggttctggagatatatcttcagattctattgaccacagcccagccaaaaaga

SEQ ID NO: 187604 - DNA, 704 bp, Homo sapiens
  Payload ID: 16927
  Gene Symbol: SUV39H2
  Gene Name: suppressor of variegation 3-9 homolog 2 (Drosophila)
  ENST ID: ENST00000420416
  CDS Start-End: 43-704
gaggctggagcgcggccccctcgccttccctgttcccaggatatggaatattatcttgtaaaatggaaaggatggccagattctacaaatacttgggaacctttgcaaaatctgaagtgcccgttactgcttcagcaattctctaatgacaagcataattatttatctcaggtaaagaaaggcaaagcaataactccaaaagacaataacaaaactttgaaacctgccattgctgagtacattgtgaagaaggctaaacaaaggatagctctgcagagatggcaagatgaactcaacagaagaaagaatcataaaggaatgatatttgttgaaaatactgttgatttagagggcccaccttcagacttctattacattaacgaatacaaaccagctcctggaatcagcttagtcaatgaagctacctttggttgttcatgcacagattgcttctttcaaaaatgttgtcctgctgaagctggagttcttttggcttataataaaaaccaacaaattaaaatcccacctggtactcccatctatgaatgcaactcaaggtgtcagtgtggtcctgattgtcccaataggattgtacaaaaaggcacacagtattcgctttgcatctttcgaactagcaatggacgtggctggggtgtaaagacccttgtgaagattaaaagaatgagttttgtcatggaatatgt

SEQ ID NO: 187605 - DNA, 5837 bp, Homo sapiens
  Payload ID: 16928
  Gene Symbol: SUV420H1
  Gene Name: suppressor of variegation 4-20 homolog 1 (Drosophila)
  Uniprot ID: Q4FZB7
  ENST ID: ENST00000304363
  CDS Start-End: 355-3012
gggcgcggggggcgcgacggcggcggcggcggccggttgggggcggggggctcggacgctgcggggactcatttttcccgtcagcggagggagcgagcggtgctgcggcccgcgccgccatcttggattttactctccatttttctctggaattatttttggtgattaattttctgggggggactgggacgcggggcccggcggcgcggccccgcatcgcagcggccgggcagcggggcctgggacgcgccccgaggaggagcggggcggcgcaggcggagagaacattgaaagtattctctaagctatttgaagagagtgactaaatgcacctgggtcaggctgtctgtgggtatgaagtggttgggagaatccaagaacatggtggtgaatggcaggagaaatggaggcaagttgtctaatgaccatcagcagaatcaatcaaaattacagcacacggggaaggacaccctgaaggctggcaaaaatgcagtcgagaggaggtcgaacagatgtaatggtaactcgggatttgaaggacagagtcgctatgtaccatcctctggaatgtccgccaaggaactctgtgaaaatgatgacctagcaaccagtttggttcttgatccctatttaggttttcaaacacacaaaatgaatactagcgcctttccttcgaggagctcaaggcatttttcaaaatctgacagtttttctcacaacaaccctgtgagatttaggcctattaaaggaaggcaggaagaactaaaggaagtaattgaacgttttaagaaagatgaacacttggagaaagccttcaaatgtttgacttcaggcgaatgggcacggcactattttctcaacaagaataaaatgcaggagaaattattcaaagaacatgtatttatttatttgcgaatgtttgcaactgacagtggatttgaaatattgccatgtaatagatactcatcagaacaaaatggagccaaaatagttgcaacaaaagagtggaaacgaaatgacaaaatagaattactggtgggttgtattgccgaactttcagaaattgaggagaacatgctacttagacatggagaaaacgacttcagtgtcatgtactccacaaggaaaaactgtgctcaactctggctgggtcctgctgcgtttataaaccatgattgcagacctaattgtaagtttgtgtcaactggtcgagatacagcatgtgtgaaggctctaagagacattgaacctggagaagaaatttcttgttattatggagatgggttctttggagaaaataatgagttctgcgagtgttacacttgcgaaagacggggcactggtgcttttaaatccagagtgggactgcctgcgcctgctcctgttatcaatagcaaatatggactcagagaaacagataaacgtttaaataggcttaaaaagttaggtgacagcagcaaaaattcagacagtcaatctgtcagctctaacactgatgcagataccactcaggaaaaaaacaatgcaacttctaaccgaaaatcttcagttggcgtaaaaaagaatagcaagagcagaacgttaacgaggcaatctatgtcaagaattccagcttcttccaactctacctcatctaagctaactcatataaataattccagggtaccaaagaaactgaagaagcctgcaaagcctttactttcaaagataaaattgagaaatcattgcaagcggctggagcaaaagaatgcttcaagaaaactcgaaatgggaaacttagtactgaaagagcctaaagtagttctgtataaaaatttgcccattaaaaaagataaggagccagagggaccagcccaagccgcagttgccagcgggtgcttgactagacacgcggcgagagaacacagacagaatcctgtgagaggtgctcattcgcagggggagagctcgccctgcacctacataactcggcggtcagtgaggacaagaacaaatctgaaggaggcctctgacatcaagcttgaaccaaatacgttgaatggctataaaagcagtgtgacggaaccttgccccgacagtggtgaacagctgcagccagctcctgtgctgcaggaggaagaactggctcatgagactgcacaaaaaggggaggcaaagtgtcataagagtgacacaggcatgtccaaaaagaagtcacgacaaggaaaacttgtgaaacagtttgcaaaaatagaggaatctactccagtgcacgattctcctggaaaagacgacgcggtaccagatttgatgggtccccattctgaccagggtgagcacagtggcactgtgggcgtgcctgtgagctacacagactgtgctccttcacccgtcggttgttcagttgtgacatcagatagcttcaaaacaaaagacagctttagaactgcaaaaagtaaaaagaagaggcgaatcacaaggtatgatgcacagttaatcctagaaaataactctgggattcccaaattgactcttcgtaggcgtcatgatagcagcagcaaaacaaatgaccaagagaatgatggaatgaactcttccaaaataagcatcaagttaagcaaagaccatgacaacgataacaatctctatgtagcaaagcttaataatggatttaactcaggatcaggcagtagttctacaaaattaaaaatccagctaaaacgagatgaggaaaatagggggtcttatacagaggggcttcatgaaaatggggtgtgctgcagtgatcctctttctctcttggagtctcgaatggaggtggatgactatagtcagtatgaggaagaaagtacagatgattcctcctcttctgagggcgatgaagaggaggatgactatgatgatgactttgaagacgattttattcctcttcctccagctaagcgcttgaggttaatagttggaaaagactctatagatattgacatttcttcaaggagaagagaagatcagtctttaaggcttaatgcctaagctcttggtcttaacttgacctgggataactactttaaagaaataaaaaattccagtcaattattcctcaactgaaagtttagtggcagcacttctattgtcccttcacttatcagcatactattgtagaaagtgtacagcatactgactcaattcttaagtctgatttgtgcaaatttttatcgtactttttaaatagccttcttacgtgcaattctgagttagaggtaaagccctgttgtaaaataaaggctcaagcaaaattgtacagtgatagcaactttccacacaggacgttgaaaacagtaatgtggctacacagtttttttaactgtaagagcatcagctggctctttaatatatgactaaacaataatttaaaacaaatcatagtagcagcatattaagggtttctagtatgctaatatcaccagcaatgatctttggctttttgatttatttgctagatgtttcccccttggagttttgtcagtttcacactgtttgctggcccaggtgtactgtttgtggcctttgttaatatcgcaaaccattggttgggagtcagattggtttcttaaaaaaaaaaaaaaaatgacatacgtgacagctcacttttcagttcattatatgtacgagggtagcagtgtgtgggatgaggttcgatacagcgtatttattgcttgtcatgtaaattaaaaaccttgtatttaactcttttcaatccttttagataaaattgttctttgcaagaatgattggtgcttattttttcaaaaatttgctgtgaacaacgtgatgacaacaagcaacatttatctaatgaactacagctatcttaatttggttcttcaagttttctgttgcacttgtaaaatgctacaaggaatattaaaaaaatctattcactttaacttataatagtttatgaaataaaaacatgagtcacagcttttgttctgtggtaacctataaaaaaagtttgtctttgagattcaatgtaaagaactgaaaacaatgtatatgttgtaaatatttgtgtgttgtgagaaatttttgtcataagaaattaaaagaacttaccaggaaggtttttaagtttagaaatattcatgccaataaaataggaaattataaatatatagttttaagcactgcatcagtgggagttcttggcttatgttagtttatgttagtttattatgaaaacatcaaagatttttttgactatattatcagttaaacaaaaaggagtcagatttaatttgttttttgaagcactttgagaaattaattttaattaacttaatgagcaaatttttattactactttatgttcaataccaggttcttttcatttctctggattattttgcaaatcattggacagagaatttgggaatataaatctgtaacaggtgtttgacaccagtaggtctctttatttctgggaaatgtgtacctgtactttctgatatacagtgttcctaagtaaaaatcaattcaggggatttgtatagtgtctataggaaagtagcccatgtcttgaaatatgaaaaggaatctgaaggtcatgaaaagtccagtggagaaaatctcaatgcttactgttactactaattgattcctactagtttccaggtttggggggatattgtttcaatgacgctccttaagactgttgattgcccataggttccaaatagaaattaagactcatgaacatttttagaaagtagattgttttctcctggttctctaaggaactacttctgcagtcttacatagtctcatccttgtttgttgtggtgcagtcgaactcctcaggcgtttggaaagcatgtggtagaccttcttccacacccacccatacccccgttcactgcgtctggaggtcttcaacagtgaagtagggcagcccacacagcctctcaggagcacctgtccgaggcacccggagcactttgcagagcacgtccagccctcatggggtccctgcatagaaatgtgaacccctgccactgaggaagatgaaggtagaccctgtgtctggaggtgctggagggcagcgggtcacctcttgtattcccaccttagtttggggtgttttgaagaggttcagagactaaatcttaaaccttatttgaataccaacgatagctattttgggaatttcgatcttaaaaagtgacaaaacacatttcccattttcatttttcagctgaattttagtaacttatttttgatgttttaattttatcatggcctcctctttggaggccaaccttcccatgggtctcaaagcagtgacatttggtagtaaatcactgcctctcaggagtcggtatgcacaagcactcagcagccactgttgatgccttctagggaaacctaatttccgttggtaaaggtaggggcctcggaactgttccggatctgctgtagaacttcaccgtgtggaatggtgacagccacacaccgttgaccagtttagaagaggttgcattcaataaaactcttagcttgagcttatgcaatgattggttaagattttggcattgtaagaattaggagatgatcatagaaatatatgtaaagtattcaattttcaatcattttcaaattactgttataaattgtttttgctgagttgtaatacttttgagatacaatgtattccttgtactgaaagaatgaaaaaggactttttcagcatttgaggtaagttctttaacgtttcattaaaaacattttttacaaatattttgtacatgcacttgcagtattgaggttaatcattttaataaattcggaaattaaaacaa

SEQ ID NO: 187606 - DNA, 653 bp, Homo sapiens
  Payload ID: 16928
  Gene Symbol: SUV420H1
  Gene Name: suppressor of variegation 4-20 homolog 1 (Drosophila)
  ENST ID: ENST00000323599
  CDS Start-End: 1-311
aatctgacagtttttctcacaacaaccctgtgagatttaggcctattaaaggaaggcaggaagaactaaaggaagtaattgaacgttttaagaaagatgaacacttggagaaagccttcaaatgtttgacttcaggcgaatgggcacggcactattttctcaacaagaataaaatgcaggagaaattattcaaagaacataggcagaatcttgctctgtcacccaggctggagtgcagtggcctgattatggctcactgcagcttccatctcttgggctcaagtgattcttcctctcagcctcccacgtagctggcactaaaggtatttatttatttgcgaatgtttgcaactgacagtggatttgaaatattgccatgtaatagatactcatcagaacaaaatggagccaaaatagttgcaacaaaagagtggaaacgaaatgacaaaatagaattactggtgggttgtattgccgaactttcagaaattgaggagaacatgctacttagacatggagaaaacgacttcagtgtcatgtactccacaaggaaaaactgtgctcaactctggctgggtcctgctgcgtttataaaccatgattgcagacctaattgtaagtttgtgtcaactggtcgagatacagcatgtgtg

SEQ ID NO: 187607 - DNA, 1881 bp, Homo sapiens
  Payload ID: 16928
  Gene Symbol: SUV420H1
  Gene Name: suppressor of variegation 4-20 homolog 1 (Drosophila)
  ENST ID: ENST00000402185
  CDS Start-End: 202-1314
gcagcggggcgatgaggtgaggacgcccgggaaccggaggcggcaccgcgcggcgcacggacctgggacgcggagtcctgaagccggcggacggttttcgtacgggcggccgtgcgcgaggcgaggagagaacattgaaagtattctctaagctatttgaagagagtgactaaatgcacctgggtcaggctgtctgtgggtatgaagtggttgggagaatccaagaacatggtggtgaatggcaggagaaatggaggcaagttgtctaatgaccatcagcagaatcaatcaaaattacagcacacggggaaggacaccctgaaggctggcaaaaatgcagtcgagaggaggtcgaacagatgtaatggtaactcgggatttgaaggacagagtcgctatgtaccatcctctggaatgtccgccaaggaactctgtgaaaatgatgacctagcaaccagtttggttcttgatccctatttaggttttcaaacacacaaaatgaatactagatttaggcctattaaaggaaggcaggaagaactaaaggaagtaattgaacgttttaagaaagatgaacacttggagaaagccttcaaatgtttgacttcaggcgaatgggcacggcactattttctcaacaagaataaaatgcaggagaaattattcaaagaacatgtatttatttatttgcgaatgtttgcaactgacagtggatttgaaatattgccatgtaatagatactcatcagaacaaaatggagccaaaatagttgcaacaaaagagtggaaacgaaatgacaaaatagaattactggtgggttgtattgccgaactttcagaaattgaggagaacatgctacttagacatggagaaaacgacttcagtgtcatgtactccacaaggaaaaactgtgctcaactctggctgggtcctgctgcgtttataaaccatgattgcagacctaattgtaagtttgtgtcaactggtcgagatacagcatgtgtgaaggctctaagagacattgaacctggagaagaaatttcttgttattatggagatgggttctttggagaaaataatgagttctgcgagtgttacacttgcgaaagacggggcactggtgcttttaaatccagagtgggactgcctgcgcctgctcctgttatcaatagcaaatatggactcagagaaacagataaacgtttaaataggcttaaaaagttaggtgacagcagcaaaaattcagacagtcaatctgtcagctctaacactgatgcagataccactcaggaaaaaaacaatgcaagtaagtaagggagatttgataagcatatcttttaaaagtattttcacacaatttgctttataaagtgtgcttcagtagttttaaacttttaaatactcagagagactgggacttgtgagctttggctgcacttcaaggctctagacgtgatttgagtagaggcacagtctgtatcccatctctaacttcagtaccgtcctctagactatttttcttgaataccttggtaactggatatgagttcttcatcatatgttccaaggtcatcatatgttttaaacattttcaaggtgttagagactgtgatgatgtcgctaagtcctgcaagaagacaaaaggactgagtagaattaaattagactctatacattccagtgcctagccagtttgttagaaaagatgatggacttggggaattcatagcttctggccttaaggcttccaccttttcattgcttgctgacctttttcaaaacgaactgactcagttcagcagaccaccagtaccagactcagaattgtgatagaggagcattttgaacagtgccgtattgtgacatgctgtattggctact

SEQ ID NO: 187608 - DNA, 1599 bp, Homo sapiens
  Payload ID: 16928
  Gene Symbol: SUV420H1
  Gene Name: suppressor of variegation 4-20 homolog 1 (Drosophila)
  ENST ID: ENST00000402789
  CDS Start-End: 196-1404
gggcgatgaggtgaggacgcccgggaaccggaggcggcaccgcgcggcgcacggacctgggacgcggagtcctgaagccggcggacggttttcgtacgggcggccgtgcgcgaggcgaggagagaacattgaaagtattctctaagctatttgaagagagtgactaaatgcacctgggtcaggctgtctgtgggtatgaagtggttgggagaatccaagaacatggtggtgaatggcaggagaaatggaggcaagttgtctaatgaccatcagcagaatcaatcaaaattacagcacacggggaaggacaccctgaaggctggcaaaaatgcagtcgagaggaggtcgaacagatgtaatggtaactcgggatttgaaggacagagtcgctatgtaccatcctctggaatgtccgccaaggaactctgtgaaaatgatgacctagcaaccagtttggttcttgatccctatttaggttttcaaacacacaaaatgaatactagcgcctttccttcgaggagctcaaggcatttttcaaaatctgacagtttttctcacaacaaccctgtgagatttaggcctattaaaggaaggcaggaagaactaaaggaagtaattgaacgttttaagaaagatgaacacttggagaaagccttcaaatgtttgacttcaggcgaatgggcacggcactattttctcaacaagaataaaatgcaggagaaattattcaaagaacatgtatttatttatttgcgaatgtttgcaactgacagtggatttgaaatattgccatgtaatagatactcatcagaacaaaatggagccaaaatagttgcaacaaaagagtggaaacgaaatgacaaaatagaattactggtgggttgtattgccgaactttcagaaattgaggagaacatgctacttagacatggagaaaacgacttcagtgtcatgtactccacaaggaaaaactgtgctcaactctggctgggtcctgctgcgtttataaaccatgattgcagacctaattgtaagtttgtgtcaactggtcgagatacagcatgtgtgaaggctctaagagacattgaacctggagaagaaatttcttgttattatggagatgggttctttggagaaaataatgagttctgcgagtgttacacttgcgaaagacggggcactggtgcttttaaatccagagtgggactgcctgcgcctgctcctgttatcaatagcaaatatggactcagagaaacagataaacgtttaaataggcttaaaaagttaggtgacagcagcaaaaattcagacagtcaatctgtcagctctaacactgatgcagataccactcaggaaaaaaacaatgcaaagaatcctgaagaaaagggaaggtgtttcccatgatggtgaatgtcactgccatgaattcctgaatctacctgctgctgggagtcagagtccaagcataacccgtgtagcataaaagcagcgctgtagccctattccagtctttttcgttaatgtccagagtgaacaacaagagttagtcaatcattaactgttgactgttgattctcataataaatgcagcataacgac

SEQ ID NO: 187609 - DNA, 2869 bp, Homo sapiens
  Payload ID: 16928
  Gene Symbol: SUV420H1
  Gene Name: suppressor of variegation 4-20 homolog 1 (Drosophila)
  Uniprot ID: Q4FZB7
  ENST ID: ENST00000405515
  CDS Start-End: 429-1610
ggcacagaactcgctccccgcgcgtgcccgcgtcccgcacagagccccgtggaagcgccgcggcggctgggcctggcgggaggcgcgcgcacactgtggcagctgcgccgcacggtgtccctccgccgtcgaggccgcggccttcttttcgtatccttccaccgtgcccgggcggggtccaggcggctcaccgggggcggcgacgcggcggcggtgcgggcggcagggcagcggggcgatgaggtgaggacgcccgggaaccggaggcggcaccgcgcggcgcacggacctgggacgcggagtcctgaagccggcggacggttttcgtacgggcggccgtgcgcgaggcgaggagagaacattgaaagtattctctaagctatttgaagagagtgactaaatgcacctgggtcaggctgtctgtgggtatgaagtggttgggagaatccaagaacatggtggtgaatggcaggagaaatggaggcaagttgtctaatgaccatcagcagaatcaatcaaaattacagcacacggggaaggacaccctgaaggctggcaaaaatgcagtcgagaggaggtcgaacagatgtaatggtaactcgggatttgaaggacagagtcgctatgtaccatcctctggaatgtccgccaaggaactctgtgaaaatgatgacctagcaaccagtttggttcttgatccctatttaggttttcaaacacacaaaatgaatactagcgcctttccttcgaggagctcaaggcatttttcaaaatctgacagtttttctcacaacaaccctgtgagatttaggcctattaaaggaaggcaggaagaactaaaggaagtaattgaacgttttaagaaagatgaacacttggagaaagccttcaaatgtttgacttcaggcgaatgggcacggcactattttctcaacaagaataaaatgcaggagaaattattcaaagaacatgtatttatttatttgcgaatgtttgcaactgacagtggatttgaaatattgccatgtaatagatactcatcagaacaaaatggagccaaaatagttgcaacaaaagagtggaaacgaaatgacaaaatagaattactggtgggttgtattgccgaactttcagaaattgaggagaacatgctacttagacatggagaaaacgacttcagtgtcatgtactccacaaggaaaaactgtgctcaactctggctgggtcctgctgcgtttataaaccatgattgcagacctaattgtaagtttgtgtcaactggtcgagatacagcatgtgtgaaggctctaagagacattgaacctggagaagaaatttcttgttattatggagatgggttctttggagaaaataatgagttctgcgagtgttacacttgcgaaagacggggcactggtgcttttaaatccagagtgggactgcctgcgcctgctcctgttatcaatagcaaatatggactcagagaaacagataaacgtttaaataggcttaaaaagttaggtgacagcagcaaaaattcagacagtcaatctgtcagctctaacactgatgcagataccactcaggaaaaaaacaatgcaagtaagtaagggagatttgataagcatatcttttaaaagtattttcacacaatttgctttataaagtgtgcttcagtagttttaaacttttaaatactcagagagactgggacttgtgagctttggctgcacttcaaggctctagacgtgatttgagtagaggcacagtctgtatcccatctctaacttcagtaccgtcctctagactatttttcttgaataccttggtaactggatatgagttcttcatcatatgttccaaggtcatcatatgttttaaacattttcaaggtgttagagactgtgatgatgtcgctaagtcctgcaagaagacaaaaggactgagtagaattaaattagactctatacattccagtgcctagccagtttgttagaaaagatgatggacttggggaattcatagcttctggccttaaggcttccaccttttcattgcttgctgacctttttcaaaacgaactgactcagttcagcagaccaccagtaccagactcagaattgtgatagaggagcattttgaacagtgccgtattgtgacatgctgtattggctactccagaaagtaggagtaaagatggaaaggagaaagaagcaacctctgagattccagtggtgtgtgggggcaagatctgatggaaactgaaaaagagaacgaagactaaacaaagagaaaggaaagagaagaaaccctaaatgggcaaaggaaagcacatcctgtttgcggagctttgaaatattggaaccatttctaattgctcctgtttttctgggtaacaccagttttctgtagttgccactaaagcagtagactcttgagtctcacttgtctctgagagagacagaagttagaaagttttgacttggcgattccgaaagtatgcctttgttggcacttaaatgtccagtgagacttcttggcaccttagagccctctgagatactgattattttaggttcttctccctactttcagatgttttcagcccaacactgggtgctctcttccactacagagaatcctgaagaaaagggaaggtgtttcccatgatggtgaatgtcactgccatgaattcctgaatctacctgctgctgggagtcagagtccaagcataacccgtgtagcataaaagcagcgctgtagccctattccagtctttttcgttaatgtccagagtgaacaacaagagttagtcaatcattaactgttgactgttgattctcataataaatgcagcataacgaccatt

SEQ ID NO: 187610 - DNA, 2666 bp, Homo sapiens
  Payload ID: 16928
  Gene Symbol: SUV420H1
  Gene Name: suppressor of variegation 4-20 homolog 1 (Drosophila)
  Uniprot ID: Q4FZB7
  ENST ID: ENST00000401547
  CDS Start-End: 226-1407
ttactctccatttttctctggaattatttttggtgattaattttctgggggggactgggacgcggggcccggcggcgcggccccgcatcgcagcggccgggcagcggggcctgggacgcgccccgaggaggagcggggcggcgcaggcggagagaacattgaaagtattctctaagctatttgaagagagtgactaaatgcacctgggtcaggctgtctgtgggtatgaagtggttgggagaatccaagaacatggtggtgaatggcaggagaaatggaggcaagttgtctaatgaccatcagcagaatcaatcaaaattacagcacacggggaaggacaccctgaaggctggcaaaaatgcagtcgagaggaggtcgaacagatgtaatggtaactcgggatttgaaggacagagtcgctatgtaccatcctctggaatgtccgccaaggaactctgtgaaaatgatgacctagcaaccagtttggttcttgatccctatttaggttttcaaacacacaaaatgaatactagcgcctttccttcgaggagctcaaggcatttttcaaaatctgacagtttttctcacaacaaccctgtgagatttaggcctattaaaggaaggcaggaagaactaaaggaagtaattgaacgttttaagaaagatgaacacttggagaaagccttcaaatgtttgacttcaggcgaatgggcacggcactattttctcaacaagaataaaatgcaggagaaattattcaaagaacatgtatttatttatttgcgaatgtttgcaactgacagtggatttgaaatattgccatgtaatagatactcatcagaacaaaatggagccaaaatagttgcaacaaaagagtggaaacgaaatgacaaaatagaattactggtgggttgtattgccgaactttcagaaattgaggagaacatgctacttagacatggagaaaacgacttcagtgtcatgtactccacaaggaaaaactgtgctcaactctggctgggtcctgctgcgtttataaaccatgattgcagacctaattgtaagtttgtgtcaactggtcgagatacagcatgtgtgaaggctctaagagacattgaacctggagaagaaatttcttgttattatggagatgggttctttggagaaaataatgagttctgcgagtgttacacttgcgaaagacggggcactggtgcttttaaatccagagtgggactgcctgcgcctgctcctgttatcaatagcaaatatggactcagagaaacagataaacgtttaaataggcttaaaaagttaggtgacagcagcaaaaattcagacagtcaatctgtcagctctaacactgatgcagataccactcaggaaaaaaacaatgcaagtaagtaagggagatttgataagcatatcttttaaaagtattttcacacaatttgctttataaagtgtgcttcagtagttttaaacttttaaatactcagagagactgggacttgtgagctttggctgcacttcaaggctctagacgtgatttgagtagaggcacagtctgtatcccatctctaacttcagtaccgtcctctagactatttttcttgaataccttggtaactggatatgagttcttcatcatatgttccaaggtcatcatatgttttaaacattttcaaggtgttagagactgtgatgatgtcgctaagtcctgcaagaagacaaaaggactgagtagaattaaattagactctatacattccagtgcctagccagtttgttagaaaagatgatggacttggggaattcatagcttctggccttaaggcttccaccttttcattgcttgctgacctttttcaaaacgaactgactcagttcagcagaccaccagtaccagactcagaattgtgatagaggagcattttgaacagtgccgtattgtgacatgctgtattggctactccagaaagtaggagtaaagatggaaaggagaaagaagcaacctctgagattccagtggtgtgtgggggcaagatctgatggaaactgaaaaagagaacgaagactaaacaaagagaaaggaaagagaagaaaccctaaatgggcaaaggaaagcacatcctgtttgcggagctttgaaatattggaaccatttctaattgctcctgtttttctgggtaacaccagttttctgtagttgccactaaagcagtagactcttgagtctcacttgtctctgagagagacagaagttagaaagttttgacttggcgattccgaaagtatgcctttgttggcacttaaatgtccagtgagacttcttggcaccttagagccctctgagatactgattattttaggttcttctccctactttcagatgttttcagcccaacactgggtgctctcttccactacagagaatcctgaagaaaagggaaggtgtttcccatgatggtgaatgtcactgccatgaattcctgaatctacctgctgctgggagtcagagtccaagcataacccgtgtagcataaaagcagcgctgtagccctattccagtctttttcgttaatgtccagagtgaacaacaagagttagtcaatcattaactgttgactgttgattctcataataaatgcagcataacgaccatt

SEQ ID NO: 187611 - DNA, 2475 bp, Homo sapiens
  Payload ID: 16928
  Gene Symbol: SUV420H1
  Gene Name: suppressor of variegation 4-20 homolog 1 (Drosophila)
  ENST ID: ENST00000427752
  CDS Start-End: 355-834
gggcgcggggggcgcgacggcggcggcggcggccggttgggggcggggggctcggacgctgcggggactcatttttcccgtcagcggagggagcgagcggtgctgcggcccgcgccgccatcttggattttactctccatttttctctggaattatttttggtgattaattttctgggggggactgggacgcggggcccggcggcgcggccccgcatcgcagcggccgggcagcggggcctgggacgcgccccgaggaggagcggggcggcgcaggcggagagaacattgaaagtattctctaagctatttgaagagagtgactaaatgcacctgggtcaggctgtctgtgggtatgaagtggttgggagaatccaagaacatggtggtgaatggcaggagaaatggaggcaagttgtctaatgaccatcagcagaatcaatcaaaattacagcacacggggaaggacaccctgaaggctggcaaaaatgcagtcgagaggaggtcgaacagatgtaatggtaactcgggatttgaaggacagagtcgctatgtaccatcctctggaatgtccgccaaggaactctgtgaaaatgatgacctagcaaccagtttggttcttgatccctatttaggttttcaaacacacaaaatgaatactagcgcctttccttcgaggagctcaaggcatttttcaaaatctgacagtttttctcacaacaaccctgtgagtggggagacagaaaaaccaaatagcaagaaaacctgggaagtgagtctctggaaagagtggggaacagatttaggcctattaaaggaaggcaggaagaactaaaggaagtaattgaacgttttaagaaagatgaacacttggagaaagccttcaaatgtttgacttcaggcgaatgggcacggcactattttctcaacaagaataaaatgcaggagaaattattcaaagaacatgtatttatttatttgcgaatgtttgcaactgacagtggatttgaaatattgccatgtaatagatactcatcagaacaaaatggagccaaaatagttgcaacaaaagagtggaaacgaaatgacaaaatagaattactggtgggttgtattgccgaactttcagaaattgaggagaacatgctacttagacatggagaaaacgacttcagtgtcatgtactccacaaggaaaaactgtgctcaactctggctgggtcctgctgcgtttataaaccatgattgcagacctaattgtaagtttgtgtcaactggtcgagatacagcatgtgtgaaggctctaagagacattgaacctggagaagaaatttcttgttattatggagatgggttctttggagaaaataatgagttctgcgagtgttacacttgcgaaagacggggcactggtgcttttaaatccagagtgggactgcctgcgcctgctcctgttatcaatagcaaatatggactcagagaaacagataaacgtttaaataggcttaaaaagttaggtgacagcagcaaaaattcagacagtcaatctgtcagctctaacactgatgcagataccactcaggaaaaaaacaatgcaacttctaaccgaaaatcttcagttggcgtaaaaaagaatagcaagagcagaacgttaacgaggcaatctatgtcaagaattccagcttcttccaactctacctcatctaagctaactcatataaataattccagggtaccaaagaaactgaagaagcctgcaaagcctttactttcaaagataaaattgagaaatcattgcaagcggctggagcaaaagaatgcttcaagaaaactcgaaatgggaaacttagtactgaaagagcctaaagtagttctgtataaaaatttgcccattaaaaaagataaggagccagagggaccagcccaagccgcagttgccagcgggtgcttgactagacacgcggcgagagaacacagacagaatcctgtgagaggtgctcattcgcagggggagagctcgccctgcacctacataactcggcggtcagtgaggacaagaacaaatctgaaggaggcctctgacatcaagcttgaaccaaatacgttgaatggctataaaagcagtgtgacggaaccttgccccgacagtggtgaacagctgcagccagctcctgtgctgcaggaggaagaactggctcatgagactgcacaaaaaggggaggcaaagtgtcataagagtgacacaggcatgtccaaaaagaagtcacgacaaggaaaacttgtgaaacagtttgcaaaaatagaggaatctactccagtgcacgattctcctggaaaagacgacgcggtaccagatttgatgggtccccattctgaccagggtgagcacagtggcactgtgggcgtgcctgtgagctacacagactgtgctccttcacccgtcggttgttcagttgtgacatcagatagcttcaaaa

SEQ ID NO: 187612 - DNA, 585 bp, Homo sapiens
  Payload ID: 16928
  Gene Symbol: SUV420H1
  Gene Name: suppressor of variegation 4-20 homolog 1 (Drosophila)
  ENST ID: ENST00000434573
  CDS Start-End: 232-585
tttttgtttttgttttggcccgagcgcatttcggagccctcccgagctcgtcctgcagcccaccctcctccccgacggcgcccctggccgtggcccggcgaccccgcggccgctgcgtcccctttgtgctttatccgctctccctgcgtcccctggagagaacattgaaagtattctctaagctatttgaagagagtgactaaatgcacctgggtcaggctgtctgtgggtatgaagtggttgggagaatccaagaacatggtggtgaatggcaggagaaatggaggcaagttgtctaatgaccatcagcagaatcaatcaaaattacagcacacggggaaggacaccctgaaggctggcaaaaatgcagtcgagaggaggtcgaacagatgtaatggtaactcgggatttgaaggacagagtcgctatgtaccatcctctggaatgtccgccaaggaactctgtgaaaatgatgacctagcaaccagtttggttcttgatccctatttaggttttcaaacacacaaaatgaatactagcgcctttccttcgaggagctcaaggcatttttcaaaatctgacagt

SEQ ID NO: 187613 - DNA, 556 bp, Homo sapiens
  Payload ID: 16928
  Gene Symbol: SUV420H1
  Gene Name: suppressor of variegation 4-20 homolog 1 (Drosophila)
  ENST ID: ENST00000458496
  CDS Start-End: 256-556
gtatccttccaccgtgcccgggcggggtccaggcggctcaccgggggcggcgacgcggcggcggtgcgggcggcagggcagcggggcgatgaggtgaggacgcccgggaaccggaggcggcaccgcgcggcgcacggacctgggacgcggagtcctgaagccggcggacggttttcgtacgggcggccgtgcgcgaggcgaggtaatggtaactcgggatttgaaggacagagtcgctatgtaccatcctctggaatgtccgccaaggaactctgtgaaaatgatgacctagcaaccagtttggttcttgatccctatttaggttttcaaacacacaaaatgaatactagcgcctttccttcgaggagctcaaggcatttttcaaaatctgacagtttttctcacaacaaccctgtgagatttaggcctattaaaggaaggcaggaagaactaaaggaagtaattgaacgttttaagaaagatgaacacttggagaaagccttcaaatgtttgacttcaggcgaatgggcacggcactattttctcaacaagaata

SEQ ID NO: 187614 - DNA, 594 bp, Homo sapiens
  Payload ID: 16928
  Gene Symbol: SUV420H1
  Gene Name: suppressor of variegation 4-20 homolog 1 (Drosophila)
  ENST ID: ENST00000453170
  CDS Start-End: 234-594
ggtgctgcggcccgcgccgccatcttggattttactctccatttttctctggaattatttttggtgattaattttctgggggggactgggacgcggggcccggcggcgcggccccgcatcgcagcggccgggcagcggggcctgggacgcgccccgaggaggagcggggcggcgcaggcggtaatggtaactcgggatttgaaggacagagtcgctatgtaccatcctctggaatgtccgccaaggaactctgtgaaaatgatgacctagcaaccagtttggttcttgatccctatttaggttttcaaacacacaaaatgaatactagcgcctttccttcgaggagctcaaggcatttttcaaaatctgacagtttttctcacaacaaccctgtgagatttaggcctattaaaggaaggcaggaagaactaaaggaagtaattgaacgttttaagaaagatgaacacttggagaaagccttcaaatgtttgacttcaggcgaatgggcacggcactattttctcaacaagaataaaatgcaggagaaattattcaaagaacatgtatttatttatttgcgaatgtttgcaactg

SEQ ID NO: 187615 - DNA, 2816 bp, Homo sapiens
  Payload ID: 16928
  Gene Symbol: SUV420H1
  Gene Name: suppressor of variegation 4-20 homolog 1 (Drosophila)
  ENST ID: ENST00000441488
  CDS Start-End: 6-842
tgggtatgaagtggttgggagaatccaagaacatggtggtgaatggcaggagaaatggaggcaagttgtctaatgaccatcagcagaatcaatcaaaattacagcacacggggaaggacaccctgaaggctggcaaaaatgcagtcgagaggaggtcgaacagatgtaatggtaactcgggatttgaaggacagagtcgctatgtaccatcctctggaatgtccgccaaggaactctgtgaaaatgatgacctagcaaccagtttggttcttgatccctatttaggttttcaaacacacaaaatgaatactagcgcctttccttcgaggagctcaaggcatttttcaaaatctgacagtttttctcacaacaaccctgtgagatttaggcctattaaaggaaggcaggaagaactaaaggaagtaattgaacgttttaagaaagatgaacacttggagaaagccttcaaatgtttgacttcaggcgaatgggcacggcactattttctcaacaagaataaaatgcaggagaaattattcaaagaacatgtatttatttatttgcgaatgtttgcaactgacagtggatttgaaatattgccatgtaatagatactcatcagaacaaaatggagccaaaatagttgcaacaaaagagtggaaacgaaatgacaaaatagaattactggtgggttgtattgccgaactttcagaaattgaggagaacatgctacttagacatggagaaaacgacttcagtgtcatgtactccacaaggaaaaactgtgctcaactctggctgggtcctgctgcgtttataaaccatgatcttatcaacagttaattgactttatcttttggacatttttcagattgcagacctaattgtaagtttgtgtcaactggtcgagatacagcatgtgtgaaggctctaagagacattgaacctggagaagaaatttcttgttattatggagatgggttctttggagaaaataatgagttctgcgagtgttacacttgcgaaagacggggcactggtgcttttaaatccagagtgggactgcctgcgcctgctcctgttatcaatagcaaatatggactcagagaaacagataaacgtttaaataggcttaaaaagttaggtgacagcagcaaaaattcagacagtcaatctgtcagctctaacactgatgcagataccactcaggaaaaaaacaatgcaacttctaaccgaaaatcttcagttggcgtaaaaaagaatagcaagagcagaacgttaacgaggcaatctatgtcaagaattccagcttcttccaactctacctcatctaagctaactcatataaataattccagggtaccaaagaaactgaagaagcctgcaaagcctttactttcaaagataaaattgagaaatcattgcaagcggctggagcaaaagaatgcttcaagaaaactcgaaatgggaaacttagtactgaaagagcctaaagtagttctgtataaaaatttgcccattaaaaaagataaggagccagagggaccagcccaagccgcagttgccagcgggtgcttgactagacacgcggcgagagaacacagacagaatcctgtgagaggtgctcattcgcagggggagagctcgccctgcacctacataactcggcggtcagtgaggacaagaacaaatctgaaggaggcctctgacatcaagcttgaaccaaatacgttgaatggctataaaagcagtgtgacggaaccttgccccgacagtggtgaacagctgcagccagctcctgtgctgcaggaggaagaactggctcatgagactgcacaaaaaggggaggcaaagtgtcataagagtgacacaggcatgtccaaaaagaagtcacgacaaggaaaacttgtgaaacagtttgcaaaaatagaggaatctactccagtgcacgattctcctggaaaagacgacgcggtaccagatttgatgggtccccattctgaccagggtgagcacagtggcactgtgggcgtgcctgtgagctacacagactgtgctccttcacccgtcggttgttcagttgtgacatcagatagcttcaaaacaaaagacagctttagaactgcaaaaagtaaaaagaagaggcgaatcacaaggtatgatgcacagttaatcctagaaaataactctgggattcccaaattgactcttcgtaggcgtcatgatagcagcagcaaaacaaatgaccaagagaatgatggaatgaactcttccaaaataagcatcaagttaagcaaagaccatgacaacgataacaatctctatgtagcaaagcttaataatggatttaactcaggatcaggcagtagttctacaaaattaaaaatccagctaaaacgagatgaggaaaatagggggtcttatacagaggggcttcatgaaaatggggtgtgctgcagtgatcctctttctctcttggagtctcgaatggaggtggatgactatagtcagtatgaggaagaaagtacagatgattcctcctcttctgagggcgatgaagaggaggatgactatgatgatgactttgaagacgattttattcctcttcctccagctaagcgcttgaggttaatagttggaaaagactctatagatattgacatttcttcaaggagaagagaagatcagtctttaaggcttaatgcctaagctcttggtcttaacttgacctgggataactactttaaagaaataaaaaattccagtcaattattcctcaactgaaagtttagtggcagcacttctattgtcccttca

SEQ ID NO: 187616 - DNA, 4306 bp, Homo sapiens
  Payload ID: 16928
  Gene Symbol: SUV420H1
  Gene Name: suppressor of variegation 4-20 homolog 1 (Drosophila)
  Uniprot ID: Q4FZB7
  ENST ID: ENST00000615954
  CDS Start-End: 1-2658
atgaagtggttgggagaatccaagaacatggtggtgaatggcaggagaaatggaggcaagttgtctaatgaccatcagcagaatcaatcaaaattacagcacacggggaaggacaccctgaaggctggcaaaaatgcagtcgagaggaggtcgaacagatgtaatggtaactcgggatttgaaggacagagtcgctatgtaccatcctctggaatgtccgccaaggaactctgtgaaaatgatgacctagcaaccagtttggttcttgatccctatttaggttttcaaacacacaaaatgaatactagcgcctttccttcgaggagctcaaggcatttttcaaaatctgacagtttttctcacaacaaccctgtgagatttaggcctattaaaggaaggcaggaagaactaaaggaagtaattgaacgttttaagaaagatgaacacttggagaaagccttcaaatgtttgacttcaggcgaatgggcacggcactattttctcaacaagaataaaatgcaggagaaattattcaaagaacatgtatttatttatttgcgaatgtttgcaactgacagtggatttgaaatattgccatgtaatagatactcatcagaacaaaatggagccaaaatagttgcaacaaaagagtggaaacgaaatgacaaaatagaattactggtgggttgtattgccgaactttcagaaattgaggagaacatgctacttagacatggagaaaacgacttcagtgtcatgtactccacaaggaaaaactgtgctcaactctggctgggtcctgctgcgtttataaaccatgattgcagacctaattgtaagtttgtgtcaactggtcgagatacagcatgtgtgaaggctctaagagacattgaacctggagaagaaatttcttgttattatggagatgggttctttggagaaaataatgagttctgcgagtgttacacttgcgaaagacggggcactggtgcttttaaatccagagtgggactgcctgcgcctgctcctgttatcaatagcaaatatggactcagagaaacagataaacgtttaaataggcttaaaaagttaggtgacagcagcaaaaattcagacagtcaatctgtcagctctaacactgatgcagataccactcaggaaaaaaacaatgcaacttctaaccgaaaatcttcagttggcgtaaaaaagaatagcaagagcagaacgttaacgaggcaatctatgtcaagaattccagcttcttccaactctacctcatctaagctaactcatataaataattccagggtaccaaagaaactgaagaagcctgcaaagcctttactttcaaagataaaattgagaaatcattgcaagcggctggagcaaaagaatgcttcaagaaaactcgaaatgggaaacttagtactgaaagagcctaaagtagttctgtataaaaatttgcccattaaaaaagataaggagccagagggaccagcccaagccgcagttgccagcgggtgcttgactagacacgcggcgagagaacacagacagaatcctgtgagaggtgctcattcgcagggggagagctcgccctgcacctacataactcggcggtcagtgaggacaagaacaaatctgaaggaggcctctgacatcaagcttgaaccaaatacgttgaatggctataaaagcagtgtgacggaaccttgccccgacagtggtgaacagctgcagccagctcctgtgctgcaggaggaagaactggctcatgagactgcacaaaaaggggaggcaaagtgtcataagagtgacacaggcatgtccaaaaagaagtcacgacaaggaaaacttgtgaaacagtttgcaaaaatagaggaatctactccagtgcacgattctcctggaaaagacgacgcggtaccagatttgatgggtccccattctgaccagggtgagcacagtggcactgtgggcgtgcctgtgagctacacagactgtgctccttcacccgtcggttgttcagttgtgacatcagatagcttcaaaacaaaagacagctttagaactgcaaaaagtaaaaagaagaggcgaatcacaaggtatgatgcacagttaatcctagaaaataactctgggattcccaaattgactcttcgtaggcgtcatgatagcagcagcaaaacaaatgaccaagagaatgatggaatgaactcttccaaaataagcatcaagttaagcaaagaccatgacaacgataacaatctctatgtagcaaagcttaataatggatttaactcaggatcaggcagtagttctacaaaattaaaaatccagctaaaacgagatgaggaaaatagggggtcttatacagaggggcttcatgaaaatggggtgtgctgcagtgatcctctttctctcttggagtctcgaatggaggtggatgactatagtcagtatgaggaagaaagtacagatgattcctcctcttctgagggcgatgaagaggaggatgactatgatgatgactttgaagacgattttattcctcttcctccagctaagcgcttgaggttaatagttggaaaagactctatagatattgacatttcttcaaggagaagagaagatcagtctttaaggcttaatgcctaagctcttggtcttaacttgacctgggataactactttaaagaaataaaaaattccagtcaattattcctcaactgaaagtttagtggcagcacttctattgtcccttcacttatcagcatactattgtagaaagtgtacagcatactgactcaattcttaagtctgatttgtgcaaatttttatcgtactttttaaatagccttcttacgtgcaattctgagttagaggtaaagccctgttgtaaaataaaggctcaagcaaaattgtacagtgatagcaactttccacacaggacgttgaaaacagtaatgtggctacacagtttttttaactgtaagagcatcagctggctctttaatatatgactaaacaataatttaaaacaaatcatagtagcagcatattaagggtttctagtatgctaatatcaccagcaatgatctttggctttttgatttatttgctagatgtttcccccttggagttttgtcagtttcacactgtttgctggcccaggtgtactgtttgtggcctttgttaatatcgcaaaccattggttgggagtcagattggtttcttaaaaaaaaaaaaaaaatgacatacgtgacagctcacttttcagttcattatatgtacgagggtagcagtgtgtgggatgaggttcgatacagcgtatttattgcttgtcatgtaaattaaaaaccttgtatttaactcttttcaatccttttagataaaattgttctttgcaagaatgattggtgcttattttttcaaaaatttgctgtgaacaacgtgatgacaacaagcaacatttatctaatgaactacagctatcttaatttggttcttcaagttttctgttgcacttgtaaaatgctacaaggaatattaaaaaaatctattcactttaacttataatagtttatgaaataaaaacatgagtcacagcttttgttctgtggtaacctataaaaaaagtttgtctttgagattcaatgtaaagaactgaaaacaatgtatatgttgtaaatatttgtgtgttgtgagaaatttttgtcataagaaattaaaagaacttaccaggaaggtttttaagtttagaaatattcatgccaataaaataggaaattataaatatatagttttaagcactgcatcagtgggagttcttggcttatgttagtttatgttagtttattatgaaaacatcaaagatttttttgactatattatcagttaaacaaaaaggagtcagatttaatttgttttttgaagcactttgagaaattaattttaattaacttaatgagcaaatttttattactactttatgttcaataccaggttcttttcatttctctggattattttgcaaatcattggacagagaatttgggaatataaatctgtaacaggtgtttgacaccagtaggtctctttatttctgggaaatgtgtacctgtactttctgatatacagtgttcctaagtaaaaatcaattcaggggatttgtatagtgtctataggaaagtagcccatgtcttgaaatatgaaaaggaatctgaaggtcatgaaaagtccagtggagaaaatctcaatgcttactgttactactaattgattcctactagtttccaggtttggg

SEQ ID NO: 187617 - DNA, 2308 bp, Homo sapiens
  Payload ID: 16929
  Gene Symbol: SUV420H2
  Gene Name: suppressor of variegation 4-20 homolog 2 (Drosophila)
  Uniprot ID: Q86Y97
  ENST ID: ENST00000255613
  CDS Start-End: 249-1637
gagcagatgggaggtgcggcgacagtgtttgacgagagccgaaggaggctgtgggaggtgttggcggcggcggcgcgggcgcctgaggaggaggaggagaagcggatgagatcgtggggctcaccagcgtcccccatggcttctgagtagcgtgggagtggagtcagcaccaagccaggctccccgcgcctgccttgccctcacctgctcctgctctctgccagaggcagcatggtccgcagggcaccatggggcccgacagagtgacagcacgagaactgtgcgagaacgacgacctggccaccagcctcgtcctggacccctacctcggtttccgcacccataagatgaacgtcagccctgtgccccccctgcggcgacagcagcacctgcgctcagcgctggaaactttcctgaggcagcgggacctggaggctgcgtaccgggccctgacgctgggaggctggacggcccgctacttccagagccggggcccgcggcaggaggctgccctcaagacccacgtctatcgctacctccgtgccttcctgccggaaagtggctttaccatcctgccctgcacgcgctactccatggagaccaacggggccaagatcgtgtccactcgtgcttggaaaaagaatgagaagctggagctgctggtgggctgcattgcagagctgcgggaggcagatgaggggctgctgagggccggtgagaatgacttcagcatcatgtactcaacccgcaagcggagtgctcagctgtggctgggcccagccgccttcatcaaccatgactgcaaacccaactgcaagtttgtgcctgcagatgggaacgcagcctgcgtgaaggtgctccgggacattgagcctggggacgaggtgacatgcttctacggcgagggcttcttcggcgagaagaatgagcactgtgaatgccacacctgtgagaggaaaggtgaaggagctttccgaaccaggcctagggagcccgcgttgccaccacggcccctggacaagtaccagctgcgtgagaccaagcggcggctgcagcaaggcctggacagtggcagccgacagggcctgctgggccctcgggcctgcgtgcacccatccccgctgcgccgggacccattctgcgccgcctgccagcccctgcgcctgccagcctgcagcgcccgcccagacacctcacccctctggctccagtggctgcctcagccccagccccgagtgcggccccggaagcgccgacgcccccggccccggagggccccagtgctctccacccaccacgctgcccgcgtctccctgcaccgatggggaggctgtggcccccactgccgcctgcgaggagaggccctggtggccctgggccagcccccccacgcccgctgggcccctcagcaggactggcactgggcccggcgctatgggctgccttacgtggtgcgtgtggaccttcgtcgcctggccccagccccaccagctaccccagcccctgctgggaccccaggccccatcctgatcccgaagcaggccctcgccttcgcccccttctccccacccaagcgcctacggctggtggtcagccacggctccatcgacctggatgtcggcggtgaagagctgtgacaggccggacggggaggcccagcagggagagagggtctctctcctagctgctacccaggacctccagaaggagcccttggacctctgggagggagctgacccttgactccagcatagctctgaccctggaatggggttggtttggacacccccagggatctgagccctgaccctttgtgactgctgacccctgagccacccccactcccacagggagccccggccatttgctgccctccccacccctgccccagcctcaggactgcaggagccatccgcccccctcagccccttcctccccagggagcaaagccataaggggcaggggccaccccacggcatctccccagaagtacaggcctcaggaggaggtggaactgatgtagggggtggcactccccagagactgccctcacgaggggactgggttcgctctcagctctgcagctgtctgcggtggggggaaggttggggggtgtctggaggcatgttcccctcaccaccccccgtgggtctcagggaggccgggtgtgacctcatctttctcatggtgctatcctggtgctattggggtggggagctccctcccctcccccacaccagaaaggggtatgttgggggcttggaagcacttgaactttttattttattaaaaccttgttataagcagc

SEQ ID NO: 187618 - DNA, 2077 bp, Homo sapiens
  Payload ID: 16929
  Gene Symbol: SUV420H2
  Gene Name: suppressor of variegation 4-20 homolog 2 (Drosophila)
  Uniprot ID: Q86Y97
  ENST ID: ENST00000445196
  CDS Start-End: 184-477
ggcggcggcgcgggcgcctgaggaggaggaggagaagcggatgagatcgtggggctcaccagcgtcccccatggcttctgagtagcgtgggagtggagtcagcaccaagccaggctccccgcgcctgccttgccctcacctgctcctgctctctgccagaggcagcatggtccgcagggcaccatggggcccgacagagtgacagcacgagaactgtgcgagaacgacgacctggccaccagcctcgtcctggacccctacctcggtttccgcacccataagatgaacgtcaggtctatcgctacctccgtgccttcctgccggaaagtggctttaccatcctgccctgcacgcgctactccatggagaccaacggggccaagatcgtgtccactcgtgcttggaaaaagaatgagaagctggagctgctggtgggctgcattgcagagctgcgggaggcagatgaggggctgctgagggccggtgagaatgacttcagcatcatgtactcaacccgcaagcggagtgctcagctgtggctgggcccagccgccttcatcaaccatgactgcaaacccaactgcaagtttgtgcctgcagatgggaacgcagcctgcgtgaaggtgctccgggacattgagcctggggacgaggtgacatgcttctacggcgagggcttcttcggcgagaagaatgagcactgtgaatgccacacctgtgagaggaaaggtgaaggagctttccgaaccaggcctagggagcccgcgttgccaccacggcccctggacaagtaccagctgcgtgagaccaagcggcggctgcagcaaggcctggacagtggcagccgacagggcctgctgggccctcgggcctgcgtgcacccatccccgctgcgccgggacccattctgcgccgcctgccagcccctgcgcctgccagcctgcagcgcccgcccagacacctcacccctctggctccagtggctgcctcagccccagccccgagtgcggccccggaagcgccgacgcccccggccccggagggccccagtgctctccacccaccacgctgcccgcgtctccctgcaccgatggggaggctgtggcccccactgccgcctgcgaggagaggccctggtggccctgggccagcccccccacgcccgctgggcccctcagcaggactggcactgggcccggcgctatgggctgccttacgtggtgcgtgtggaccttcgtcgcctggccccagccccaccagctaccccagcccctgctgggaccccaggccccatcctgatcccgaagcaggccctcgccttcgcccccttctccccacccaagcgcctacggctggtggtcagccacggctccatcgacctggatgtcggcggtgaagagctgtgacaggccggacggggaggcccagcagggagagagggtctctctcctagctgctacccaggacctccagaaggagcccttggacctctgggagggagctgacccttgactccagcatagctctgaccctggaatggggttggtttggacacccccagggatctgagccctgaccctttgtgactgctgacccctgagccacccccactcccacagggagccccggccatttgctgccctccccacccctgccccagcctcaggactgcaggagccatccgcccccctcagccccttcctccccagggagcaaagccataaggggcaggggccaccccacggcatctccccagaagtacaggcctcaggaggaggtggaactgatgtagggggtggcactccccagagactgccctcacgaggggactgggttcgctctcagctctgcagctgtctgcggtggggggaaggttggggggtgtctggaggcatgttcccctcaccaccccccgtgggtctcagggaggccgggtgtgacctcatctttctcatggtgctatcctggtgctattggggtggggagctccctcccctcccccacaccagaaaggggtatgttgggggcttggaagcacttgaactttttattttattaaaaccttgttataagcagc

SEQ ID NO: 187619 - DNA, 869 bp, Homo sapiens
  Payload ID: 16929
  Gene Symbol: SUV420H2
  Gene Name: suppressor of variegation 4-20 homolog 2 (Drosophila)
  Uniprot ID: Q86Y97
  ENST ID: ENST00000592631
  CDS Start-End: 97-390
tgggagtggagtcagcaccaagccaggctccccgcgcctgccttgccctcacctgctcctgctctctgccagaggcagcatggtccgcagggcaccatggggcccgacagagtgacagcacgagaactgtgcgagaacgacgacctggccaccagcctcgtcctggacccctacctcggtttccgcacccataagatgaacgtcaggtctatcgctacctccgtgccttcctgccggaaagtggctttaccatcctgccctgcacgcgctactccatggagaccaacggggccaagatcgtgtccactcgtgcttggaaaaagaatgagaagctggagctgctggtgggctgcattgcagagctgcgggaggcagatgaggggctgctgagggccggtgagaatgacttcagcatcatgtactcaacccgcaagcggagtgctcagctgtggctgggcccagccgccttcatcaaccatgactgcaaacccaactgcaagtttgtgcctgcagatgggaacgcagcctgcgtgaaggtgctccgggacattgagcctggggacgaggtgacatgcttctacggcgagggcttcttcggcgagaagaatgagcactgtgaatgccacacctgtgagaggaaaggtgaaggagctttccgaaccaggcctagggagcccgcgttgccaccacggcccctggacaagtaccagctgcgtgagaccaagcggcggctgcagcaaggcctggacagtggcagccgacagggcctgctgggccctcgggcctgcgtgcacccatccccgctgcgccgggacccattctgcggtgagcacccctccctgccatcccagcagcccctcccctgtctg

SEQ ID NO: 187620 - DNA, 2037 bp, Homo sapiens
  Payload ID: 16929
  Gene Symbol: SUV420H2
  Gene Name: suppressor of variegation 4-20 homolog 2 (Drosophila)
  ENST ID: ENST00000630497
  CDS Start-End: 323-1366
atgagatcgtggggctcaccagcgtcccccatggcttctgagtagcgtgggagtggagtcagcaccaagccaggctccccgcgcctgccttgccctcacctgctcctgctctctgccagaggcagcatggtccgcagggcaccatggggcccgacagagtgacagcacgagaactgtgcgagaacgacgacctggccaccagcctcgtcctggacccctacctcggtttccgcacccataagatgaacgtcaggtctatcgctacctccgtgccttcctgccggaaagtggctttaccatcctgccctgcacgcgctactccatggagaccaacggggccaagatcgtgtccactcgtgcttggaaaaagaatgagaagctggagctgctggtgggctgcattgcagagctgcgggaggcagatgaggggctgctgagggccggtgagaatgacttcagcatcatgtactcaacccgcaagcggagtgctcagctgtggctgggcccagccgccttcatcaaccatgactgcaaacccaactgcaagtttgtgcctgcagatgggaacgcagcctgcgtgaaggtgctccgggacattgagcctggggacgaggtgacatgcttctacggcgagggcttcttcggcgagaagaatgagcactgtgaatgccacacctgtgagaggaaaggtgaaggagctttccgaaccaggcctagggagcccgcgttgccaccacggcccctggacaagtaccagctgcgtgagaccaagcggcggctgcagcaaggcctggacagtggcagccgacagggcctgctgggccctcgggcctgcgtgcacccatccccgctgcgccgggacccattctgcgccgcctgccagcccctgcgcctgccagcctgcagcgcccgcccagacacctcacccctctggctccagtggctgcctcagccccagccccgagtgcggccccggaagcgccgacgcccccggccccggagggccccagtgctctccacccaccacgctgcccgcgtctccctgcaccgatggggaggctgtggcccccactgccgcctgcgaggagaggccctggtggccctgggccagcccccccacgcccgctgggcccctcagcaggactggcactgggcccggcgctatgggctgccttacgtggtgcgtgtggaccttcgtcgcctggccccagccccaccagctaccccagcccctgctgggaccccaggccccatcctgatcccgaagcaggccctcgccttcgcccccttctccccacccaagcgcctacggctggtggtcagccacggctccatcgacctggatgtcggcggtgaagagctgtgacaggccggacggggaggcccagcagggagagagggtctctctcctagctgctacccaggacctccagaaggagcccttggacctctgggagggagctgacccttgactccagcatagctctgaccctggaatggggttggtttggacacccccagggatctgagccctgaccctttgtgactgctgacccctgagccacccccactcccacagggagccccggccatttgctgccctccccacccctgccccagcctcaggactgcaggagccatccgcccccctcagccccttcctccccagggagcaaagccataaggggcaggggccaccccacggcatctccccagaagtacaggcctcaggaggaggtggaactgatgtagggggtggcactccccagagactgccctcacgaggggactgggttcgctctcagctctgcagctgtctgcggtggggggaaggttggggggtgtctggaggcatgttcccctcaccaccccccgtgggtctcagggaggccgggtgtgacctcatctttctcatggtgctatcctggtgctattggggtggggagctccctcccctcccccacaccagaaaggggtatgttgggggcttggaagcacttgaactttttattttattaaaaccttgttataagcagc

SEQ ID NO: 187621 - DNA, 957 bp, Homo sapiens
  Payload ID: 16930
  Gene Symbol: SBSN
  Gene Name: suprabasin
  Uniprot ID: Q6UWP8
  ENST ID: ENST00000518157
  CDS Start-End: 71-814
gggagagaggataaatagcagcgtggcttccctggctcctctctgcatccttcccgaccttcccagcaatatgcatcttgcacgtctggtcggctcctgctccctccttctgctactgggggccctgtctggatgggcggccagcgatgaccccattgagaaggtcattgaagggatcaaccgagggctgagcaatgcagagagagaggtgggcaaggccctggatggcatcaacagtggaatcacgcatgccggaagggaagtggagaaggttttcaacggacttagcaacatggggagccacaccggcaaggagttggacaaaggcgtccaggggctcaaccacggcatggacaaggttgcccatgagatcaaccatggtattggacaagcaggaaaggaagcagagaagcttggccatggggtcaacaacgctgctggacaggccgggaaggaagcagacaaagcggtccaagggttccacactggggtccaccaggctgggaaggaagcagagaaacttggccaaggggtcaaccatgctgctgaccaggctggaaaggaagtggagaagcttggccaaggtgcccaccatgctgctggccaggccgggaaggagctgcagaatgctcataatggggtcaaccaagccagcaaggaggccaaccagctgctgaatggcaaccatcaaagcggatcttccagccatcaaggaggggccacaaccacgccgttagcctctggggcctcggtcaacacgcctttcatcaaccttcccgccctgtggaggagcgtcgccaacatcatgccctaaactggcatccggccttgctgggagaataatgtcgccgttgtcacatcagctgacatgacctggaggggttgggggtgggggacaggtttctgaaatccctgaagggggttgtactgggatttgtgaataaacttgatacacta

SEQ ID NO: 187622 - DNA, 1945 bp, Homo sapiens
  Payload ID: 16930
  Gene Symbol: SBSN
  Gene Name: suprabasin
  Uniprot ID: Q6UWP8
  ENST ID: ENST00000452271
  CDS Start-End: 30-1802
tctgcatccttcccgaccttcccagcaatatgcatcttgcacgtctggtcggctcctgctccctccttctgctactgggggccctgtctggatgggcggccagcgatgaccccattgagaaggtcattgaagggatcaaccgagggctgagcaatgcagagagagaggtgggcaaggccctggatggcatcaacagtggaatcacgcatgccggaagggaagtggagaaggttttcaacggacttagcaacatggggagccacaccggcaaggagttggacaaaggcgtccaggggctcaaccacggcatggacaaggttgcccatgagatcaaccatggtattggacaagcaggaaaggaagcagagaagcttggccatggggtcaacaacgctgctggacaggttgggaaggaggcagacaaactgatccatcatggggtccatcacggggccaaccaggcgggaagtgaggcagggaagtttggccagggagtcgacaatgctgcagggcaggctggaaatgaggctgggaggtttggccagggagtccaccatgctgcagggcaggccggaaatgaggctgggaggtttggccagggagtccaccatgctgcagggcaggccggaaatgaggctgggagatttggccagggggcccaccatggtctcagtgagggctggaaggagacagagaagtttggccaggggatccaccatgctgccggtcaggttgggaaggaggcagagaagtttggccagggggcccaccatgctgcggggcaggccggaaatgaggcagggagatttggccagggggtccaccatggtctcagtgagggctggaaggagacagagaagtttggccagggggtccaccatactgctggtcaggttgggaaggaggcagagaagtttggccagggggcccaccatgctgcggggcaggccggaaatgaggcagggagatttggccagggggcccaccatgctgcggggcaggccggaaatgaggctgggaggtttggccagggggtccaccatggtctcagtgagggctggaaggagacagagaagtttggccagggggtccaccatgctgccagtcagtttgggaaggaaacagagaagctcggccatggggtccaccatggggttaatgaggcctggaaggaagcagagaagtttggccagggtgtccaccatgctgcctcgcaggtggggaaggaggaagacagagtggtccaaggcctccatcatggcgttagtcaggctggaagggaggcggggcagtttggccacgacattcaccacacagcagggcaggctgggaaagagggagacatagcagttcatggtgtccaacctggggtccacgaggccgggaaggaggcagggcagtttggccagggagttcaccatacccttgaacaggccgggaaggaagcagacaaagcggtccaagggttccacactggggtccaccaggctgggaaggaagcagagaaacttggccaaggggtcaaccatgctgctgaccaggctggaaaggaagtggagaagcttggccaaggtgcccaccatgctgctggccaggccgggaaggagctgcagaatgctcataatggggtcaaccaagccagcaaggaggccaaccagctgctgaatggcaaccatcaaagcggatcttccagccatcaaggaggggccacaaccacgccgttagcctctggggcctcggtcaacacgcctttcatcaaccttcccgccctgtggaggagcgtcgccaacatcatgccctaaactggcatccggccttgctgggagaataatgtcgccgttgtcacatcagctgacatgacctggaggggttgggggtgggggacaggtttctgaaatccctgaagggggttgtactgggatttgtgaataaacttgatacacta

SEQ ID NO: 187623 - DNA, 593 bp, Homo sapiens
  Payload ID: 16930
  Gene Symbol: SBSN
  Gene Name: suprabasin
  ENST ID: ENST00000588674
  CDS Start-End: 1-450
ggatgggcggccagcgatgaccccattgagaaggtcattgaagggatcaaccgagggctgagcaatgcagagagagaggtgggcaaggccctggatggcatcaacagtggaatcacgcatgccggaagggaagtggagaaggttttcaacggacttagcaacatggggagccacaccggcaaggagttggacaaaggcgtccaggggctcaaccacggcatggacaaggttgcccatgagatcaaccatggtattggacaagcaggaaaggaagcagagaagcttggccatggggtcaacaacgctgctggacagggcaaccatcaaagcggatcttccagccatcaaggaggggccacaaccacgccgttagcctctggggcctcggtcaacacgcctttcatcaaccttcccgccctgtggaggagcgtcgccaacatcatgccctaaactggcatccggccttgctgggagaataatgtcgccgttgtcacatcagctgacatgacctggaggggttgggggtgggggacaggtttctgaaatccctgaagggggttgtactgggatttgtgaataaacttgatacacta

SEQ ID NO: 187624 - DNA, 451 bp, Homo sapiens
  Payload ID: 16931
  Gene Symbol: SFTA2
  Gene Name: surfactant associated 2
  Uniprot ID: Q6UW10
  ENST ID: ENST00000359086
  CDS Start-End: 80-316
ggggtgtagaaacaggcctgttaaggagaggccaccgggacttcagtgtctcctccatcccaggagcgcagtggccactatggggtctgggctgccccttgtcctcctcttgaccctccttggcagctcacatggaacagggccgggtatgactttgcaactgaagctgaaggagtcttttctgacaaattcctcctatgagtccagcttcctggaattgcttgaaaagctctgcctcctcctccatctcccttcagggaccagcgtcaccctccaccatgcaagatctcaacaccatgttgtctgcaacacatgacagccattgaagcctgtgtccttcttggcccgggcttttgggccggggatgcaggaggcaggccccgaccctgtctttcagcaggcccccaccctcctgagcggcaataaataaaattcggtatgctgaattcaa

SEQ ID NO: 187625 - DNA, 451 bp, Homo sapiens
  Payload ID: 16931
  Gene Symbol: SFTA2
  Gene Name: surfactant associated 2
  Uniprot ID: Q6UW10
  ENST ID: ENST00000383539
  CDS Start-End: 80-316
ggggtgtagaaacaggcctgttaaggagaggccaccgggacttcagtgtctcctccatcccaggagcgcagtggccactatggggtctgggctgccccttgtcctcctcttgaccctccttggcagctcacatggaacagggccgggtatgactttgcaactgaagctgaaggagtcttttctgacaaattcctcctatgagtccagcttcctggaattgcttgaaaagctctgcctcctcctccatctcccttcagggaccagcgtcaccctccaccatgcaagatctcaacaccatgttgtctgcaacacatgacagccattgaagcctgtgtccttcttggcccgggcttttgggccggggatgcaggaggcaggccccgaccctgtctttcagcaggcccccaccctcctgagtggcaataaataaaattcggtatgctgaattcaa

SEQ ID NO: 187626 - DNA, 451 bp, Homo sapiens; identical to SEQ ID NO: 187624
  Payload ID: 16931
  Gene Symbol: SFTA2
  Gene Name: surfactant associated 2
  Uniprot ID: Q6UW10
  ENST ID: ENST00000429290
  CDS Start-End: 80-316

SEQ ID NO: 187627 - DNA, 451 bp, Homo sapiens; identical to SEQ ID NO: 187625
  Payload ID: 16931
  Gene Symbol: SFTA2
  Gene Name: surfactant associated 2
  Uniprot ID: Q6UW10
  ENST ID: ENST00000454649
  CDS Start-End: 80-316

SEQ ID NO: 187628 - DNA, 451 bp, Homo sapiens
  Payload ID: 16931
  Gene Symbol: SFTA2
  Gene Name: surfactant associated 2
  Uniprot ID: Q6UW10
  ENST ID: ENST00000457919
  CDS Start-End: 80-316
ggggtgtagaaacaggcctgttaaggagaggccaccgggacttcagtgtctcctccatcccaggagcgcagtggccactatggggtctgggctgccccttgtcctcctcttgaccctccttggcagctcacatggaacaggaccgggtatgactttgcaactgaagctgaaggagtcttttctgacaaattcctcctatgagtccagcttcctggaattgcttgaaaagctctgcctcctcctccatctcccttcagggaccagcgtcaccctccaccatgcaagatctcaacaccatgttgtctgcaacacatgacagccattgaagcctgtgtccttcttggcccaggcttttgggccggggatgcaggaggcaggccccgaccctgtctttcagcaggcccccaccctcctgagtggcaataaataaaattcggtatgctgaattcaa

SEQ ID NO: 187629 - DNA, 451 bp, Homo sapiens
  Payload ID: 16931
  Gene Symbol: SFTA2
  Gene Name: surfactant associated 2
  ENST ID: ENST00000448586
  CDS Start-End: 80-316
ggggtgtagaaacaggcctgttaaggagaggccaccgggacttcagtgtctcctccatcccaggagcgcagtggccactatggggtctgggctgccccttgtcctcctcttgaccctccttggcagctcacatggaacagggccgggtatgactttgcaactgaagctgaaggagtcttttctgacaagttcctcctatgagtccagcttcctggaattgcttgaaaagctctgcctcctcctccatctcccttcagggaccagcgtcaccctccaccatgcaagatctcaacaccatgttgtctgcaacacatgacagccattgaagcctgtgtccttcttggcccgggcttttgggccggggatgcaggaggcaggccccgactctgtctttcagcaggcccccaccctcctgagtggcaataaataaaattcggtatgctgaattcaa

SEQ ID NO: 187630 - DNA, 815 bp, Homo sapiens
  Payload ID: 16931
  Gene Symbol: SFTA2
  Gene Name: surfactant associated 2
  ENST ID: ENST00000634371
  CDS Start-End: 522-689
ccgaggtgtactccccgagggctgggggagcgcattccctcccgtcctactgattaactttcagcaaatggggatgcccaaaggagcagatagcgagtgacctgtggccctgctgtttgattctggatggagttacgtttaggagcctggcagcaaactggggcacctgttcaattagtgatgatgccatactctgtcccggaaatagaaattgtgagtccggttcctcatccaggaaaggggcagagcatggaagagccagggctgggcgcctactccaagatcaccgtggggaagggatctggcccatgccaagattctgctgctccatcaggtagaccgggttgatttctgtggggcacatctgtcccttaccaagaagatcaggccaaggaacaccaggaggagaatcacagccaccaggaccacaataactatggcccatgcagggaatgaatcattctctcccatctgtccagcgtggatacctttctgtgagccatctttattgagggccgggtatgactttgcaactgaagctgaaggagtcttttctgacaaattcctcctatgagtccagcttcctggaattgcttgaaaagctctgcctcctcctccatctcccttcagggaccagcgtcaccctccaccatgcaagatctcaacaccatgttgtctgcaacacatgacagccattgaagcctgtgtccttcttggcccgggcttttgggccggggatgcaggaggcaggccccgaccctgtctttcagcaggcccccaccctcctgagcggcaataaataaaattcggtatgc

SEQ ID NO: 187631 - DNA, 1191 bp, Homo sapiens
  Payload ID: 16932
  Gene Symbol: SFTA3
  Gene Name: surfactant associated 3
  ENST ID: ENST00000521114
  CDS Start-End: 379-609
tccgctagaaacgctctgggcgcgcactcctggagacgcggaggcccgggcgctccagaccagtgtccttgtaggaggcttcttcacgaagcttagagtttggcctttcatagggaaagacttgctcgggagcaagtctaagggattttaagggattttaaatcttcctgggccagggctagggagctctagtgacagtgtcttggtctggaatccaactctccaattttgaggccgcagggaggaattctgagactttagaggccgcacagccttcagcgcgctcaccgcgtccaggcgtcagtgaggggctatctcgaggcgcgagtgcacaaaaggtagcgcgagtctcttctcaggcgatccagataagaggaaatgagagccgggttttctgacttccaactcattagggaccaggttctttttcttcaggatcaggcacagagactgactgaatggctccaattatcaggatttgaaaacccagtatcagaatctaccactttgtatggaggaggggaggagacgagtggggaccagcttgacatccagtcttcacctggacatatggaaagaacaaatgtgcgatctgctcgttccctctgaaggtctctgttacgtatttcctcctctcctccagagcataataaccaatgactgctctcagaaagaacaggcctgagggagagggaaaagcggatacccacctgtgtcgctgtttgcgtgccaagtccaggaacagtccatacagccctgctgcatcccacgacgctgtcacaaagcaggagttcatccgaggccaagatggagaaactgaggcccagaaattgatgtccagaatgctttgctcttagccactgtactattatggcatattttatctttatgtattgcatcatttcatggattcaagtttatcaatgtcctttgacaagtttaaaaatctgtctgctaaaatctatccaatacattaaggaaaagtcccacttggcacatctcccacaccagatgttaattattcatactgcatgactgaggattttggaggcagagagagattcatctgcaatatttggaacaccaatggaggtctacgtcaacacagaatttatacagcagctggtgctagtcagagctaatgacagaatttcagtttaataaaaagacccccaactgagcacaccatct

SEQ ID NO: 187632 - DNA, 694 bp, Homo sapiens
  Payload ID: 16932
  Gene Symbol: SFTA3
  Gene Name: surfactant associated 3
  ENST ID: ENST00000524122
  CDS Start-End: 83-313
ggcgtcagtgaggggctatctcgaggcgcgagtgcacaaaaggtagcgcgagtctcttctcaggcgatccagataagaggaaatgagagccgggttttctgacttccaactcattagggaccaggttctttttcttcaggatcaggcacagagactgactgaatggctccaattatcaggatttgaaaacccagtatcagaatctaccactttgtatggaggaggggaggagacgagtggggaccagcttgacatccagtcttcacctggacatatggaaagaacaaatgtgcgatctgctcgttccctctgaaggtctctgttacgtatttcctcctctcctccagagcataataaccaatgactgctctcagaaaggcctgagggagagggaaaagcggatacccacctgtgtcgctgtttgcgtgccaagtccaggaacagtccatacagccctgctgcatcccacgacgctgtcacaaagcaggagttcatccgaggccaaggtgttgtcatgagaatattcgttaaaatggagaaactgaggcccagaaattgatgtccagaatgctttgctcttagccactgtactattatggcatattttatctttatgtattgcatcatttcatggattcaagtttatcaatgtcctttgacaagtttaaaaatctgtctgctaaaatctatccaa

SEQ ID NO: 187633 - DNA, 770 bp, Homo sapiens
  Payload ID: 16932
  Gene Symbol: SFTA3
  Gene Name: surfactant associated 3
  ENST ID: ENST00000518002
  CDS Start-End: 18-305
gatccagataagaggaaatgagagccgggttttctgacttccaactcattagggaccaggttctttttcttcaggatcaggcacagagactgactgaatggctccaattatcaggatttgaaaacccagtatcagaatctaccactttgtgcctgagggagagggaaaagcggatacccacctgtgtcgctgtttgcgtgccaagtccaggaacagtccatacagccctgctgcatcccacgacgctgtcacaaagcaggagttcatccgaggccaagatggagaaactgaggcccagaaattgatgtccagaatgctttgctcttagccactgtactattatggcatattttatctttatgtattgcatcatttcatggattcaagtttatcaatgtcctttgacaagtttaaaaatctgtctgctaaaatctatccaatacattaaggaaaagtcccacttggcacatctcccacaccagatgttaattattcatactgcatgactgaggattttggaggcagagagagattcatctgcaatatttggaacaccaatggaggtctacgtcaacacagaatttatacagcagctggtgctagtcagagctaatgacagaatttcagtttaataaaaagacccccaactgagcacaccatcttgaaaaaagtatacttatcaaacagctttcaatcagttcaagagagacaccttaattggggagaggaagaattgcagagtagtttgtaatcatgccaattccagatca

SEQ ID NO: 187634 - DNA, 1531 bp, Homo sapiens
  Payload ID: 16932
  Gene Symbol: SFTA3
  Gene Name: surfactant associated 3
  Uniprot ID: P0C7M3
  ENST ID: ENST00000518529
  CDS Start-End: 677-961
gggagctgtgggcaggagaggaaggaaagcagctctctcagctagcgagggggtcagggactgggccaagctcagaagcggggagaagagcgagacagagatgctctgagcaggggagacagggatcccgggctgctgccgctaccaacaagggtacacactgcggtcctcaaggccaggaggggggtgggggcagggaatgcctcagccaacagggcagcggctcggccctgctgctggcccggtgggaagtagcctggggccccgcgactgaaatccgagccaggcctgggcagtctccgctagaaacgctctgggcgcgcactcctggagacgcggaggcccgggcgctccagaccagtgtccttgtaggaggcttcttcacgaagcttagagtttggcctttcatagggaaagacttgctcgggagcaagtctaagggattttaagggattttaaatcttcctgggccagggctagggagctctagtgacagtgtcttggtctggaatccaactctccaattttgaggccgcagggaggaattctgagactttagaggccgcacagccttcagcgcgctcaccgcgtccaggcgtcagtgaggggctatctcgaggcgcgagtgcacaaaaggtagcgcgagtctcttctcaggcgatccagataagaggaaatgagagccgggttttctgacttccaactcattagggaccaggttctttttcttcaggatcaggcacagagactgactgaatggctccaattatcaggatttgaaaacccagtatcagaatctaccactttgtgcctgagggagagggaaaagcggatacccacctgtgtcgctgtttgcgtgccaagtccaggaacagtccatacagccctgctgcatcccacgacgctgtcacaaagcaggagttcatccgaggccaagatgttaattattcatactgcatgactgaggattttggaggcagagagagattcatctgcaatatttggaacaccaatggaggtctacgtcaacacagaatttatacagcagctggtgctagtcagagctaatgacagaatttcagtttaataaaaagacccccaactgagcacaccatcttgaaaaaagtatacttatcaaacagctttcaatcagttcaagagagacaccttaattggggagaggaagaattgcagagtagtttgtaatcatgccaattccagatcaataactgcatgtctgttctttggtagaaatagcttttgctttatattaagtaatcacatatatattctctctatttggataaggaaaccttcgctttatttgacaatgtataatgatatactcttctaattcacctctgtgtcttcacaataaacatgagtaaaatttagacaagtgatggtaaaggtcaatataattatttatttttaaaataaattttgtatctaacaggaaagcagttcttatgaaatttttatattttcaaaaattgttttgttcaaataaaattttatgagtaaagttaaa

SEQ ID NO: 187635 - DNA, 791 bp, Homo sapiens
  Payload ID: 16932
  Gene Symbol: SFTA3
  Gene Name: surfactant associated 3
  ENST ID: ENST00000518446
  CDS Start-End: 238-468
cagggactgggccaagctcagaagcggggagaagagcgagacagagatgctctgagcaggggagacagggatcccgggctgctgccgctaccaacaaggggaggaattctgagactttagaggccgcacagccttcagcgcgctcaccgcgtccaggcgtcagtgaggggctatctcgaggcgcgagtgcacaaaaggtagcgcgagtctcttctcaggcgatccagataagaggaaatgagagccgggttttctgacttccaactcattagggaccaggttctttttcttcaggatcaggcacagagactgactgaatggctccaattatcaggatttgaaaacccagtatcagaatctaccactttgtatggaggaggggaggagacgagtggggaccagcttgacatccagtcttcacctggacatatggaaagaacaaatgtgcgatctgctcgttccctctgaaggtctctgttacgtatttcctcctctcctccagagcataataaccaatgactgctctcagaaagaacaggcctgagggagagggaaaagcggatacccacctgtgtcgctgtttgcgtgccaagtccaggaacagtccatacagccctgctgcatcccacgacgctgtcacaaagcaggagttcatccgaggccaagatggagaaactgaggcccagaaattgatgtccagaatgctttgctcttagccactgtactattatggcatattttatctttatgtattgcatcatttcatggattcaagtttatcaatgtccttt

SEQ ID NO: 187636 - DNA, 2212 bp, Homo sapiens
  Payload ID: 16933
  Gene Symbol: SFTPA1
  Gene Name: surfactant protein A1
  Uniprot ID: Q8IWL2
  ENST ID: ENST00000398636
  CDS Start-End: 139-885
gacttggaggcagagacccaagcagctggaggctctgtgtgtgggtcgctgatttcttggagcctgaaaagaaagtaacacagcagggatgaggacagatggtgtgagtcagtgagagcagcgactggacccagagccatgtggctgtgccctctggccctcaacctcatcttgatggcagcctctggtgctgtgtgcgaagtgaaggacgtttgtgttggaagccctggtatccccggcactcctggatcccacggcctgccaggcagggacgggagagatggtctcaaaggagaccctggccctccaggccccatgggtccacctggagaaatgccatgtcctcctggaaatgatgggctgcctggagcccctggtatccctggagagtgtggagagaagggggagcctggcgagaggggccctccagggcttccagctcatctagatgaggagctccaagccacactccacgactttagacatcaaatcctgcagacaaggggagccctcagtctgcagggctccataatgacagtaggagagaaggtcttctccagcaatgggcagtccatcacttttgatgccattcaggaggcatgtgccagagcaggcggccgcattgctgtcccaaggaatccagaggaaaatgaggccattgcaagcttcgtgaagaagtacaacacatatgcctatgtaggcctgactgagggtcccagccctggagacttccgctactcagacgggacccctgtaaactacaccaactggtaccgaggggagcccgcaggtcggggaaaagagcagtgtgtggagatgtacacagatgggcagtggaatgacaggaactgcctgtactcccgactgaccatctgtgagttctgagaggcatttaggccatgggacagggaggacgctctctggccttcggcctccatcctgaggctccacttggtctgtgagatgctagaactccctttcaacagaattcacttgtggctattgggactggaggcacccttagccacttcattcctctgatgggccctgactcttccccataatcactgaccagccttgacactccccttgcaaactctcccagcactgcaccccaggcagccactcttagccttggccttcgacatgagatggagccctccttattccccatctggtccagttccttcacttacagatggcagcagtgaggtcttggggtagaaggaccctccaaagtcacacaaagtgcctgcctcctggtcccctcagctctctctctgcaacccagtgccatcaggatgagcaatcctggccaagcataatgacagagagaggcagacttcggggaagccctgactgtgcagagctaaggacacagtggagattctctggcactctgaggtctctgtggcaggcctggtcaggctctccatgaggttagaaggccaggtagtgttccagcagggtggtggccaagccaaccccatgattgatgtgtacgattcactcctttgagtctttgaatggcaactcagccccctgacctgaagacagccagcctaggcctctagggtgacctagagccgccttcagatgtgacccgagtaactttcaactgatgaacaaatctgcaccctacttcagatttcagtgggcattcacaccaccccccacaccactggctctgctttctcctttcattaatccattcacccagatatttcattaaaattatcacgtgccaggtcttaggatatgtcgtggggtgggcaaggtaatcagtgacagttgaagatttttttttcccagagcttatgtcttcatctgtgaaatgggaataagatacttgttgctgtcacagttattaccatccccccagctaccaaaattactaccagaactgttactatacacagaggctattgactgagcacctatcatttgccaagaaccttgacaagcacttctaatacagcatattatgtactattcaatctttacacaatgtcacgggaccagtattgtttcctcattttttataaggacactgaagcttggaggagttaaatgttttgagtattattccagagagcaagtggcagaggctggatccaaacccatcttcctggacctgaagcttatgcttccagccaccccactcctgagctgaataaagatgatttaagcttaataaatcgtgaatgtgttc

SEQ ID NO: 187637 - DNA, 527 bp, Homo sapiens
  Payload ID: 16933
  Gene Symbol: SFTPA1
  Gene Name: surfactant protein A1
  ENST ID: ENST00000429958
  CDS Start-End: 54-527
gacccaagcagctggaggctctgtgtgtgggagcagcgactggacccagagccatgtggctgtgccctctggccctcaacctcatcttgatggcagcctctggtgctgtgtgcgaagtgaaggacgtttgtgttggaagccctggtatccccggcactcctggatcccacggcctgccaggcagggacgggagagatggtctcaaaggagaccctggccctccaggccccatgggtccacctggagaaatgccatgtcctcctggaaatgatgggctgcctggagcccctggtatccctggagagtgtggagagaagggggagcctggcgagaggggccctccagggcttccagctcatctagatgaggagctccaagccacactccacgactttagacatcaaatcctgcagacaaggggagccctcagtctgcagggctccataatgacagtaggagagaaggtcttctccagcaatgggcagtccatcacttttgatgccattcaggaggcatgtgccagagca

SEQ ID NO: 187638 - DNA, 2210 bp, Homo sapiens
  Payload ID: 16933
  Gene Symbol: SFTPA1
  Gene Name: surfactant protein A1
  Uniprot ID: Q8IWL2
  ENST ID: ENST00000419470
  CDS Start-End: 77-868
gaggcagagacccaagcagctggaggctctgtgtgtggcctggagaccccacaacctccagccggaggcctgaagcatgaggccatgccaggtgccaggagcagcgactggacccagagccatgtggctgtgccctctggccctcaacctcatcttgatggcagcctctggtgctgtgtgcgaagtgaaggacgtttgtgttggaagccctggtatccccggcactcctggatcccacggcctgccaggcagggacgggagagatggtctcaaaggagaccctggccctccaggccccatgggtccacctggagaaatgccatgtcctcctggaaatgatgggctgcctggagcccctggtatccctggagagtgtggagagaagggggagcctggcgagaggggccctccagggcttccagctcatctagatgaggagctccaagccacactccacgactttagacatcaaatcctgcagacaaggggagccctcagtctgcagggctccataatgacagtaggagagaaggtcttctccagcaatgggcagtccatcacttttgatgccattcaggaggcatgtgccagagcaggcggccgcattgctgtcccaaggaatccagaggaaaatgaggccattgcaagcttcgtgaagaagtacaacacatatgcctatgtaggcctgactgagggtcccagccctggagacttccgctactcagacgggacccctgtaaactacaccaactggtaccgaggggagcccgcaggtcggggaaaagagcagtgtgtggagatgtacacagatgggcagtggaatgacaggaactgcctgtactcccgactgaccatctgtgagttctgagaggcatttaggccatgggacagggaggacgctctctggccttcggcctccatcctgaggctccacttggtctgtgagatgctagaactccctttcaacagaattcacttgtggctattgggactggaggcacccttagccacttcattcctctgatgggccctgactcttccccataatcactgaccagccttgacactccccttgcaaactctcccagcactgcaccccaggcagccactcttagccttggccttcgacatgagatggagccctccttattccccatctggtccagttccttcacttacagatggcagcagtgaggtcttggggtagaaggaccctccaaagtcacacaaagtgcctgcctcctggtcccctcagctctctctctgcaacccagtgccatcaggatgagcaatcctggccaagcataatgacagagagaggcagacttcggggaagccctgactgtgcagagctaaggacacagtggagattctctggcactctgaggtctctgtggcaggcctggtcaggctctccatgaggttagaaggccaggtagtgttccagcagggtggtggccaagccaaccccatgattgatgtgtacgattcactcctttgagtctttgaatggcaactcagccccctgacctgaagacagccagcctaggcctctagggtgacctagagccgccttcagatgtgacccgagtaactttcaactgatgaacaaatctgcaccctacttcagatttcagtgggcattcacaccaccccccacaccactggctctgctttctcctttcattaatccattcacccagatatttcattaaaattatcacgtgccaggtcttaggatatgtcgtggggtgggcaaggtaatcagtgacagttgaagatttttttttcccagagcttatgtcttcatctgtgaaatgggaataagatacttgttgctgtcacagttattaccatccccccagctaccaaaattactaccagaactgttactatacacagaggctattgactgagcacctatcatttgccaagaaccttgacaagcacttctaatacagcatattatgtactattcaatctttacacaatgtcacgggaccagtattgtttcctcattttttataaggacactgaagcttggaggagttaaatgttttgagtattattccagagagcaagtggcagaggctggatccaaacccatcttcctggacctgaagcttatgcttccagccaccccactcctgagctgaataaagatgatttaagcttaataaatcgtgaatgtgttcacatgagtttccata

SEQ ID NO: 187639 - DNA, 596 bp, Homo sapiens
  Payload ID: 16933
  Gene Symbol: SFTPA1
  Gene Name: surfactant protein A1
  ENST ID: ENST00000439264
  CDS Start-End: 123-596
cccaagcagctggaggctctgtgtgtgggtcgctgatttcttggagcctgaaaagaaagtaacacagcagggatgaggacagatggtgtgagtcagtgagagcagcgactggacccagagccatgtggctgtgccctctggccctcaacctcatcttgatggcagcctctggtgctgtgtgcgaagtgaaggacgtttgtgttggaagccctggtatccccggcactcctggatcccacggcctgccaggcagggacgggagagatggtctcaaaggagaccctggccctccaggccccatgggtccacctggagaaatgccatgtcctcctggaaatgatgggctgcctggagcccctggtatccctggagagtgtggagagaagggggagcctggcgagaggggccctccagggcttccagctcatctagatgaggagctccaagccacactccacgactttagacatcaaatcctgcagacaaggggagccctcagtctgcagggctccataatgacagtaggagagaaggtcttctccagcaatgggcagtccatcacttttgatgccattcaggaggcatgtgccagagca

SEQ ID NO: 187640 - DNA, 2141 bp, Homo sapiens
  Payload ID: 16933
  Gene Symbol: SFTPA1
  Gene Name: surfactant protein A1
  Uniprot ID: Q8IWL2
  ENST ID: ENST00000428376
  CDS Start-End: 68-814
gacttggaggcagagacccaagcagctggaggctctgtgtgtgggagcagcgactggacccagagccatgtggctgtgccctctggccctcaacctcatcttgatggcagcctctggtgctgtgtgcgaagtgaaggacgtttgtgttggaagccctggtatccccggcactcctggatcccacggcctgccaggcagggacgggagagatggtctcaaaggagaccctggccctccaggccccatgggtccacctggagaaatgccatgtcctcctggaaatgatgggctgcctggagcccctggtatccctggagagtgtggagagaagggggagcctggcgagaggggccctccagggcttccagctcatctagatgaggagctccaagccacactccacgactttagacatcaaatcctgcagacaaggggagccctcagtctgcagggctccataatgacagtaggagagaaggtcttctccagcaatgggcagtccatcacttttgatgccattcaggaggcatgtgccagagcaggcggccgcattgctgtcccaaggaatccagaggaaaatgaggccattgcaagcttcgtgaagaagtacaacacatatgcctatgtaggcctgactgagggtcccagccctggagacttccgctactcagacgggacccctgtaaactacaccaactggtaccgaggggagcccgcaggtcggggaaaagagcagtgtgtggagatgtacacagatgggcagtggaatgacaggaactgcctgtactcccgactgaccatctgtgagttctgagaggcatttaggccatgggacagggaggacgctctctggccttcggcctccatcctgaggctccacttggtctgtgagatgctagaactccctttcaacagaattcacttgtggctattgggactggaggcacccttagccacttcattcctctgatgggccctgactcttccccataatcactgaccagccttgacactccccttgcaaactctcccagcactgcaccccaggcagccactcttagccttggccttcgacatgagatggagccctccttattccccatctggtccagttccttcacttacagatggcagcagtgaggtcttggggtagaaggaccctccaaagtcacacaaagtgcctgcctcctggtcccctcagctctctctctgcaacccagtgccatcaggatgagcaatcctggccaagcataatgacagagagaggcagacttcggggaagccctgactgtgcagagctaaggacacagtggagattctctggcactctgaggtctctgtggcaggcctggtcaggctctccatgaggttagaaggccaggtagtgttccagcagggtggtggccaagccaaccccatgattgatgtgtacgattcactcctttgagtctttgaatggcaactcagccccctgacctgaagacagccagcctaggcctctagggtgacctagagccgccttcagatgtgacccgagtaactttcaactgatgaacaaatctgcaccctacttcagatttcagtgggcattcacaccaccccccacaccactggctctgctttctcctttcattaatccattcacccagatatttcattaaaattatcacgtgccaggtcttaggatatgtcgtggggtgggcaaggtaatcagtgacagttgaagatttttttttcccagagcttatgtcttcatctgtgaaatgggaataagatacttgttgctgtcacagttattaccatccccccagctaccaaaattactaccagaactgttactatacacagaggctattgactgagcacctatcatttgccaagaaccttgacaagcacttctaatacagcatattatgtactattcaatctttacacaatgtcacgggaccagtattgtttcctcattttttataaggacactgaagcttggaggagttaaatgttttgagtattattccagagagcaagtggcagaggctggatccaaacccatcttcctggacctgaagcttatgcttccagccaccccactcctgagctgaataaagatgatttaagcttaataaatcgtgaatgtgttc

SEQ ID NO: 187641 - DNA, 2189 bp, Homo sapiens
  Payload ID: 16934
  Gene Symbol: SFTPA2
  Gene Name: surfactant protein A2
  Uniprot ID: Q8IWL1
  ENST ID: ENST00000372325
  CDS Start-End: 86-832
gagacccaagcagctggaggctctgtgtgtgggtcgctgatttcttggagcctgaaaagaaggagcagcgactggacccagagccatgtggctgtgccctctggccctcaccctcatcttgatggcagcctctggtgctgcgtgcgaagtgaaggacgtttgtgttggaagccctggtatccccggcactcctggatcccacggcctgccaggcagggacgggagagatggtgtcaaaggagaccctggccctccaggccccatgggtccgcctggagaaacaccatgtcctcctgggaataatgggctgcctggagcccctggtgtccctggagagcgtggagagaagggggaggctggcgagagaggccctccagggcttccagctcatctagatgaggagctccaagccacactccacgacttcagacatcaaatcctgcagacaaggggagccctcagtctgcagggctccataatgacagtaggagagaaggtcttctccagcaatgggcagtccatcacttttgatgccattcaggaggcatgtgccagagcaggcggccgcattgctgtcccaaggaatccagaggaaaatgaggccattgcaagcttcgtgaagaagtacaacacatatgcctatgtaggcctgactgagggtcccagccctggagacttccgctactcagatgggacccctgtaaactacaccaactggtaccgaggggagcctgcaggtcggggaaaagagcagtgtgtggagatgtacacagatgggcagtggaatgacaggaactgcctgtactcccgactgaccatctgtgagttctgagaggcatttaggccatgggacagggaggatcctgtctggccttcagtttccatccccaggatccacttggtctgtgagatgctagaactccctttcaacagaattcacttgtggctattagagctggaggcacccttagccacttcattcccctgatgggccctgactcttccccataatcactgaccagccttgacactccccttgcaaaccatcccagcactgcaccccaggcagccactcctagccttggcctttggcatgagatggaggcctccttattccccatctggtccagttccttcacttacagatggcagcagtgaggccttggggtagaaggatcctccaaagtcacacagagtgcctgcctcctggtcccctcagctctgcctctgcagcccactgcctgcccagtgccatcaggatgagcagtaccggccaagcataatgacagagagaggcagatttcagggaagccctgactgtgtggagctaaggacacagtggagattctctggcactctgaggtctctgtggcaggcctggtcaggctctccaggtggtcagagggcccagtggtgccccagcacggtggtgcccaagccaaccctgtgactgacatgtacgattcactcctttgagtctttggatgccaactcagccccctgacctggaggcagccggccaaggcctctagggaagagccccccactgcagacatgacccgagtaactttctgctgatgaacaaatctgcaccccacttcagacctcggtgggcattcacaccaccccccatgccaccggctccactttccccttttattaatacattcacccagataatcattaaaattaacatgtgccaggtcttaggatgtgtcttggggtgggcacagtacccggtgactcttggggatatttatttattttccctgagcctatatcttcatctgtgaaatggggataaaaatacttgttgctgtcacaattattaccatctctccagctagcaaaattactaccagagccgttactacacacaaaggctattgaccgagcacataccatgtgccacacaccttgacaaaatcttttaatacagtttattatgtactattcaatctttacacaatgtcacgggaccagtattgtttacccaattttttataaggacactgaagcttagaggagtgaaatgttttgagtgttatttcagagagcaaatggcaaagactggatccaaacccatcttcctggacctgaagttcatgctcccagccaccccacccctgagctgaataaagatgatttaagcataataaatcgttagtgtgttcacatgagtttccata

SEQ ID NO: 187642 - DNA, 815 bp, Homo sapiens
  Payload ID: 16934
  Gene Symbol: SFTPA2
  Gene Name: surfactant protein A2
  Uniprot ID: Q8IWL1
  ENST ID: ENST00000372327
  CDS Start-End: 47-793
gcagctggaggctctgtgtgtgggagcagcgactggacccagagccatgtggctgtgccctctggccctcaccctcatcttgatggcagcctctggtgctgcgtgcgaagtgaaggacgtttgtgttggaagccctggtatccccggcactcctggatcccacggcctgccaggcagggacgggagagatggtgtcaaaggagaccctggccctccaggccccatgggtccgcctggagaaacaccatgtcctcctgggaataatgggctgcctggagcccctggtgtccctggagagcgtggagagaagggggaggctggcgagagaggccctccagggcttccagctcatctagatgaggagctccaagccacactccacgacttcagacatcaaatcctgcagacaaggggagccctcagtctgcagggctccataatgacagtaggagagaaggtcttctccagcaatgggcagtccatcacttttgatgccattcaggaggcatgtgccagagcaggcggccgcattgctgtcccaaggaatccagaggaaaatgaggccattgcaagcttcgtgaagaagtacaacacatatgcctatgtaggcctgactgagggtcccagccctggagacttccgctactcagatgggacccctgtaaactacaccaactggtaccgaggggagcctgcaggtcggggaaaagagcagtgtgtggagatgtacacagatgggcagtggaatgacaggaactgcctgtactcccgactgaccatctgtgagttctgagaggcatttaggccatgggaca

SEQ ID NO: 187643 - DNA, 726 bp, Homo sapiens
  Payload ID: 16934
  Gene Symbol: SFTPA2
  Gene Name: surfactant protein A2
  ENST ID: ENST00000417041
  CDS Start-End: 253-726
cagagacccaagcagctggaggctctgtgtgtggatccatccctaccagggactcagcagggcctaagcagggggagtgggagaacagaccccaagaggaaggaagacctcatcactgactgtgagagggtcatcaccccccgatgatcaccttgaagggtccaggctgtgggccctattcatctcttttcattctcaggtcgctgatttcttggagcctgaaaagaaggagcagcgactggacccagagccatgtggctgtgccctctggccctcaccctcatcttgatggcagcctctggtgctgcgtgcgaagtgaaggacgtttgtgttggaagccctggtatccccggcactcctggatcccacggcctgccaggcagggacgggagagatggtgtcaaaggagaccctggccctccaggccccatgggtccgcctggagaaacaccatgtcctcctgggaataatgggctgcctggagcccctggtgtccctggagagcgtggagagaagggggaggctggcgagagaggccctccagggcttccagctcatctagatgaggagctccaagccacactccacgacttcagacatcaaatcctgcagacaaggggagccctcagtctgcagggctccataatgacagtaggagagaaggtcttctccagcaatgggcagtccatcacttttgatgccattcaggaggcatgtgccagagca

SEQ ID NO: 187644 - DNA, 644 bp, Homo sapiens
  Payload ID: 16934
  Gene Symbol: SFTPA2
  Gene Name: surfactant protein A2
  ENST ID: ENST00000492049
  CDS Start-End: 352-644
gccagtttcccagggtaacatagtgaggcactgaaagaaaggagactgcactggagcccaggtccctgggctccccagagctccttactcttcctcctcctcagcagtcttgagaccccacaacctccagccggaggcctgaagcatgaggccatgccaggtgccaggtgatgcttggaattttcccgggtgcttcgggtcttcccagcactctggtctcgcccgccctgcctctcgggctctgcccagcttcctgagtcctgacagagcacagtgggggagatgttggcagaggtggcagatgggctcacggccatccctccggcaggagcagcgactggacccagagccatgtggctgtgccctctggccctcaccctcatcttgatggcagcctctggtgctgcgtgcgaagtgaaggacgtttgtgttggaagccctggtatccccggcactcctggatcccacggcctgccaggcagggacgggagagatggtgtcaaaggagaccctggccctccaggccccatgggtccgcctggagaaacaccatgtcctcctgggaataatgggctgcctggagcccctggtgtccctggagagcgtggagagaagggggaggctggcgagagaggccctccagg

SEQ ID NO: 187645 - DNA, 3666 bp, Homo sapiens
  Payload ID: 16935
  Gene Symbol: SFTPB
  Gene Name: surfactant protein B
  Uniprot ID: P07988
  ENST ID: ENST00000393822
  CDS Start-End: 137-1282
tgtaaatgctcttctgactaatgcaaaccatgtgtccatagaaccagaagatttttccaggggaaaagagcccccacgccccgcccagctataaggggccatgcaccaagcagggtacccaggctgcagaggtgccatggctgagtcacacctgctgcagtggctgctgctgctgctgcccacgctctgtggcccaggcactgctgcctggaccacctcatccttggcctgtgcccagggccctgagttctggtgccaaagcctggagcaagcattgcagtgcagagccctagggcattgcctacaggaagtctggggacatgtgggagccgatgacctatgccaagagtgtgaggacatcgtccacatccttaacaagatggccaaggaggccattttccaggacacgatgaggaagttcctggagcaggagtgcaacgtcctccccttgaagctgctcatgccccagtgcaaccaagtgcttgacgactacttccccctggtcatcgactacttccagaaccagactgactcaaacggcatctgtatgcacctgggcctgtgcaaatcccggcagccagagccagagcaggagccagggatgtcagaccccctgcccaaacctctgcgggaccctctgccagaccctctgctggacaagctcgtcctccctgtgctgcccggggccctccaggcgaggcctgggcctcacacacaggatctctccgagcagcaattccccattcctctcccctattgctggctctgcagggctctgatcaagcggatccaagccatgattcccaagggtgcgctagctgtggcagtggcccaggtgtgccgcgtggtacctctggtggcgggcggcatctgccagtgcctggctgagcgctactccgtcatcctgctcgacacgctgctgggccgcatgctgccccagctggtctgccgcctcgtcctccggtgctccatggatgacagcgctggcccaaggtcgccgacaggagaatggctgccgcgagactctgagtgccacctctgcatgtccgtgaccacccaggccgggaacagcagcgagcaggccataccacaggcaatgctccaggcctgtgttggctcctggctggacagggaaaagtgcaagcaatttgtggagcagcacacgccccagctgctgaccctggtgcccaggggctgggatgcccacaccacctgccaggccctcggggtgtgtgggaccatgtccagccctctccagtgtatccacagccccgacctttgatgagaactcagctgtccagctgcaaaggaaaagccaagtgagacgggctctgggaccatggtgaccaggctcttcccctgctccctggccctcgccagctgccaggctgaaaagaagcctcagctcccacaccgccctcctcaccgcccttcctcggcagtcacttccactggtggaccacgggcccccagccctgtgtcggccttgtctgtctcagctcaaccacagtctgacaccagagcccacttccatcctctctggtgtgaggcacagcgagggcagcatctggaggagctctgcagcctccacacctaccacgacctcccagggctgggctcaggaaaaaccagccactgctttacaggacagggggttgaagctgagccccgcctcacacccacccccatgcactcaaagattggattttacagctacttgcaattcaaaattcagaagaataaaaaatgggaacatacagaactctaaaagatagacatcagaaattgttaagttaagctttttcaaaaaatcagcaattccccagcgtagtcaagggtggacactgcacgctctggcatgatgggatggcgaccgggcaagctttcttcctcgagatgctctgctgcttgagagctattgctttgttaagatataaaaaggggtttctttttgtctttctgtaaggtggacttccagcttttgattgaaagtcctagggtgattctatttctgctgtgatttatctgctgaaagctcagctggggttgtgcaagctagggacccattcctgtgtaatacaatgtctgcaccaatgctaataaagtcctattctcttttatgagaaagaaaaagacaccgtcctttaaagtgctgcagtatggccagacgtggtggctcacacctgcaatcccagcaccttaggaggccgaggcaggaggatccttgaggtcaggagttcgagaccagcctcgccaacatggtgaaaccccatttctactaaaaatacaaaaaattagccaagtgtggtggcatatgcctgtaatcccaactactcagaaggccgaggcaggagaattacttgaacgcaggagaatcactgcagcccaggaggcagaggttgcagtgagccgagattgcaccactgcactccagcctgggtgacagagcaagactccatctcagtaaataaataaataaataaaaagcgctgcagtagctgtggcctcaccctgaagtcagcgggcccaggcctacctcactctctcccttggcagagaagcagacgtccatagctcctctccctcacaagcgctcccagcctgccctccagctgctgctctcccctcccagtctctactcactgggatgaggttaggtcatgaggacaccaaaaacctaaaaataaacaaaaagccaaacaagccttagcttttcttaaagactgaaatgcctggaagtgtccctttatttataaaataacttttgtcatatttcttatacatgtttcttgtaagaaattcagaaactacagacaaagagagtggaaattacccactgtcaggcctctgagcccaagctaagccatcatatcccctgtgccctgcacgtatacacccagatggcctgaagcaactgaagatccacaaaagaagtgaaaatagccagttcctgccttaactgatgacattccaccattgtgatttgttcctgccccaccctaactgatcaattgaccttgtgacaatacaccttccccacccttgagaaggtgctttgtaatattctccccacccaccccacgcccgcacccccgcacccttaagaaggtattttgtaatattctctccgccattgagaatgtgctttgtaagatccaccccctgcccacaaaaaattgctcctaactccaccgcctatcccaaacctacaagaactaatgataatcccaccaccctttgctgactctttttggactcagcccacctgcacccaggtgattaaaaagctttattgttcacacaaagcctgtttggtagtctcttcacagggaagcatgtgacacccacaatcccacctagcccaggagagagctacggcagggtgtgtgttttgacactgagcttggggctttttccatcttctccccacagcctctggctccacacctccaccgttcaagcgccagaaagagctgtctatgcagcctgctcttgggcctggggatgagacacacaattcattggctcctggattttaagtagacatttgtaaatctatagctaactactgtccttaaagccattgtttccattacaaaatccaactctctgagagaaaagggtgttttaaatttaaaaaaataaaaacaaaaaagtttgattgag

SEQ ID NO: 187646 - DNA, 1867 bp, Homo sapiens
  Payload ID: 16935
  Gene Symbol: SFTPB
  Gene Name: surfactant protein B
  ENST ID: ENST00000409383
  CDS Start-End: 101-1282
tgtaaatgctcttctgactaatgcaaaccatgtgtccatagaaccagaagatttttccaggggaaaagagcccccacgccccgcccagctataaggggccatgcaccaagcagggtacccaggctgcagaggtgccatggctgagtcacacctgctgcagtggctgctgctgctgctgcccacgctctgtggcccaggcactgctgcctggaccacctcatccttggcctgtgcccagggccctgagttctggtgccaaagcctggagcaagcattgcagtgcagagccctagggcattgcctacaggaagtctggggacatgtgggagccgatgacctatgccaagagtgtgaggacatcgtccacatccttaacaagatggccaaggaggccattttccaggacacgatgaggaagttcctggagcaggagtgcaacgtcctccccttgaagctgctcatgccccagtgcaaccaagtgcttgacgactacttccccctggtcatcgactacttccagaaccagactgactcaaacggcatctgtatgcacctgggcctgtgcaaatcccggcagccagagccagagcaggagccagggatgtcagaccccctgcccaaacctctgcgggaccctctgccagaccctctgctggacaagctcgtcctccctgtgctgcccggggccctccaggcgaggcctgggcctcacacacaggatctctccgagcagcaattccccattcctctcccctattgctggctctgcagggctctgatcaagcggatccaagccatgattcccaagggtgcgctagctgtggcagtggcccaggtgtgccgcgtggtacctctggtggcgggcggcatctgccagtgcctggctgagcgctactccgtcatcctgctcgacacgctgctgggccgcatgctgccccagctggtctgccgcctcgtcctccggtgctccatggatgacagcgctggcccaaggtcgccgacaggagaatggctgccgcgagactctgagtgccacctctgcatgtccgtgaccacccaggccgggaacagcagcgagcaggccataccacaggcaatgctccaggcctgtgttggctcctggctggacagggaaaagtgcaagcaatttgtggagcagcacacgccccagctgctgaccctggtgcccaggggctgggatgcccacaccacctgccaggccctcggggtgtgtgggaccatgtccagccctctccagtgtatccacagccccgacctttgatgagaactcagctgtccagaaaaagacaccgtcctttaaagtgctgcagtatggccagacgtggtggctcacacctgcaatcccagcaccttaggaggccgaggcaggaggatccttgaggtcaggagttcgagaccagcctcgccaacatggtgaaaccccatttctactaaaaatacaaaaaattagccaagtgtggtggcatatgcctgtaatcccaactactcagaaggccgaggcaggagaattacttgaacgcaggagaatcactgcagcccaggaggcagaggttgcagtgagccgagattgcaccactgcactccagcctgggtgacagagcaagactccatctcagtaaataaataaataaataaaaagcgctgcagtagctgtggcctcaccctgaagtcagcgggcccaggcctacctcactctctcccttggcagagaagcagacgtccatagctcctctccctcacaagcgctcccagcctgccctccagctgctgctctcccctcccagtctctactcactgggatgaggttaggtcatgaggacaccaaaaacctaaaaataaacaaaaa

SEQ ID NO: 187647 - DNA, 1743 bp, Homo sapiens
  Payload ID: 16935
  Gene Symbol: SFTPB
  Gene Name: surfactant protein B
  ENST ID: ENST00000428225
  CDS Start-End: 1-1123
acacctgctgcagtggctgctgctgctgctgcccacgctctgtggcccaggcactgctgcctggaccacctcatccttggcctgtgcccagggccctgagttctggtgccaaagcctggagcaagcattgcagtgcagagccctagggcattgcctacaggaagtctggggacatgtgggagccgatgacctatgccaagagtgtgaggacatcgtccacatccttaacaagatggccaaggaggccattttccaggacacgatgaggaagttcctggagcaggagtgcaacgtcctccccttgaagctgctcatgccccagtgcaaccaagtgcttgacgactacttccccctggtcatcgactacttccagaaccagactgactcaaacggcatctgtatgcacctgggcctgtgcaaatcccggcagccagagccagagcaggagccagggatgtcagaccccctgcccaaacctctgcgggaccctctgccagaccctctgctggacaagctcgtcctccctgtgctgcccggggccctccaggcgaggcctgggcctcacacacaggatctctccgagcagcaattccccattcctctcccctattgctggctctgcagggctctgatcaagcggatccaagccatgattcccaagggtgcgctagctgtggcagtggcccaggtgtgccgcgtggtacctctggtggcgggcggcatctgccagtgcctggctgagcgctactccgtcatcctgctcgacacgctgctgggccgcatgctgccccagctggtctgccgcctcgtcctccggtgctccatggatgacagcgctggcccaagagaatggctgccgcgagactctgagtgccacctctgcatgtccgtgaccacccaggccgggaacagcagcgagcaggccataccacaggcaatgctccaggcctgtgttggctcctggctggacagggaaaagtgcaagcaatttgtggagcagcacacgccccagctgctgaccctggtgcccaggggctgggatgcccacaccacctgccaggccctcggggtgtgtgggaccatgtccagccctctccagtgtatccacagccccgacctttgatgagaactcagctgtccagaaaaagacaccgtcctttaaagtgctgcagtatggccagacgtggtggctcacacctgcaatcccagcaccttaggaggccgaggcaggaggatccttgaggtcaggagttcgagaccagcctcgccaacatggtgaaaccccatttctactaaaaatacaaaaaattagccaagtgtggtggcatatgcctgtaatcccaactactcagaaggccgaggcaggagaattacttgaacgcaggagaatcactgcagcccaggaggcagaggttgcagtgagccgagattgcaccactgcactccagcctgggtgacagagcaagactccatctcagtaaataaataaataaataaaaagcgctgcagtagctgtggcctcaccctgaagtcagcgggcccaggcctacctcactctctcccttggcagagaagcagacgtccatagctcctctccctcacaagcgctcccagcctgccctccagctgctgctctcccctcccagtctctactcactgggatgaggttaggtcatgaggacaccaaaaacctaaaaataaacaaaaagccaaacaagccttagcttttcttaaagactgaaa

SEQ ID NO: 187648 - DNA, 3554 bp, Homo sapiens
  Payload ID: 16935
  Gene Symbol: SFTPB
  Gene Name: surfactant protein B
  Uniprot ID: P07988
  ENST ID: ENST00000519937
  CDS Start-End: 21-1166
acccaggctgcagaggtgccatggctgagtcacacctgctgcagtggctgctgctgctgctgcccacgctctgtggcccaggcactgctgcctggaccacctcatccttggcctgtgcccagggccctgagttctggtgccaaagcctggagcaagcattgcagtgcagagccctagggcattgcctacaggaagtctggggacatgtgggagccgatgacctatgccaagagtgtgaggacatcgtccacatccttaacaagatggccaaggaggccattttccaggacacgatgaggaagttcctggagcaggagtgcaacgtcctccccttgaagctgctcatgccccagtgcaaccaagtgcttgacgactacttccccctggtcatcgactacttccagaaccagactgactcaaacggcatctgtatgcacctgggcctgtgcaaatcccggcagccagagccagagcaggagccagggatgtcagaccccctgcccaaacctctgcgggaccctctgccagaccctctgctggacaagctcgtcctccctgtgctgcccggggccctccaggcgaggcctgggcctcacacacaggatctctccgagcagcaattccccattcctctcccctattgctggctctgcagggctctgatcaagcggatccaagccatgattcccaagggtgcgctagctgtggcagtggcccaggtgtgccgcgtggtacctctggtggcgggcggcatctgccagtgcctggctgagcgctactccgtcatcctgctcgacacgctgctgggccgcatgctgccccagctggtctgccgcctcgtcctccggtgctccatggatgacagcgctggcccaaggtcgccgacaggagaatggctgccgcgagactctgagtgccacctctgcatgtccgtgaccacccaggccgggaacagcagcgagcaggccataccacaggcaatgctccaggcctgtgttggctcctggctggacagggaaaagtgcaagcaatttgtggagcagcacacgccccagctgctgaccctggtgcccaggggctgggatgcccacaccacctgccaggccctcggggtgtgtgggaccatgtccagccctctccagtgtatccacagccccgacctttgatgagaactcagctgtccagctgcaaaggaaaagccaagtgagacgggctctgggaccatggtgaccaggctcttcccctgctccctggccctcgccagctgccaggctgaaaagaagcctcagctcccacaccgccctcctcaccgcccttcctcggcagtcacttccactggtggaccacgggcccccagccctgtgtcggccttgtctgtctcagctcaaccacagtctgacaccagagcccacttccatcctctctggtgtgaggcacagcgagggcagcatctggaggagctctgcagcctccacacctaccacgacctcccagggctgggctcaggaaaaaccagccactgctttacaggacagggggttgaagctgagccccgcctcacacccacccccatgcactcaaagattggattttacagctacttgcaattcaaaattcagaagaataaaaaatgggaacatacagaactctaaaagatagacatcagaaattgttaagttaagctttttcaaaaaatcagcaattccccagcgtagtcaagggtggacactgcacgctctggcatgatgggatggcgaccgggcaagctttcttcctcgagatgctctgctgcttgagagctattgctttgttaagatataaaaaggggtttctttttgtctttctgtaaggtggacttccagcttttgattgaaagtcctagggtgattctatttctgctgtgatttatctgctgaaagctcagctggggttgtgcaagctagggacccattcctgtgtaatacaatgtctgcaccaatgctaataaagtcctattctcttttatgagaaagaaaaagacaccgtcctttaaagtgctgcagtatggccagacgtggtggctcacacctgcaatcccagcaccttaggaggccgaggcaggaggatccttgaggtcaggagttcgagaccagcctcgccaacatggtgaaaccccatttctactaaaaatacaaaaaattagccaagtgtggtggcatatgcctgtaatcccaactactcagaaggccgaggcaggagaattacttgaacgcaggagaatcactgcagcccaggaggcagaggttgcagtgagccgagattgcaccactgcactccagcctgggtgacagagcaagactccatctcagtaaataaataaataaataaaaagcgctgcagtagctgtggcctcaccctgaagtcagcgggcccaggcctacctcactctctcccttggcagagaagcagacgtccatagctcctctccctcacaagcgctcccagcctgccctccagctgctgctctcccctcccagtctctactcactgggatgaggttaggtcatgaggacaccaaaaacctaaaaataaacaaaaagccaaacaagccttagcttttcttaaagactgaaatgcctggaagtgtccctttatttataaaataacttttgtcatatttcttatacatgtttcttgtaagaaattcagaaactacagacaaagagagtggaaattacccactgtcaggcctctgagcccaagctaagccatcatatcccctgtgccctgcacgtatacacccagatggcctgaagcaactgaagatccacaaaagaagtgaaaatagccagttcctgccttaactgatgacattccaccattgtgatttgttcctgccccaccctaactgatcaattgaccttgtgacaatacaccttccccacccttgagaaggtgctttgtaatattctccccacccaccccacgcccgcacccccgcacccttaagaaggtattttgtaatattctctccgccattgagaatgtgctttgtaagatccaccccctgcccacaaaaaattgctcctaactccaccgcctatcccaaacctacaagaactaatgataatcccaccaccctttgctgactctttttggactcagcccacctgcacccaggtgattaaaaagctttattgttcacacaaagcctgtttggtagtctcttcacagggaagcatgtgacacccacaatcccacctagcccaggagagagctacggcagggtgtgtgttttgacactgagcttggggctttttccatcttctccccacagcctctggctccacacctccaccgttcaagcgccagaaagagctgtctatgcagcctgctcttgggcctggggatgagacacacaattcattggctcctggattttaagtagacatttgtaaatctatagctaactactgtccttaaagccattgtttccattacaaaatccaactctctgagagaaaagggtgttttaaatttaaaaaaataaaaacaaaaaagtttgattgagacaa

SEQ ID NO: 187649 - DNA, 532 bp, Homo sapiens
  Payload ID: 16935
  Gene Symbol: SFTPB
  Gene Name: surfactant protein B
  ENST ID: ENST00000494165
  CDS Start-End: 1-277
agaatggctgccgcgagactctgagtgccacctctgcatgtccgtgaccacccaggccgggaacagcagcgagcaggccataccacaggcaatgctccaggcctgtgttggctcctggctggacagggaaaagtgcaagcaatttgtggagcagcacacgccccagctgctgaccctggtgcccaggggctgggatgcccacaccacctgccaggccctcggggtgtgtgggaccatgtccagccctctccagtgtatccacagccccgacctttgatgagaactcagctgtccaggtgagtccaggcccccagttgcggggaggtaagggggcaggtcctgaccatcagggcatgggaggcccttctgctccccaagcaggaagaggcggccactcctgccggctgctccatcctccctctcaccgcacagctggaggctcctgagggcttctggctggccatcaggaaaacaccctttccggaccccgagcactgccccgcccagaaccccagtcactgagtgcccaacc

SEQ ID NO: 187650 - DNA, 997 bp, Homo sapiens
  Payload ID: 16936
  Gene Symbol: SFTPC
  Gene Name: surfactant protein C
  Uniprot ID: P11686
  ENST ID: ENST00000318561
  CDS Start-End: 175-768
cttatctgggcttcggttctggagggccaggaacaaacaggcttcaaagccaagggcttggctggcacacagggggcttggtccttcacctctgtcccctctccctacggacacatataagaccctggtcacacctgggagaggaggagaggagagcatagcacctgcagcaagatggatgtgggcagcaaagaggtcctgatggagagcccgccggactactccgcagctccccggggccgatttggcattccctgctgcccagtgcacctgaaacgccttcttatcgtggtggtggtggtggtcctcatcgtcgtggtgattgtgggagccctgctcatgggtctccacatgagccagaaacacacggagatggttctggagatgagcattggggcgccggaagcccagcaacgcctggccctgagtgagcacctggttaccactgccaccttctccatcggctccactggcctcgtggtgtatgactaccagcagctgctgatcgcctacaagccagcccctggcacctgctgctacatcatgaagatagctccagagagcatccccagtcttgaggctctcactagaaaagtccacaacttccagatggaatgctctctgcaggccaagcccgcagtgcctacgtctaagctgggccaggcagaggggcgagatgcaggctcagcaccctccggaggggacccggccttcctgggcatggccgtgagcaccctgtgtggcgaggtgccgctctactacatctaggacgcctccggtgagcagggtcagtggaagccccaacgggaaaggaaacgccccgggcaaagggtcttttgcagcttttgcagacgggcaagaagctgcttctgcccacaccgcagggacaagccctggagaaatgggagcttggggagaggatgggagtgggcagaggtggcgcccaggggcccgggaactcctgccacaacagaataaagcagcctgattgaaaagc

SEQ ID NO: 187651 - DNA, 773 bp, Homo sapiens
  Payload ID: 16936
  Gene Symbol: SFTPC
  Gene Name: surfactant protein C
  ENST ID: ENST00000437090
  CDS Start-End: 32-517
gaggagaggagagcatagcacctgcagcaagatggatgtgggcagcaaagaggtcctgatggagagcccgccggactactccgcagctccccggggccgatttggcattccctgctgcccagtgcacctgaaacgccttcttatcgtggtggtggtggtggtcctcatcgtcgtggtgattgtgggagccctgctcatgggtctccacatgagccagaaacacacggagatggttctggagatgagcattggggcgccggaagcccagcaacgcctggccctgagtgagcacctggttaccactgccaccttctccatcggctccactggcctcgtggtgtatgactaccagcagctgctgatcgcctacaagccagcccctggcacctgctgctacatcatgaagatagctccagagagcatccccagtcttgaggctctcactagaaaagtccacaacttccagcacagcccctctttactgatgagaaaactgaggctcagagagattgcctgatatacctgaagtcccacaataagggctgcacatgggatagaaactcacttcctacattccagatggaatgctctctgcaggccaagcccgcagtgcctacgtctaagctgggccaggcagaggggcgagatgcaggctcagcaccctccggaggggacccggccttcctgggcatggccgtgagcaccctgtgtggcgaggtgccgctctactacatctaggacgcctccggtgagcaggtgtgatcccagggccc

SEQ ID NO: 187652 - DNA, 921 bp, Homo sapiens
  Payload ID: 16936
  Gene Symbol: SFTPC
  Gene Name: surfactant protein C
  ENST ID: ENST00000522109
  CDS Start-End: 25-477
ggagagcatagcacctgcagcaagatggatgtgggcagcaaagaggtcctgatggagagcccgccggactactccgcagctccccggggccgatttggcattccctgctgcccagtgcacctgaaacgccttcttatcgtggtggtggtggtggtcctcatcgtcgtggtgattgtgggagccctgctcatgggtctccacatgagccagaaacacacggagatggttctggagatgagcattggggcgccggaagcccagcaacgcctggccctgagtgagcacctggttaccactgccaccttctccatcggctccactggcctcgtggtgtatgactaccagcagctgctgatcgcctacaagccagcccctggcacctgctgctacatcatgaagatagctccagagagcatccccagtcttgaggctctcactagaaaagtccacaacttccaggtgtgtgtgtgtgggtgaaaagagtgggctgtctccctcccagggctgctgggaggagtgtccgaatggtggctatttgtcacctgtaaagcactgttcctcattggctgccagctgactgcccctctcctattcccctgcacgactcctttccttcccaccccactgccaagctgctgggctcagctgagtccactcactacctggtggcttctgactctagcacagcccctctttactgatgagaaaactgaggctcagagagattgcctgatatacctgaagtcccacaataagggctgcacatgggatagaaactcacttcctacattccagatggaatgctctctgcaggccaagcccgcagtgcctacgtctaagctgggccaggcagaggggcgagatgcaggctcagcaccctccggaggggacccggccttcctgggcatggccgtgagcacc

SEQ ID NO: 187653 - DNA, 681 bp, Homo sapiens
  Payload ID: 16936
  Gene Symbol: SFTPC
  Gene Name: surfactant protein C
  ENST ID: ENST00000524255
  CDS Start-End: 23-457
agagcatagcacctgcagcaagatggatgtgggcagcaaagaggtcctgatggagagcccgccggttctggagatgagcattggggcgccggaagcccagcaacgcctggccctgagtgagcacctggttaccactgccaccttctccatcggctccactggcctcgtggtgtatgactaccagcagctgctgatcgcctacaagccagcccctggcacctgctgctacatcatgaagatagctccagagagcatccccagtcttgaggctctcactagaaaagtccacaacttccagatggaatgctctctgcaggccaagcccgcagtgcctacgtctaagctgggccaggcagaggggcgagatgcaggctcagcaccctccggaggggacccggccttcctgggcatggccgtgagcaccctgtgtggcgaggtgccgctctactacatctaggacgcctccgggtcagtggaagccccaacgggaaaggaaacgccccgggcaaagggtcttttgcagcttttgcagacgggcaagaagctgcttctgcccacaccgcagggacaagccctggagaaatgggagcttggggagaggatgggagtgggcagaggtggcgcccaggggcccgggaactcctgccacaacagaataaagcagcctgattgaaaagcaaa

SEQ ID NO: 187654 - DNA, 395 bp, Homo sapiens
  Payload ID: 16936
  Gene Symbol: SFTPC
  Gene Name: surfactant protein C
  ENST ID: ENST00000523296
  CDS Start-End: 22-395
gagcatagcacctgcagcaagatggatgtgggcagcaaagaggtcctgatggagagcccgccggttctggagatgagcattggggcgccggaagcccagcaacgcctggccctgagtgagcacctggttaccactgccaccttctccatcggctccactggcctcgtggtgtatgactaccagcagctgctgatcgcctacaagccagcccctggcacctgctgctacatcatgaagatagctccagagagcatccccagtcttgaggctctcactagaaaagtccacaacttccaggccaagcccgcagtgcctacgtctaagctgggccaggcagaggggcgagatgcaggctcagcaccctccggaggggacccggccttcctgggcatggc

SEQ ID NO: 187655 - DNA, 519 bp, Homo sapiens
  Payload ID: 16936
  Gene Symbol: SFTPC
  Gene Name: surfactant protein C
  ENST ID: ENST00000520605
  CDS Start-End: 30-497
ggagaggagagcatagcacctgcagcaagatggatgtgggcagcaaagaggtcctgatggagagcccgccggttctggagatgagcattggggcgccggaagcccagcaacgcctggccctgagtgagcacctggttaccactgccaccttctccatcggctccactggcctcgtggtgtatgactaccagcagctgctgatcgcctacaagccagcccctggcacctgctgctacatcatgaagatagctccagagagcatccccagtcttgaggctctcactagaaaagtccacaacttccagggtcagtggaagccccaacgggaaaggaaacgccccgggcaaagggtcttttgcagcttttgcagacgggcaagaagctgcttctgcccacaccgcagggacaagccctggagaaatgggagcttggggagaggatgggagtgggcagaggtggcgcccaggggcccgggaactcctgccacaacagaataaagcagcctgattgaaaagcaaa

SEQ ID NO: 187656 - DNA, 1046 bp, Homo sapiens
  Payload ID: 16936
  Gene Symbol: SFTPC
  Gene Name: surfactant protein C
  ENST ID: ENST00000521315
  CDS Start-End: 33-608
ggaggagaggagagcatagcacctgcagcaagatggatgtgggcagcaaagaggtcctgatggagagcccgccggactactccgcagctccccggggccgatttggcattccctgctgcccagtgcacctgaaacgccttcttatcgtggtggtggtggtggtcctcatcgtcgtggtgattgtgggagccctgctcatgggtctccacatgagccagaaacacacggagatggttctggagatgagcattggggcgccggaagcccagcaacgcctggccctgagtgagcacctggttaccactgccaccttctccatcggctccactggcctcgtggtgtatgactaccagcagctgctgatcgcctacaagccagcccctggcacctgctgctacatcatgaagatagctccagagagcatccccagtcttgaggctctcactagaaaagtccacaacttccaggccaagcccgcagtgcctacgtctaagctgggccaggcagaggggcgagatgcaggctcagcaccctccggaggggacccggccttcctgggcatggccgtgagcaccctgtgtggcgaggtgccgctctactacatctaggacgcctccggtgagcaggtgtgatcccagggcccctgatcagcagcggaggagcgctcgggccacctgcccgggctgtggaggagcgctcgcgctgaccaggcgctggggcgtccactgaagcggggtcatccaggcaactcgggggaggggaagctcacagaccggtacttcccactcccctgattctctctgtccatcctcaacattcctttgcttcacagggtcagtggaagccccaacgggaaaggaaacgccccgggcaaagggtcttttgcagcttttgcagacgggcaagaagctgcttctgcccacaccgcagggacaagccctggagaaatgggagcttggggagaggatgggagtgggcagaggtggcgcccaggggcccgggaactcctgccacaacagaataaagcagcctgattgaaaagcaaa

SEQ ID NO: 187657 - DNA, 1281 bp, Homo sapiens
  Payload ID: 16937
  Gene Symbol: SFTPD
  Gene Name: surfactant protein D
  Uniprot ID: P35247
  ENST ID: ENST00000372292
  CDS Start-End: 42-1169
tttgcttggagctcctggggcctaacaaaaagaaacctgccatgctgctcttcctcctctctgcactggtcctgctcacacagcccctgggctacctggaagcagaaatgaagacctactcccacagaacaatgcccagtgcttgcaccctggtcatgtgtagctcagtggagagtggcctgcctggtcgcgatggacgggatgggagagagggccctcggggcgagaagggggacccaggtttgccaggagctgcagggcaagcagggatgcctggacaagctggcccagttgggcccaaaggggacaatggctctgttggagaacctggaccaaagggagacactgggccaagtggacctccaggacctcccggtgtgcctggtccagctggaagagaaggtcccctggggaagcaggggaacataggacctcagggcaagccaggcccaaaaggagaagctgggcccaaaggagaagtaggtgccccaggcatgcagggctcggcaggggcaagaggcctcgcaggccctaagggagagcgaggtgtccctggtgagcgtggagtccctggaaacacaggggcagcagggtctgctggagccatgggtccccagggaagtccaggtgccaggggacccccgggattgaagggggacaaaggcattcctggagacaaaggagcaaagggagaaagtgggcttccagatgttgcttctctgaggcagcaggttgaggccttacagggacaagtacagcacctccaggctgctttctctcagtataagaaagttgagctcttcccaaatggccaaagtgtcggggagaagattttcaagacagcaggctttgtaaaaccatttacggaggcacagctgctgtgcacacaggctggtggacagttggcctctccacgctctgccgctgagaatgccgccttgcaacagctggtcgtagctaagaacgaggctgctttcctgagcatgactgattccaagacagagggcaagttcacctaccccacaggagagtccctggtctattccaactgggccccaggggagcccaacgatgatggcgggtcagaggactgtgtggagatcttcaccaatggcaagtggaatgacagggcttgtggagaaaagcgtcttgtggtctgcgagttctgagccaactggggtgggtggggcagtgcttggcccaggagtttggccagaagtcaaggcttagaccctcatgctgccaatatcctaataaaaaggtgaccatctgtgccgggaa

SEQ ID NO: 187658 - DNA, 659 bp, Homo sapiens
  Payload ID: 16937
  Gene Symbol: SFTPD
  Gene Name: surfactant protein D
  ENST ID: ENST00000444384
  CDS Start-End: 5-659
agacatgtttctcagcacctccaaacatgggcggcaagaggccatgctgctcttcctcctctctgcactggtcctgctcacacagcccctgggctacctggaagcagaaatgaagacctactcccacagaacaatgcccagtgcttgcaccctggtcatgtgtagctcagtggagagtggcctgcctggtcgcgatggacgggatgggagagagggccctcggggcgagaagggggacccaggtttgccaggagctgcagggcaagcagggatgcctggacaagctggcccagttgggcccaaaggggacaatggctctgttggagaacctggaccaaagggagacactgggccaagtggacctccaggacctcccggtgtgcctggtccagctggaagagaaggtcccctggggaagcaggggaacataggacctcagggcaagccaggcccaaaaggagaagctgggcccaaaggagaagtaggtgccccaggcatgcagggctcggcaggggcaagaggcctcgcaggccctaagggagagcgaggtgtccctggtgagcgtggagtccctggaaacacaggggcagcagggtctgctggagccatgggtccccagggaagtccaggtgccaggggacccccgggattgaaggggg

SEQ ID NO: 187659 - DNA, 1093 bp, Homo sapiens
  Payload ID: 16938
  Gene Symbol: SURF1
  Gene Name: surfeit 1
  Uniprot ID: Q15526
  ENST ID: ENST00000371974
  CDS Start-End: 33-935
gcgtcccggaagcgcccgcggggccgggtgcgatggcggcggtggctgcgttgcagctggggctgcgggcggcggggctgggacgggccccggccagcgccgcctggaggagcgtcctcagggtctccccgcgcccaggggtggcctggaggccaagcagatgtggcagttctgcagcagaagcatctgccacaaaagcggaagatgactcctttcttcagtgggtcctgctcctcatccctgtgactgcctttggcttggggacatggcaggtccagcgtcggaagtggaagctgaacctgattgcagagttggagtccagagttctggctgagcctgtccctctgccagccgacccaatggaactgaaaaatctggagtataggccagtgaaggtcagggggtgctttgaccattccaaggagctgtatatgatgccccggaccatggtggaccctgtccgggaggcccgggagggcggcctcatctcctcctcaactcagagtggggcctatgtggtcactcccttccactgcaccgacctgggagtcaccatcctggtaaatagagggttcgttcccaggaagaaagtgaatcctgaaacccggcagaaaggccagattgagggagaagtggacctcattgggatggtgaggctgacagaaaccaggcagccttttgtccctgagaacaatccagaaaggaaccactggcattatcgagacctggaagctatggccagaatcacaggcgcagagcccatcttcattgatgccaacttccagagcacagtccctggaggacccattggagggcaaaccagagttactctgaggaacgagcatctgcagtacatcgtgacctggtatggactctctgcagctacatcctacctgtggtttaagaaattcctacgtgggacacctggtgtgtgacagatcagctgctgaagccctgtccctggataatgcagtatttcaagactgcctttatgctggatcatgtgctactggtataaagttctggccttctaccttaaatgagctcatgactggttcatcataaaatcctggcttggtttcagtccaaagaa

SEQ ID NO: 187660 - DNA, 991 bp, Homo sapiens
  Payload ID: 16938
  Gene Symbol: SURF1
  Gene Name: surfeit 1
  ENST ID: ENST00000615505
  CDS Start-End: 308-883
gcgtcccggaagcgcccgcggggccgggtgcgatggcggcggtggctgcgttgcagctggggctgcgggcggcggggctgggacgggggtggcctggaggccaagcagatgtggcagttctgcagcagaagcatctgccacaaaagcggaagatgactcctttcttcagtgggtcctgctcctcatccctgtgactgcctttggcttggggacatggcaggtccagcgtcggaagtggaagctgaacctgattgcagagttggagtccagagttctggctgagcctgtccctctgccagccgacccaatggaactgaaaaatctggagtataggccagtgaaggtcagggggtgctttgaccattccaaggagctgtatatgatgccccggaccatggtggaccctgtccgggaggcccgggagggcggcctcatctcctcctcaactcagagtggggcctatgtggtcactcccttccactgcaccgacctgggagtcaccatcctggtaaatagagggttcgttcccaggaagaaagtgaatcctgaaacccggcagaaaggccagattgagggagaagtggacctcattgggatggtgaggctgacagaaaccaggcagccttttgtccctgagaacaatccagaaaggaaccactggcattatcgagacctggaagctatggccagaatcacaggcgcagagcccatcttcattgatgccaacttccagagcacagtccctggaggacccattggagggcaaaccagagttactctgaggaacgagcatctgcagtacatcgtgacctggtatggactctctgcagctacatcctacctgtggtttaagaaattcctacgtgggacacctggtgtgtgacagatcagctgctgaagccctgtccctggataatgcagtatttcaagactgcctttatgctggatcatgtgctactggtataaagttctggccttctaccttaaatga

SEQ ID NO: 187661 - DNA, 991 bp, Homo sapiens; identical to SEQ ID NO: 187660
  Payload ID: 16938
  Gene Symbol: SURF1
  Gene Name: Surfeit 1
  ENST ID: ENST00000628258
  CDS Start-End: 308-883

SEQ ID NO: 187662 - DNA, 1093 bp, Homo sapiens; identical to SEQ ID NO: 187659
  Payload ID: 16938
  Gene Symbol: SURF1
  Gene Name: Surfeit 1
  ENST ID: ENST00000626663
  CDS Start-End: 33-935

SEQ ID NO: 187663 - DNA, 842 bp, Homo sapiens
  Payload ID: 16939
  Gene Symbol: SURF2
  Gene Name: surfeit 2
  Uniprot ID: Q15527
  ENST ID: ENST00000371964
  CDS Start-End: 42-812
gcgagcggcttccgccgggctgctccgcgggcgcgtcggccatgagcgagttgccgggcgacgtgcgggcgtttctgcgggagcacccgagcctgcggctccagacggacgcccgcaaggtgaggtgcatcctgacaggtcacgagctgccctgccgcctgccggagctccaggtctacacccgcggcaaaaagtaccagcggctggtccgcgcctccccggccttcgactatgcagagttcgagccgcacatcgtgcccagcaccaagaacccgcaccagttgttctgcaaactcaccctgcggcacatcaacaagtgcccagaacacgtgctgaggcacacccagggccggcggtaccagcgagctctgtgtaaatatgaagaatgtcagaagcaaggggtggagtacgtgcctgcctgcctggtgcaccggaggaggaggagggaggaccagatggacggtgacgggcctcgcccgcgggaagccttctgggagcccacatccagtgatgaggggggagctgcaagtgatgacagcatgacagacctgtacccacctgagctattcaccagaaaggaccttggaagcacggaggatggggatggcactgatgactttttgacagacaaagaggatgagaaggcaaagcccccaagagagaaggccactgatgagggcaggagagagacgaccgtgtaccgagggctggtccagaagcgcgggaagaagcagttgggctcgttgaaaaagaagttcaagagtcatcaccgcaaacccaagagcttcagctcctgtaaacagccaggttaataaaagcacatgccgtgaagtttcgagaaa

SEQ ID NO: 187664 - DNA, 842 bp, Homo sapiens; identical to SEQ ID NO: 187663
  Payload ID: 16939
  Gene Symbol: SURF2
  Gene Name: Surfeit 2
  ENST ID: ENST00000630633
  CDS Start-End: 42-812

SEQ ID NO: 187665 - DNA, 2984 bp, Homo sapiens; identical to SEQ ID NO: 141364
  Payload ID: 16940
  Gene Symbol: SURF4
  Gene Name: surfeit 4
  Uniprot ID: O15260
  ENST ID: ENST00000371989
  CDS Start-End: 131-940

SEQ ID NO: 187666 - DNA, 715 bp, Homo sapiens; identical to SEQ ID NO: 141367
  Payload ID: 16940
  Gene Symbol: SURF4
  Gene Name: surfeit 4
  ENST ID: ENST00000371991
  CDS Start-End: 75-635

SEQ ID NO: 187667 - DNA, 1206 bp, Homo sapiens; identical to SEQ ID NO: 141368
  Payload ID: 16940
  Gene Symbol: SURF4
  Gene Name: surfeit 4
  Uniprot ID: O15260
  ENST ID: ENST00000485435
  CDS Start-End: 131-610

SEQ ID NO: 187668 - DNA, 2863 bp, Homo sapiens; identical to SEQ ID NO: 141366
  Payload ID: 16940
  Gene Symbol: SURF4
  Gene Name: surfeit 4
  Uniprot ID: O15260
  ENST ID: ENST00000545297
  CDS Start-End: 198-584

SEQ ID NO: 187669 - DNA, 3148 bp, Homo sapiens; identical to SEQ ID NO: 141363
  Payload ID: 16940
  Gene Symbol: SURF4
  Gene Name: surfeit 4
  ENST ID: ENST00000613129
  CDS Start-End: 425-1105

SEQ ID NO: 187670 - DNA, 3200 bp, Homo sapiens; identical to SEQ ID NO: 141365
  Payload ID: 16940
  Gene Symbol: SURF4
  Gene Name: surfeit 4
  ENST ID: ENST00000618229
  CDS Start-End: 477-1157

SEQ ID NO: 187671 - DNA, 4447 bp, Homo sapiens
  Payload ID: 16941
  Gene Symbol: SURF6
  Gene Name: surfeit 6
  Uniprot ID: O75683
  ENST ID: ENST00000372022
  CDS Start-End: 267-1352
gggtgatagaggcactgaggccaggccccgggggtgccctgctgcaccgactccgggcggagattggctgtcctcggcccgcaatgctgtgcgccccgccccgcgcgccgcttccggcggagtcaggcttggctaatcgagcgcgcgggctggcggctcggcgttcgtttggccgcgcctgcccgtgtggtggtttccggcggaggtggtgagagtcgcacgcgcagcggggaaggtgtgagtcgtgaacggcccgggtctccgccatggcctctctactcgccaaggacgcctacctgcagagcctggccaagaagatctgctcccattcggccccggaacagcaggcgcgcacgcgggctggcaaaactcaaggctcagaaactgcagggcccccaaaaaagaaaaggaagaaaacacaaaagaaattccggaagcgagaagagaaggctgctgagcacaaggccaagtccttgggggagaaatctccagcagcctctggggccaggaggcctgaggcagccaaagaggaagcagcttgggcttccagctcagcagggaaccctgcagatggcctggccactgagcctgagtctgtctttgctctggatgttctgcgacagcgactgcatgagaagatccaggaggcccggggccagggcagtgccaaggagctgtcccctgccgccttggagaaaaggcggcggagaaagcaggaacgggaccggaagaagaggaagcgaaaggagctgcgggcgaaagagaaggccaggaaggctgaggaggccacggaggcccaggaggtggtggaggcaaccccagagggggcctgcacggagccgcgggagccgcccgggctgatcttcaataaggtggaggtgagcgaagacgagccggccagcaaggcgcagcgcagaaaagagaagaggcagagggtgaaggggaacctcacgccgctgaccgggaggaactaccggcagctgctggagcgcctgcaggcacggcagagccggctggacgagctgcgcggccaggatgaggggaaggcgcaggagctggaggcgaagatgaagtggaccaacctcctctacaaggcggagggcgtgaagatccgtgacgacgaacgcctgctgcaggaggccctgaagcgcaaggagaagcgcagggcgcagcggcagcgccggtgggagaagcgcacggccggcgtggtggagaagatgcagcagcgccaggaccggcggcggcagaacctgcgcaggaagaaggcggcccgcgccgagcgccgcctgctcagagcccgcaagaagggccgcatcctgccgcaggacctggagcgcgcaggcctggtctgagtctttcccacctggggccgccgtcttccgtcctaggagactccaggacaccctctgagtccttgacgctggctctgtcccaggatctccacagacctcggcctctccatgtgagggggacacagtggtgctctgctgagttgtgagggcccagatcacagatcccatgtgagaaagagagagtttcagcgtcatccttgaacgcaggatccgggaccttcagacccagggaaagggtgagggagactggggcctggtctgctttcccgggcctgaaagcttccccgaggtttgcagggtcagggaggaggaacggtgggggtgggcagtcactgcctgttccccactgcctgtgttcgcaggagccacgggacagaagacggtggcctctgctgccgggccacgttagtccgcagctcacccgaacagaggacaaccctgaggtgtggcatatgggcacctggcactgggagtcgggggagcacgtccaggcgtggtgcatcctggggcagaacgccatggctcctccccgctctcttggcttctgcctgttggggtctcattcctttctgttccccagtgccccggggcggcattttactgctcagaatttggagggagggagcagtaccttcccggagtccacgcatgtgagttgggtcaagtgcattggacctagggaaagagaaagaaagaataaaagctggagagagagtgaagtgaatgcaagatacaaagtgggatggaagaattaaatccagagttccaggcaatcaaaatgagtgcaggttgaaagaaaacaggtgaattttagtggcatatggatgataaagctgtaaataaaattcttttgatgaaactctccggttatgagacaaagactgtaactgaacaggagctggtgtgactgttaccagacagaggcaactgatgaaaaagccctgtgaaagataggatgtgaggtgagcatgagcttgagctgagagacagacacaacagtatctgaaaagaatacatactctttccatgcatatatggaacatggatggaaactgaccacctactttgtccagaaaagaagtcttaagatatttcaaggaatcagtgtcgttatctgaccgtatcccaatgtcattaaaaaaaatttgagctatttttttttgttttttagatagagtcttgctctgtcactcaggctggagtgcagtggcatttcatatttggaatttttaaaacacacttataaattacctatgagttaaagaattccgaatggctattagaaatatttgggactaaaggataatgaaaatgctacgtattaaaatttgtggaacagggcctggcatggtggctcatgctgtcaatcccagctctttgggaggcgggtggatcacttgagatcaggagttcaaggctagcctggacaacatgataaaaccccatctctattaaaaataaaaaattagctgggtgtggtggtgcaaacctgtagtcccagctgcttgggaggctgaggcgggagaatcacttgaacccaggaggtagaggctgcagtgagccaagatcgagccgctgcactccagcctgggtgacagagcaagactgtctcaaaaagaaaaaatttaagatttgtggaacagagctaaagcagcacaaaaaaacatagcccctaaatgtatgtgcatctacagataaatagtgccatttatacacacatacgctgtatgtctgtatttttaaagctaaagaaaaataagcatgcagcttaagttggaacaactcaaagtaaatggaagaaaaatctccaaaactgactaaaagtaatagaaagcctgagttgtaatcactgatgaaattgagtcagtagttaagaatgttcccctagacggttttacagggaagttccacgatatagagaacaggtaattccagacgtagacaaattctaacagaatcaattgagagaacacttcattcgtgaacttagctttgataccaaaactaggtaagagaaagggaagttaccaaatacctgtgggcggcaagccacccaggcgccgaggcaagagacagaggacacgagctgttccagtataataaaatataaaacaagaatagttacagcagatatagatcttagatatgattacatatgaatatcattaatcattagtttgtagcaattaccttttattccaatattataataatcctcgctctataatcatagcctaggaaaaaccaggccatacagagataggagctgaggggacataggtgtgaccagaagacaagagtgcgagccttctgttatgcccggacagggccaccagagggctccttggtctagcggtgacgccagcgtctgggaagacgcccgttgccaggtggaccatggtctagcagtagcaaaaagtatcaaggaacaacacccgctacttagcagaccgggaaagggagtgtccctttccctggaggagtttagagaagactctgctcttccacctcttgtggagggcctgacatccggcaggcctgcccgcagttatctggaggcctaaccgtctccctgtgatgctgtgcttcagtggtcacgctcctagtccgccttcatgttccatcctgtacacctggctctgccttctagatagcagtagtaaattagtgaaagtactaaaagtctctgatatgcagaagtaatggcataagctgtctttctctctgtctcctctctctctctgcctcggctgccaggcagggaagggcaccctgtccagtggacacgtgatccacgtgaccttacctatcattggagatgactcacactctttaccctgccccttttgctttgtatccaataaataacaatgcagccagacattcggggccactaccggtctccgagcattggtagtagtggtctcccgggcccagctgccttttcttttatctctttgtcttgtgtgtgtatttctacactctctcattgctgcacacagggagggagagacccacggaccctgtggggctggtccctacaaataccaatgtcaagattttagacaataataaaccaagtttagcaaagtgcc

SEQ ID NO: 187672 - DNA, 4447 bp, Homo sapiens; identical to SEQ ID NO: 187671
  Payload ID: 16942
  Gene Symbol:
  Gene Name: Surfeit locus protein 6 [Source:UniProtKB/Swiss-Prot
  Acc:O75683]
  Uniprot ID: O75683
  ENST ID: ENST00000629980
  CDS Start-End: 267-1352

SEQ ID NO: 187673 - DNA, 2423 bp, Homo sapiens
  Payload ID: 16943
  Gene Symbol: SUGP1
  Gene Name: SURP and G patch domain containing 1
  Uniprot ID: Q8IWZ8
  ENST ID: ENST00000247001
  CDS Start-End: 349-2286
aacaagccgccgccacagggaggcggaagcaggcgcgcgagacggggccgggctctcctcgcggcttccgcgagatctgccgcccaaagcatcctggaacatgtagtttgtatttgggatgactgccgctccgggaaggtgtaaaagggcgacgccgtttggttatcgtgactgggacttaggcatcgctgataggctgaggcttccgtttctggaggttaaaaaaaaaaaaacccagtcgttcacgcagtaatagggcgagtctgaccgaggcggactacatctcccatcaggcgatgcacactataacagggccccttaaggggcgccggagcattgtgggattggatgagtctcaagatggacaaccgggatgttgcaggaaaggctaaccggtggtttggggttgctccccctaaatctggaaaaatgaacatgaacatccttcaccaggaagagctcatcgctcagaagaaacgggaaattgaagccaaaatggaacagaaagccaagcagaatcaggtggccagccctcagcccccacatcctggcgaaatcacaaatgcacacaactcttcctgcatttccaacaagtttgccaacgatggtagcttcttgcagcagtttctgaagttgcagaaggcacagaccagcacagacgccccgaccagtgcgcccagcgcccctcccagcacacccacccccagcgctgggaagaggtccctgctcatcagcaggcggacaggcctggggctggccagcctgccgggccctgtgaagagctactcccacgccaagcagctgcccgtggcgcaccgcccgagtgtcttccagtcccctgacgaggacgaggaggaggactatgagcagtggctggagatcaaagtttcacccccagagggagccgagactcggaaagtgatagagaaattggcccgctttgtggcagaaggaggccccgagttagaaaaagtagctatggaggactacaaggataacccagcatttgcatttttgcacgataagaatagcagggaattcctctactacaggaagaaggtggctgagataagaaaggaagcacagaagtcgcaggcagcctctcagaaagtttcacccccagaggacgaagaggtcaagaaccttgcagaaaagttggccaggttcatagcggacgggggtcccgaggtggaaaccattgccctccagaacaaccgtgagaaccaggcattcagctttctgtatgagcccaatagccaagggtacaagtactaccgacagaagctggaggagttccggaaagccaaggccagctccacaggcagcttcacagcacctgatcccggcctgaagcgcaagtcccctcctgaggccctgtcagggtccttacccccagccaccacctgccccgcctcgtccacgcctgcgcccactatcatccctgctccagctgcccccgggaagccagcctccgcagccaccgtgaagaggaagcggaagagccggtgggggcctgaagaggataaggtagagctcccacctgctgaactggtgcagagggacgtggatgcctctccctcgcctctgtcagttcaggacctcaaggggctcggctatgagaaggggaagcctgtgggtctagtgggcgtcacagagctttcagacgcccagaagaagcagctgaaggagcagcaggagatgcagcagatgtacgacatgatcatgcagcacaagcgggccatgcaggacatgcagctgctgtgggagaaggcagtccaacagcaccagcacggctatgacagtgatgaggaggtggacagcgagctgggcacctgggagcaccagctgcggcgcatggagatggataagaccagggaatgggccgagcagctgacaaagatgggccggggcaagcacttcatcggagacttcctgcctccagacgagctggaaaagtttatggagaccttcaaggccctgaaggagggccgtgagcctgactactcagagtacaaggagttcaagctgactgtggagaacatcggctaccagatgctgatgaagatgggctggaaggagggcgaggggctgggctcagagggccagggcatcaagaacccagtgaacaagggcaccaccacagtggacggcgctggcttcggcattgaccggccggcggagctctccaaggaggacgacgagtatgaggcgttccgcaagaggatgatgctggcctaccgcttccggcccaaccccctgaacaatcccagacggccttactactgagtgttctggaaatacatactttctgaatgaccaaccgtccctggactgtggaatgttccggcctgcatttctgcccaccccttccgttgtcacgagtgccgtgccgtgtaataaagtcccagtgctcatccaccaca

SEQ ID NO: 187674 - DNA, 1094 bp, Homo sapiens
  Payload ID: 16943
  Gene Symbol: SUGP1
  Gene Name: SURP and G patch domain containing 1
  ENST ID: ENST00000535070
  CDS Start-End: 14-571
attgtgggattggatgagtctcaagatggacaaccgggatgttgcaggaaaggctaaccggtggtttggggttgctccccctaaatctggaaaaatgaacatgaacatccttcaccaggaagagctcatcgctcagaagaaacgggaaattgaagccaaaatggaacagaaagccaagcagaatcaggtggccagccctcagcccccacatcctggcgaaatcacaaatgcacacaactcttcctgcatttccaacaagtttgccaacgatggtagcttcttgcagcagtttctgaagttgcagaaggcacagaccagcacagacgccccgaccagtgcgcccagcgcccctcccagcacacccacccccagcgctgggaagaggtccctgctcatcagcaggcggacaggcctggggctggccagcctgccgggccctgtgaagagctactcccacgccaagcagctgcccgtggcgcaccgcccgagtgtcttccagtcccctgacgaggacgaggaggaggactatgagcagtggctggagatcaaaggaagaaggtggctgagataagaaaggaagcacagaagtcgcaggcagcctctcagaaagtttcacccccagaggacgaagaggtcaagaaccttgcagaaaagttggccaggttcatagcggacgggggtcccgaggtggaaaccattgccctccagaacaaccgtgagaaccaggcattcaggtgcctcatggagaaagtctctagcacttgcccagttgcctttgggacacacagcagcccttggccgggggcaagtcaggctctcaagtggaaattcacagtactgttcagtttatgttgtgtacgttctcagggtctcccctttatgatgagggaaatggcagggaatggggaactttaggatctgtggagggggaacacccagcctgtgtgcgagttccacagaagggtgggtgtgtgacaagcagcctagcctccctgccatccccggccatgcggtcgtaccctagccccagtggctgggtctgtgttcactggctcatccattcattgggtgggtttggcacttgctctgtgccc

SEQ ID NO: 187675 - DNA, 2282 bp, Homo sapiens
  Payload ID: 16943
  Gene Symbol: SUGP1
  Gene Name: SURP and G patch domain containing 1
  Uniprot ID: Q8IWZ8
  ENST ID: ENST00000588731
  CDS Start-End: 14-682
attgtgggattggatgagtctcaagatggacaaccgggatgttgcaggaaaggctaaccggtggtttggggttgctccccctaaatctggaaaaatgaacatgaacatccttcaccaggaagagctcatcgctcagaagaaacgggaaattgaagccaaaatggaacagaaagccaagcagaatcaggtggccagccctcagcccccacatcctggcgaaatcacaaatgcacacaactcttcctgcatttccaacaagtttgccaacgatggtagcttcttgcagcagtttctgaagttgcagaaggcacagaccagcacagacgccccgaccagtgcgcccagcgcccctcccagcacacccacccccagcgctgggaagaggtccctgctcatcagcaggcggacaggcctggggctggccagcctgccgggccctgtgaagagctactcccacgccaagcagctgcccgtggcgcaccgcccgagtgtcttccagtcccctgacgaggacgaggaggaggactatgagcagtggctggagatcaaagtgtgtctcaccaagacagtgagaccgactcccccctcgtcatggtgttttgtgcctggactcgggacgcccgacagcctcctgcatctcacactcttctccccccaccccctctgtcgttgtggtccatagagagagtgtgcctattgactgtggggtgtgtgagttgaaccccagtactgacagcctccttaaagtttcacccccagagggagccgagactcggaaagtgatagagaaattggcccgctttgtggcagaaggaggccccgagttagaaaaagtagctatggaggactacaaggataacccagcatttgcatttttgcacgataagaatagcagggaattcctctactacaggaagaaggtggctgagataagaaaggaagcacagaagtcgcaggcagcctctcagaaagtttcacccccagaggacgaagaggtcaagaaccttgcagaaaagttggccaggttcatagcggacgggggtcccgaggtggaaaccattgccctccagaacaaccgtgagaaccaggcattcagctttctgtatgagcccaatagccaagggtacaagtactaccgacagaagctggaggagttccggaaagccaaggccagctccacaggcagcttcacagcacctgatcccggcctgaagcgcaagtcccctcctgaggccctgtcagggtccttacccccagccaccacctgccccgcctcgtccacgcctgcgcccactatcatccctgctccagctgcccccgggaagccagcctccgcagccaccgtgaagaggaagcggaagagccggtgggggcctgaagaggataaggtagagctcccacctgctgaactggtgcagagggacgtggatgcctctccctcgcctctgtcagttcaggacctcaaggggctcggctatgagaaggggaagcctgtgggtctagtgggcgtcacagagctttcagacgcccagaagaagcagctgaaggagcagcaggagatgcagcagatgtacgacatgatcatgcagcacaagcgggccatgcaggacatgcagctgctgtgggagaaggcagtccaacagcaccagcacggctatgacagtgatgaggaggtggacagcgagctgggcacctgggagcaccagctgcggcgcatggagatggataagaccagggaatgggccgagcagctgacaaagatgggccggggcaagcacttcatcggagacttcctgcctccagacgagctggaaaagtttatggagaccttcaaggccctgaaggagggccgtgagcctgactactcagagtacaaggagttcaagctgactgtggagaacatcggctaccagatgctgatgaagatgggctggaaggagggcgaggggctgggctcagagggccagggcatcaagaacccagtgaacaagggcaccaccacagtggacggcgctggcttcggcattgaccggccggcggagctctccaaggaggacgacgagtatgaggcgttccgcaagaggatgatgctggcctaccgcttccggcccaaccccctgaacaatcccagacggccttactactgagtgttctggaaatacatactttctgaatgaccaaccgtccctggactgtggaatgttccggcctgcatttctgcccaccccttccgttgtcacgagtgccgtgccgtgtaataaagtcccagtgctcatccacca

SEQ ID NO: 187676 - DNA, 2177 bp, Homo sapiens
  Payload ID: 16943
  Gene Symbol: SUGP1
  Gene Name: SURP and G patch domain containing 1
  ENST ID: ENST00000587119
  CDS Start-End: 14-403
attgtgggattggatgagtctcaagatggacaaccgggatgttgcaggaaaggctaaccggtggtttggggttgctccccctaaatctggaaaaatgaacatgaacatccttcaccaggaagagctcatcgctcagaagaaacgggaaattgaagccaaaatggaacagaaagccaagcagaatcaggtggccagccctcagcccccacatcctggcgaacgccccgaccagtgcgcccagcgcccctcccagcacacccacccccagcgctgggaagaggtccctgctcatcagcaggcggacaggcctggggctggccagcctgccgggccctgtgaagagctactcccacgccaagcagctgcccgtggcgcaccgcccgagtgtcttccagtcccctgacgaggacgaggaggaggactatgagcagtggctggagatcaaagtgtgtctcaccaagacagtgagaccgactcccccctcgtcatggtgttttgtgcctggactcgggacgcccgacagcctcctgcatctcacactcttctccccccaccccctctgtcgttgtggtccatagagagagtgtgcctattgactgtggggtgtgtgagttgaaccccagtactgacagcctccttaaagtttcacccccagagggagccgagactcggaaagtgatagagaaattggcccgctttgtggcagaaggaggccccgagttagaaaaagtagctatggaggactacaaggataacccagcatttgcatttttgcacgataagaatagcagggaattcctctactacaggaagaaggtggctgagataagaaaggaagcacagaagtcgcaggcagcctctcagaaagtttcacccccagaggacgaagaggtcaagaaccttgcagaaaagttggccaggttcatagcggacgggggtcccgaggtggaaaccattgccctccagaacaaccgtgagaaccaggcattcagctttctgtatgagcccaatagccaagggtacaagtactaccgacagaagctggaggagttccggaaagccaaggccagctccacaggcagcttcacagcacctgatcccggcctgaagcgcaagtcccctcctgaggccctgtcagggtccttacccccagccaccacctgccccgcctcgtccacgcctgcgcccactatcatccctgctccagctgcccccgggaagccagcctccgcagccaccgtgaagaggaagcggaagagccggtgggggcctgaagaggataaggtagagctcccacctgctgaactggtgcagagggacgtggatgcctctccctcgcctctgtcagttcaggacctcaaggggctcggctatgagaaggggaagcctgtgggtctagtgggcgtcacagagctttcagacgcccagaagaagcagctgaaggagcagcaggagatgcagcagatgtacgacatgatcatgcagcacaagcgggccatgcaggacatgcagctgctgtgggagaaggcagtccaacagcaccagcacggctatgacagtgatgaggaggtggacagcgagctgggcacctgggagcaccagctgcggcgcatggagatggataagaccagggaatgggccgagcagctgacaaagatgggccggggcaagcacttcatcggagacttcctgcctccagacgagctggaaaagtttatggagaccttcaaggccctgaaggagggccgtgagcctgactactcagagtacaaggagttcaagctgactgtggagaacatcggctaccagatgctgatgaagatgggctggaaggagggcgaggggctgggctcagagggccagggcatcaagaacccagtgaacaagggcaccaccacagtggacggcgctggcttcggcattgaccggccggcggagctctccaaggaggacgacgagtatgaggcgttccgcaagaggatgatgctggcctaccgcttccggcccaaccccctgaacaatcccagacggccttactactgagtgttctggaaatacatactttctgaatgaccaaccgtccctggactgtggaatgttccggcctgcatttctgcccaccccttccgttgtcacgagtgccgtgccgtgtaataaagtcccagtgctcatccacc

SEQ ID NO: 187677 - DNA, 2066 bp, Homo sapiens
  Payload ID: 16943
  Gene Symbol: SUGP1
  Gene Name: SURP and G patch domain containing 1
  ENST ID: ENST00000589144
  CDS Start-End: 1-235
cgagactcggaaagtgatagagaaattggcccgctttgtggcagaaggaggccccgagttagaaaaagtagctatggaggactacaaggataacccagcatttgcatttttgcacgataagaatagcagggaattcctctactacaggaagaaggtggctgagataagaaaggaagcacagaagtcgcaggcagcctctcagaaagaaattaggctgttgggtgtggtgagttgagcccagtactgacagcctgcttaaagtttcacccccagaggacgaagaggtcaagaaccttgcagaaaagttggccaggttcatagcggacgggggtcccgaggtggaaaccattgccctccagaacaaccgtgagaaccaggcattcagctttctgtatgagcccaatagccaagggtacaagtactaccgacagaagctggaggagttccggaaagccaaggccagctccacaggcagcttcacagcacctgatcccggcctgaagcgcaagtcccctcctgaggccctgtcagggtccttacccccagccaccacctgccccgcctcgtccacgcctgcgcccactatcatccctgctccagctgcccccgggaagccagcctccgcagccaccgtgaagaggaagcggaagagccggtgggggcctgaagaggataaggtagagctcccacctgctgaactggtgcagagggacgtggatgcctctccctcgcctctgtcagttcaggacctcaaggggctcggctatgagaaggggaagcctgtgggtctagtgggcgtcacagagctttcagacgcccagaagaagcagctgaaggagcagcaggagatgcagcagatgtacgacatgatcatgcagcacaagcgggccatgcaggacatgcagctgctgtgggagaaggcagtccaacagcaccagcacggctatgacagtgatgaggaggtggacagcgagctgggcacctgggagcaccagctgcggcgcatggagatggataagaccagggaatgggccgagcagctgacaaagatgggccggggcaagcacttcatcggagacttcctgcctccagacgagctggaaaagtttatggagaccttcaaggccctgaaggagggccgtgagcctgactactcagagtacaaggagttcaagctgactgtggagaacatcggctaccagatgctgatgaagatgggctggaaggagggcgaggggctgggctcagagggccagggcatcaagaacccagtgaacaagggcaccaccacagtggacggcgctggcttcggcattgaccggccggcggagctctccaaggaggacgacgagtatgaggcgttccgcaagaggatgatgctggcctaccgcttccggcccaaccccctgaacaatcccagacggccttactactgagtgttctggaaatacatactttctgaatgaccaaccgtccctggactgtggaatgttccggcctgcatttctgcccaccccttccgttgtcacgagtgccgtgccgtgtaataaagtcccagtgctcatccaccacagatgcctggtcctgttgcaggaagcccctcctgttagcagcgggatgcaagatgctgtctcggggctctccttattggcctgtggagtctccatccccgctcagcctgggttgcactggaggggaggaagaaagttgttttcagcatagtaaagctggaaggccaggtgcagtgtctcacccctgtcatcccagcactttgagaggccaaggcgggcggatcactggaggtcaggagtttaagaccagcctggccaacatggtgaaatcctgtctctactaaaaatataaaattagctgggcatggtggtgcacacctgtcgtctcagctactcgggaggcagaggcaggagaatggcttgaacctgggaagcggttgcagtgagccaagattgcgcctttgcactccagcctgggcaagagagcaagactctgtctcaaataataataataataataaagctggagacttggccacacctgggctaaaggaa

SEQ ID NO: 187678 - DNA, 601 bp, Homo sapiens
  Payload ID: 16943
  Gene Symbol: SUGP1
  Gene Name: SURP and G patch domain containing 1
  ENST ID: ENST00000591350
  CDS Start-End: 14-124
attgtgggattggatgagtctcaagatggacaaccgggatgttgcagaatcacaaatgcacacaactcttcctgcatttccaacaagtttgccaacgatggtagcttcttgcagcagtttctgaagttgcagaaggcacagaccagcacagacgccccgaccagtgcgcccagcgcccctcccagcacacccacccccagcgctgggaagaggtccctgctcatcagcaggcggacaggcctggggctggccagcctgccgggccctgtgaagagctactcccacgccaagcagctgcccgtggcgcaccgcccgagtgtcttccagtcccctgacgaggacgaggaggaggactatgagcagtggctggagatcaaagtttcacccccagagggagccgagactcggaaagtgatagagaaattggcccgctttgtggcagaaggaggccccgagttagaaaaagtagctatggaggactacaaggataacccagcatttgcatttttgcacgataagaatagcagggaattcctctactacaggaagaaggtggctgagataagaaaggaagcacagaagtcgcaggcagcctctcaga

SEQ ID NO: 187679 - DNA, 532 bp, Homo sapiens
  Payload ID: 16943
  Gene Symbol: SUGP1
  Gene Name: SURP and G patch domain containing 1
  ENST ID: ENST00000585444
  CDS Start-End: 14-223
attgtgggattggatgagtctcaagatggacaaccgggatgttgcaggaaaggctaaccggtggtttggggttgctccccctaaatctggaaaaatgaacatgaacatccttcaccaggaagagctcatcgctcagaagaaacgggaaattgaagccaaaatggaacagaaagccaagcagaatcaggtggccagccctcagcccccacatcctggcgagtaagtgcctgctggggcctggatggggcctggatgtgagtctttgagggtcaccagcacagggtttggcttgtgagggcagtcagcatgtgcttgcacccagccatagcctgatgatccaaggaatgacccagatgcccttgggaggctcactgtggcaagagagaaatgagggaatcacaaatgcacacaactcttcctgcatttccaacaagtttgccaacgatggtagcttcttgcagcagtttctgaagttgcagaaggcacagaccagcacagacgccccgaccagtgcgcccagcgcccctcccag

SEQ ID NO: 187680 - DNA, 764 bp, Homo sapiens
  Payload ID: 16943
  Gene Symbol: SUGP1
  Gene Name: SURP and G patch domain containing 1
  ENST ID: ENST00000590439
  CDS Start-End: 39-764
attgtgggattggatgagtctcaagatggacaaccgggatgttgcaggaagagctcatcgctcagaagaaacgggaaattgaagccaaaatggaacagaaagccaagcagaatcaggtggccagccctcagcccccacatcctggcgaaatcacaaatgcacacaactcttcctgcatttccaacaagtttgccaacgatggtagcttcttgcagcagtttctgaagttgcagaaggcacagaccagcacagacgccccgaccagtgcgcccagcgcccctcccagcacacccacccccagcgctgggaagaggtccctgctcatcagcaggcggacaggcctggggctggccagcctgccgggccctgtgaagagctactcccacgccaagcagctgcccgtggcgcaccgcccgagtgtcttccagtcccctgacgaggacgaggaggaggactatgagcagtggctggagatcaaagtttcacccccagagggagccgagactcggaaagtgatagagaaattggcccgctttgtggcagaaggaggccccgagttagaaaaagtagctatggaggactacaaggataacccagcatttgcatttttgcacgataagaatagcagggaattcctctactacaggaagaaggtggctgagataagaaaggaagcacagaagtcgcaggcagcctctcagaaagtttcacccccagaggacgaagaggtcaagaaccttgcagaaaagttggccaggttcata

SEQ ID NO: 187681 - DNA, 3629 bp, Homo sapiens
  Payload ID: 16944
  Gene Symbol: SUGP2
  Gene Name: SURP and G patch domain containing 2
  Uniprot ID: Q8IX01
  ENST ID: ENST00000330854
  CDS Start-End: 66-3158
gggtgaggagcctgaggcggcggcgggggtggctccgcgcgcggtggtctcgggggcaaaataacatggcagccagacgaattacacaggagacttttgatgctgtattacaagaaaaagccaaacgatatcacatggatgccagtggtgaggctgtaagcgaaactcttcagtttaaagctcaagatctcttaagggcagtcccaagatccagagcagagatgtatgatgacgtccacagcgatggcagatactccctcagtggatctgtagctcactctagagatgccggaagagaaggcctgagaagtgacgtatttccagggccttccttcagatcaagcaacccttccatcagtgatgacagctactttcgcaaagaatgtggccgggatctggaattttctcactctgattctcgggaccaggtcattggccaccggaaattggggcatttccgttctcaggactggaaatttgcgctccgtggttcttgggaacaagactttggccatccagtttctcaagagtcctcttggtcacaggagtatagttttggtccctctgcagttttgggggactttggatcttccaggctgattgagaaagagtgtttggagaaggagagtcgggattatgacgtggaccatcctggggaggctgactctgtgcttaggggcggcagtcaagtccaggccagaggtcgagctctaaacatcgttgaccaggaaggttccctcctaggaaagggggagactcagggcctgctcacagctaaggggggtgttgggaaacttgtcacattgagaaatgtgagcacaaaaaaaatacccaccgtgaatcgtattactcccaaaactcagggcactaaccaaatccagaaaaacactccaagtcctgatgtgaccctggggacaaacccagggacagaagatatccagttccccattcagaagatccctctggggctggatctgaagaatcttcggctccccagaagaaagatgagctttgacatcatagataagtctgatgttttttcaagatttgggatagaaataatcaaatgggcaggattccacaccataaaagatgatattaaattttcccaacttttccagactctctttgaacttgaaacagaaacctgtgctaaaatgcttgcctcattcaaatgttccttaaaaccagagcacagagatttttgcttttttactatcaaatttttaaagcactctgctttgaaaacacccagagttgataatgagtttttaaacatgcttttagacaaaggtgctgtgaagaccaaaaattgcttttttgaaatcataaagccttttgacaagtacataatgagacttcaagaccggcttctgaagagtgtcacacctttgcttatggcctgcaatgcctacgagctaagtgtcaagatgaagaccctcagtaaccccctggacttggctcttgccctagaaaccaccaactctctctgccggaagtctttggcccttttgggacagacattttccttggcctcttctttccggcaggagaaaatcttagaagctgtcggcctgcaagatatagctccctcacctgctgcgtttccaaacttcgaagactccactttgtttgggcgagagtacatagaccacctgaaggcctggctagtcagcagcggatgtcccctccaggttaagaaagccgaaccagagccgatgcgagaggaggagaaaatgattcctcctacgaaacctgaaattcaggccaaggctccaagtagtctgagtgatgctgtcccccagcgagcagatcacagggtagtgggcaccatcgaccagcttgtgaaacgtgtcatcgaaggcagcctgtctcccaaagagagaactcttctcaaagaggaccctgcttactggtttttgtctgatgaaaatagtctggagtataaatattacaagctgaagttggcagaaatgcagcggatgagcgagaacttgcgaggagccgaccagaagccgacctcagcagactgtgcagtgagggccatgctgtactcccgggctgtccgcaacctcaagaagaaactccttccgtggcagcggcgggggctcctccgtgctcaagggctccggggctggaaggcgaggagagcgaccaccgggacccagaccctcctatcctcaggcaccaggctgaaacaccacggccggcaggctccaggcctctcacaggcaaaaccatccctgccagacagaaatgatgctgccaaggactgcccgccagacccagttggaccttctcctcaggaccccagcttagaagcctcaggcccatcccccaagccagcaggagtggacatctctgaagcacctcagacctcttctccctgcccatctgctgacattgacatgaagacaatggagactgcagagaaactggctagatttgttgctcaggtgggaccagagatcgaacaattcagcatagaaaacagcaccgataaccctgacctgtggtttctacatgaccaaaatagttctgctttcaaattctatcgaaagaaagtgtttgaactatgtccatcaatttgtttcacgtcatctccgcacaaccttcacactggtggtggtgacaccacgggttctcaggagagccccgtggacctcatggaaggggaagcagagtttgaagacgagccccctccgcgggaggctgagctggagagcccagaggcctcctcaggtacctgcttccctcggaagaggatcagcagcaagtcattgaaggttggcatgattccagctcccaagagagtgtgtctcatccaggagccaaaagtccatgaaccagttcgaattgcctatgacaggcctcggggtcgtcccatgtccaaaaagaagaaacccaaggacttggacttcgcccagcagaagctgaccgataagaacctgggcttccagatgctgcagaagatgggctggaaggagggccatggcctgggctccctcggaaagggcatcagggagccggtcagcgtgggaaccccctcggaaggggaagggttgggtgctgacgggcaggagcacaaagaagacacattcgatgtgttccgacagaggatgatgcagatgtacagacacaagcgggccaacaaatagttaaatgctttaggaatctgtggcgtgtggccactgaccgccccccacctcctgccgctcctccaagtttgagctgagatggttctgtgagtccttggcaggggtcaaagggcacatctccttgaacctagaaagccccctacactctcagaggacacctctcctgtggattcagcgctggggcagtgaaggtgtcgggagccagcagagcatgttccagggtcacccccgagaggacaacaggcatctggaagtgctctctcgccactctgggtgctttactgtctctggcttgtttccatcactggaaatcacttagagaattgtagtgtttttggtccttgataaagcctagaagacatttgtgatgttacaaaatggaagttttcttttgtttctgttttttaagatctaagaagttgtgaatgttgttaatcatttagccgttgcaataaatgtagaggaaatgca

SEQ ID NO: 187682 - DNA, 3640 bp, Homo sapiens
  Payload ID: 16944
  Gene Symbol: SUGP2
  Gene Name: SURP and G patch domain containing 2
  Uniprot ID: Q8IX01
  ENST ID: ENST00000337018
  CDS Start-End: 135-3383
ctgcgcggcgcggcgctgcggagaccgttggttcatttgcatgtccccgcctcgcgcggcggcggcggcgggtgaggagcctgaggcggcggcgggggtggctccgcgcgcggtggtctcgggggcaaaataacatggcagccagacgaattacacaggagacttttgatgctgtattacaagaaaaagccaaacgatatcacatggatgccagtggtgaggctgtaagcgaaactcttcagtttaaagctcaagatctcttaagggcagtcccaagatccagagcagagatgtatgatgacgtccacagcgatggcagatactccctcagtggatctgtagctcactctagagatgccggaagagaaggcctgagaagtgacgtatttccagggccttccttcagatcaagcaacccttccatcagtgatgacagctactttcgcaaagaatgtggccgggatctggaattttctcactctgattctcgggaccaggtcattggccaccggaaattggggcatttccgttctcaggactggaaatttgcgctccgtggttcttgggaacaagactttggccatccagtttctcaagagtcctcttggtcacaggagtatagttttggtccctctgcagttttgggggactttggatcttccaggctgattgagaaagagtgtttggagaaggagagtcgggattatgacgtggaccatcctggggaggctgactctgtgcttaggggcggcagtcaagtccaggccagaggtcgagctctaaacatcgttgaccaggaaggttccctcctaggaaagggggagactcagggcctgctcacagctaaggggggtgttgggaaacttgtcacattgagaaatgtgagcacaaaaaaaatacccaccgtgaatcgtattactcccaaaactcagggcactaaccaaatccagaaaaacactccaagtcctgatgtgaccctggggacaaacccagggacagaagatatccagttccccattcagaagatccctctggggctggatctgaagaatcttcggctccccagaagaaagatgagctttgacatcatagataagtctgatgttttttcaagatttgggatagaaataatcaaatgggcaggattccacaccataaaagatgatattaaattttcccaacttttccagactctctttgaacttgaaacagaaacctgtgctaaaatgcttgcctcattcaaatgttccttaaaaccagagcacagagatttttgcttttttactatcaaatttttaaagcactctgctttgaaaacacccagagttgataatgagtttttaaacatgcttttagacaaaggtgctgtgaagaccaaaaattgcttttttgaaatcataaagccttttgacaagtacataatgagacttcaagaccggcttctgaagagtgtcacacctttgcttatggcctgcaatgcctacgagctaagtgtcaagatgaagaccctcagtaaccccctggacttggctcttgccctagaaaccaccaactctctctgccggaagtctttggcccttttgggacagacattttccttggcctcttctttccggcaggagaaaatcttagaagctgtcggcctgcaagatatagctccctcacctgctgcgtttccaaacttcgaagactccactttgtttgggcgagagtacatagaccacctgaaggcctggctagtcagcagcggatgtcccctccaggttaagaaagccgaaccagagccgatgcgagaggaggagaaaatgattcctcctacgaaacctgaaattcaggccaaggctccaagtagtctgagtgatgctgtcccccagcgagcagatcacagggtagtgggcaccatcgaccagcttgtgaaacgtgtcatcgaaggcagcctgtctcccaaagagagaactcttctcaaagaggaccctgcttactggtttttgtctgatgaaaatagtctggagtataaatattacaagctgaagttggcagaaatgcagcggatgagcgagaacttgcgaggagccgaccagaagccgacctcagcagactgtgcagtgagggccatgctgtactcccgggctgtccgcaacctcaagaagaaactccttccgtggcagcggcgggggctcctccgtgctcaagggctccggggctggaaggcgaggagagcgaccaccgggacccagaccctcctatcctcaggcaccaggctgaaacaccacggccggcaggctccaggcctctcacaggcaaaaccatccctgccagacagaaatgatgctgccaaggactgcccgccagacccagttggaccttctcctcaggaccccagcttagaagcctcaggcccatcccccaagccagcaggagtggacatctctgaagcacctcagacctcttctccctgcccatctgctgacattgacatgaagacaatggagactgcagagaaactggctagatttgttgctcaggtgggaccagagatcgaacaattcagcatagaaaacagcaccgataaccctgacctgtggtttctacatgaccaaaatagttctgctttcaaattctatcgaaagaaagtgtttgaactatgtccatcaatttgtttcacgtcatctccgcacaaccttcacactggtggtggtgacaccacgggttctcaggagagccccgtggacctcatggaaggggaagcagagtttgaagacgagccccctccgcgggaggctgagctggagagcccagaggtgatgcctgaggaggaggacgaggacgatgaggatgggggagaggaggcccccgctcctggaggggcgggcaagtctgagggcagcacccctgccgacggccttcccggcgaggctgccgaggacgacctggctggagcacctgccttgtcacaggcctcctcaggtacctgcttccctcggaagaggatcagcagcaagtcattgaaggttggcatgattccagctcccaagagagtgtgtctcatccaggagccaaaagtccatgaaccagttcgaattgcctatgacaggcctcggggtcgtcccatgtccaaaaagaagaaacccaaggacttggacttcgcccagcagaagctgaccgataagaacctgggcttccagatgctgcagaagatgggctggaaggagggccatggcctgggctccctcggaaagggcatcagggagccggtcagcgtgggaaccccctcggaaggggaagggttgggtgctgacgggcaggagcacaaagaagacacattcgatgtgttccgacagaggatgatgcagatgtacagacacaagcgggccaacaaatagttccagggtcacccccgagaggacaacaggcatctggaagtgctctctcgccactctgggtgctttactgtctctggcttgtttccatcactggaaatcacttagagaattgtagtgtttttggtccttgataaagcctagaagacatttgtgatgttacaaaatggaagttttcttttgtttctgttttttaagatctaagaagttgtgaatgttgttaatcatttagccgttgcaataaatgtagaggaaatgca

SEQ ID NO: 187683 - DNA, 6176 bp, Homo sapiens
  Payload ID: 16944
  Gene Symbol: SUGP2
  Gene Name: SURP and G patch domain containing 2
  Uniprot ID: Q8IX01
  ENST ID: ENST00000452918
  CDS Start-End: 75-3323
ggcggcggcgggtgaggagcctgaggcggcggcgggggtggctccgcgcgcggtggtctcgggggcaaaataacatggcagccagacgaattacacaggagacttttgatgctgtattacaagaaaaagccaaacgatatcacatggatgccagtggtgaggctgtaagcgaaactcttcagtttaaagctcaagatctcttaagggcagtcccaagatccagagcagagatgtatgatgacgtccacagcgatggcagatactccctcagtggatctgtagctcactctagagatgccggaagagaaggcctgagaagtgacgtatttccagggccttccttcagatcaagcaacccttccatcagtgatgacagctactttcgcaaagaatgtggccgggatctggaattttctcactctgattctcgggaccaggtcattggccaccggaaattggggcatttccgttctcaggactggaaatttgcgctccgtggttcttgggaacaagactttggccatccagtttctcaagagtcctcttggtcacaggagtatagttttggtccctctgcagttttgggggactttggatcttccaggctgattgagaaagagtgtttggagaaggagagtcgggattatgacgtggaccatcctggggaggctgactctgtgcttaggggcggcagtcaagtccaggccagaggtcgagctctaaacatcgttgaccaggaaggttccctcctaggaaagggggagactcagggcctgctcacagctaaggggggtgttgggaaacttgtcacattgagaaatgtgagcacaaaaaaaatacccaccgtgaatcgtattactcccaaaactcagggcactaaccaaatccagaaaaacactccaagtcctgatgtgaccctggggacaaacccagggacagaagatatccagttccccattcagaagatccctctggggctggatctgaagaatcttcggctccccagaagaaagatgagctttgacatcatagataagtctgatgttttttcaagatttgggatagaaataatcaaatgggcaggattccacaccataaaagatgatattaaattttcccaacttttccagactctctttgaacttgaaacagaaacctgtgctaaaatgcttgcctcattcaaatgttccttaaaaccagagcacagagatttttgcttttttactatcaaatttttaaagcactctgctttgaaaacacccagagttgataatgagtttttaaacatgcttttagacaaaggtgctgtgaagaccaaaaattgcttttttgaaatcataaagccttttgacaagtacataatgagacttcaagaccggcttctgaagagtgtcacacctttgcttatggcctgcaatgcctacgagctaagtgtcaagatgaagaccctcagtaaccccctggacttggctcttgccctagaaaccaccaactctctctgccggaagtctttggcccttttgggacagacattttccttggcctcttctttccggcaggagaaaatcttagaagctgtcggcctgcaagatatagctccctcacctgctgcgtttccaaacttcgaagactccactttgtttgggcgagagtacatagaccacctgaaggcctggctagtcagcagcggatgtcccctccaggttaagaaagccgaaccagagccgatgcgagaggaggagaaaatgattcctcctacgaaacctgaaattcaggccaaggctccaagtagtctgagtgatgctgtcccccagcgagcagatcacagggtagtgggcaccatcgaccagcttgtgaaacgtgtcatcgaaggcagcctgtctcccaaagagagaactcttctcaaagaggaccctgcttactggtttttgtctgatgaaaatagtctggagtataaatattacaagctgaagttggcagaaatgcagcggatgagcgagaacttgcgaggagccgaccagaagccgacctcagcagactgtgcagtgagggccatgctgtactcccgggctgtccgcaacctcaagaagaaactccttccgtggcagcggcgggggctcctccgtgctcaagggctccggggctggaaggcgaggagagcgaccaccgggacccagaccctcctatcctcaggcaccaggctgaaacaccacggccggcaggctccaggcctctcacaggcaaaaccatccctgccagacagaaatgatgctgccaaggactgcccgccagacccagttggaccttctcctcaggaccccagcttagaagcctcaggcccatcccccaagccagcaggagtggacatctctgaagcacctcagacctcttctccctgcccatctgctgacattgacatgaagacaatggagactgcagagaaactggctagatttgttgctcaggtgggaccagagatcgaacaattcagcatagaaaacagcaccgataaccctgacctgtggtttctacatgaccaaaatagttctgctttcaaattctatcgaaagaaagtgtttgaactatgtccatcaatttgtttcacgtcatctccgcacaaccttcacactggtggtggtgacaccacgggttctcaggagagccccgtggacctcatggaaggggaagcagagtttgaagacgagccccctccgcgggaggctgagctggagagcccagaggtgatgcctgaggaggaggacgaggacgatgaggatgggggagaggaggcccccgctcctggaggggcgggcaagtctgagggcagcacccctgccgacggccttcccggcgaggctgccgaggacgacctggctggagcacctgccttgtcacaggcctcctcaggtacctgcttccctcggaagaggatcagcagcaagtcattgaaggttggcatgattccagctcccaagagagtgtgtctcatccaggagccaaaagtccatgaaccagttcgaattgcctatgacaggcctcggggtcgtcccatgtccaaaaagaagaaacccaaggacttggacttcgcccagcagaagctgaccgataagaacctgggcttccagatgctgcagaagatgggctggaaggagggccatggcctgggctccctcggaaagggcatcagggagccggtcagcgtgggaaccccctcggaaggggaagggttgggtgctgacgggcaggagcacaaagaagacacattcgatgtgttccgacagaggatgatgcagatgtacagacacaagcgggccaacaaatagatcaaaaccactgatgtgaaagataagccttgaagcagcaattgcccttaaaacatcatccctgccctggatcggcctggagccagtgcccaagtacggtttggtgtgtacatgaaaacaaacgtctctgcagtctctggggcggaggtttcgctggcttttctttctctcaaagaaaaaaacatgcaccattttcaatgtgcttttgcctctcctctctgttcacatgcttttagcagcaagtcccctccaaatctgtcttggttccccttcagaaggtggcgctgcccccgaaaggcacctcagcctgtgagtgctgaggaaccagctcctctggctgattttccagttggactggccattgctctccagaagtgctctgttagcaaacgtgatgtggaaacgatcacagatggtgttttctcgttgttcgccagaatttatacgggggagacaaattcccggtaattaccaagtctgcactcgggtaccaaagctctgaagctctctgaacagttgccatacttgagttgatgaatgtgttattcatggtgtctcatctcatcaatgcatcttgagagacttaatgaaattttagcaacagtatagaatagctctatcgggtggggagtaatcattaaacagatgaaatcggccccagatttacatgtctctttagaatccacagtgtaagcaaactacagttacaaagggatgggggttgtaaaccctctgagactctgcacttttcgcacgtatggcatcgtcaagtgctgtcttattacagcctttgtaaggagaggcaggctcctcctggggtgggctctgcagctgctctatttccaggcatgtgatcgcccccgctctccagattccccagcactctgctgcgtgtaactccactcaattctccactcatccttccttgtgaagcaggatcgttgaagttttaagtatgggcaaaaatctggaaaacttaggatccctctgacaccccaggattaggggacacagcagtggctagggcatcagccacagaactgagcgggaaatgccacttgtattggctgtaaagaaatcctggctttgggccaggcacagtggctcaagcctgtaatcccagcactttaggaggttgaggcggatggatcacctgaggtcaggagtttgagaccagcctggccaacatggtgtaaccccgtctctactaaaaatacaaaaaaattagccaggcgtggtagcgggcacctgtaatcccagctactcaggaggctgaggcaggagaatcacttgaaccggggaggcagaggttgcagtgagctgagatcatgccactccactccagcctgggcgacagagcaagactccatctccaaaaaaaaaaaaaaaaaaggccggcacggtgactcacgcctataattccagcactttgggaggccgaggcaggtggatcacgaggtcaagagatcgagaccatcctggccaacatggtgaaaccctgtctctactaaaaatgcaaaaaattagctgggcgtggtggcgggcgcttgtagtcccagctactcaggaggctgaggcaggagaatcacttgaacccgggaggcggaggttgcagtgagccgagattgtgccaccgcactccagcctggcaacagagcgagactctgtctcaaaaaaaaaaaaggaaatcctggctttctttaagccacagacttcctaggctgtggtcccagctccttgtctgcctggtccctgtcaccttgcagtgccaccacccccaggggctctgcttgcttccagtggcttctgtagctttggcaactggcagatctttatggcagtagaggtgccagcatggaggatggagtttgggtttataacccaaccctcgaacgaaccagcctgtgggggcctggagtggagctggttttggggagtcacaggtgcggggggttcatcttctcctttctccttctcctttcctgacccctccgacagcttccatgttggccatgggtcaggtgaatggatggagctccaagcggggctcagcccattgacccgagcgaggcgcacacacctgcagcgtggatcaagcgcactctctccagcatcgccctgaccattccatgtgctttgtcctagcatgttcattcttgactttctccacttcattttattaaaaagttaaatgctttaggaatctgtggcgtgtggccactgaccgccccccacctcctgccgctcctccaagtttgagctgagatggttctgtgagtccttggcaggggtcaaagggcacatctccttgaacctagaaagccccctacactctcagaggacacctctcctgtggattcagcgctggggcagtgaaggtgtcgggagccagcagagcatggtgcgtgctgccagctgccggccagccgggatagaggagatgccactggccctccgtgcccccagcccctccctcttaaccgaggctgtccttgctctctgcagaggccgctctgcaggatcctcgtgtcgcgcgtgatgtgtggtggcacagccgtgtcaaagtcacagtgtcttttctgtcgttctagttccagggtcacccccgagaggacaacaggcatctggaagtgctctctcgccactctgggtgctttactgtctctggcttgtttccatcactggaaatcacttagagaattgtagtgtttttggtccttgataaagcctagaagacatttgtgatgttacaaaatggaagttttcttttgtttctgttttttaagatctaagaagttgtgaatgttgttaatcatttagccgttgcaataaatgtagaggaaatgcagtgtg

SEQ ID NO: 187684 - DNA, 4169 bp, Homo sapiens
  Payload ID: 16944
  Gene Symbol: SUGP2
  Gene Name: SURP and G patch domain containing 2
  Uniprot ID: Q8IX01
  ENST ID: ENST00000594773
  CDS Start-End: 67-3189
ggcctcccagagactcgcggacgctcacgataaccaaggacgaccgcgaaccaagggcaaaataacatggcagccagacgaattacacaggagacttttgatgctgtattacaagaaaaagccaaacgatatcacatggatgccagtggtgaggctgtaagcgaaactcttcagtttaaagctcaagatctcttaagggcagtcccaagatccagagcagagatgtatgatgacgtccacagcgatggcagatactccctcagtggatctgtagctcactctagagatgccggaagagaaggcctgagaagtgacgtatttccagggccttccttcagatcaagcaacccttccatcagtgatgacagctactttcgcaaagaatgtggccgggatctggaattttctcactctgattctcgggaccaggtcattggccaccggaaattggggcatttccgttctcaggactggaaatttgcgctccgtggttcttgggaacaagactttggccatccagtttctcaagagtcctcttggtcacaggagtatagttttggtccctctgcagttttgggggactttggatcttccaggctgattgagaaagagtgtttggagaaggagagtcgggattatgacgtggaccatcctggggaggctgactctgtgcttaggggcggcagtcaagtccaggccagaggtcgagctctaaacatcgttgaccaggaaggttccctcctaggaaagggggagactcagggcctgctcacagctaaggggggtgttgggaaacttgtcacattgagaaatgtgagcacaaaaaaaatacccaccgtgaatcgtattactcccaaaactcagggcactaaccaaatccagaaaaacactccaagtcctgatgtgaccctggggacaaacccagggacagaagatatccagttccccattcagaagatccctctggggctggatctgaagaatcttcggctccccagaagaaagatgagctttgacatcatagataagtctgatgttttttcaagatttgggatagaaataatcaaatgggcaggattccacaccataaaagatgatattaaattttcccaacttttccagactctctttgaacttgaaacagaaacctgtgctaaaatgcttgcctcattcaaatgttccttaaaaccagagcacagagatttttgcttttttactatcaaatttttaaagcactctgctttgaaaacacccagagttgataatgagtttttaaacatgcttttagacaaaggtgctgtgaagaccaaaaattgcttttttgaaatcataaagccttttgacaagtacataatgagacttcaagaccggcttctgaagagtgtcacacctttgcttatggcctgcaatgcctacgagctaagtgtcaagatgaagaccctcagtaaccccctggacttggctcttgccctagaaaccaccaactctctctgccggaagtctttggcccttttgggacagacattttccttggcctcttctttccggcaggagaaaatcttagaagctgtcggcctgcaagatatagctccctcacctgctgcgtttccaaacttcgaagactccactttgtttgggcgagagtacatagaccacctgaaggcctggctagtcagcagcggatgtcccctccaggttaagaaagccgaaccagagccgatgcgagaggaggagaaaatgattcctcctacgaaacctgaaattcaggccaaggctccaagtagtctgagtgatgctgtcccccagcgagcagatcacagggtagtgggcaccatcgaccagcttgtgaaacgtgtcatcgaaggcagcctgtctcccaaagagagaactcttctcaaagaggaccctgcttactggtttttgtctgatgaaaatagtctggagtataaatattacaagctgaagttggcagaaatgcagcggatgagcgagaacttgcgaggagccgaccagaagccgacctcagcagactgtgcagtgagggccatgctgtactcccgggctgtccgcaacctcaagaagaaactccttccgtggcagcggcgggggctcctccgtgctcaagggctccggggctggaaggcgaggagagcgaccaccgggacccagaccctcctatcctcaggcaccaggctgaaacaccacggccggcaggctccaggcctctcacaggcaaaaccatccctgccagacagaaatgatgctgccaaggactgcccgccagacccagttggaccttctcctcaggaccccagcttagaagcctcaggcccatcccccaagccagcaggagtggacatctctgaagcacctcagacctcttctccctgcccatctgctgacattgacatgaagacaatggagactgcagagaaactggctagatttgttgctcaggtgggaccagagatcgaacaattcagcatagaaaacagcaccgataaccctgacctgtggtttctacatgaccaaaatagttctgctttcaaattctatcgaaagaaagtgtttgaactatgtccatcaatttgtttcacgtcatctccgcacaaccttcacactggtggtggtgacaccacgggttctcaggagagccccgtggacctcatggaaggggaagcagagtttgaagacgagccccctccgcgggaggctgagctggagagcccagaggcctcctcaggtacctgcttccctcggaagaggatcagcagcaagtcattgaaggttggcatgattccagctcccaagagagtgtgtctcatccaggagccaaaagtccatgaaccagttcgaattgcctatgacaggcctcggggtcgtcccatgtccaaaaagaagaaacccaaggacttggacttcgcccagcagaagctgaccgataagaacctgggcttccagatgctgcagaagatgggctggaaggagggccatggcctgggctccctcggaaagggcatcagggagccggtcagcgtgtacgcagcaggcagcctggggtgggagtgggtggggcctcagtccttccacctgcagcctgccgcttggctccttcacagccaagatggcttacagctggcagttgatttttgttttttaaacagaaggcatcttcagatgagaagctgatcatttacatgtgcaggtgtttacagggctcctttctgtcctggtgtagattttttaaccagcttgttggccctggtcattttggccacatttgtgaccatcataaaagctaagtggtatttctgtgtagtttccgtctggaactgctttcccattcccgggaacccatagccgggccagccagggtcccgaacacaggcccaaagtttattaaaccccgatcataacctccagcaggcatttcatttaatactgagcttagttcctgctgggtaaggcattccgaggtaaccagggccctctgggcaccccctcaaaagccagctcttcgagggtgagtactccttgtttctactgtgagtcgcgtcttgattttccctttctttgatgtctcagtgtgtgtcccaaacacctgcatctcatggactgtttgtgcccatgcccagttcctggcatgccaggccctgggctcaggtgcacaactgactctctttttcactccctaggggaaccccctcggaaggggaagggttgggtgctgacgggcaggagcacaaagaagacacattcgatgtgttccgacagaggatgatgcagatgtacagacacaagcgggccaacaaatagatcaaaaccactgatgtgaaagataagccttgaagcagcaattgcccttaaaacatcatccctgccctggatcggcctggagccagtgcccaattccagggtcacccccgagaggacaacaggcatctggaagtgctctctcgccactctgggtgctttactgtctctggcttgtttccatcactggaaatcacttagagaattgtagtgtttttggtccttgataaagcctagaagacatttgtgatgttacaaaatggaagttttcttttgtttctgttttttaagatctaagaagttgtgaatgttgttaatcatttagccgttgcaataaatgtagaggaaatgcagtg

SEQ ID NO: 187685 - DNA, 732 bp, Homo sapiens
  Payload ID: 16944
  Gene Symbol: SUGP2
  Gene Name: SURP and G patch domain containing 2
  ENST ID: ENST00000594445
  CDS Start-End: 399-732
gaggcccgggccctggcgtcgtcggtgggtggctcccggggtgggaagctcgggctcggccttgggggcccgccccgggctccgtgatggcgtcgcaggctcggccctctggctgcggcggcggccgcgtccccgccgggttggcctgggtggccggctgcggcctcccgggcccggcgcccccatttcctcgcccgcagaggccgggagacggcgggccgcgtccacaaaggctcattggttcagtcgttcattcattcctcccgaactcggagcggcccccgctcgggaggagataacggcgcccagcgctgcatcgggcccttgccctctttagaaccggttcagcccccacaccagcccctttactggctgcccattccatagggcaaaataacatggcagccagacgaattacacaggagacttttgatgctgtattacaagaaaaagccaaacgatatcacatggatgccagtggtgaggctgtaagcgaaactcttcagtttaaagctcaagatctcttaagggcagtcccaagatccagagcagagatgtatgatgacgtccacagcgatggcagatactccctcagtggatctgtagctcactctagagatgccggaagagaaggcctgagaagtgacgtatttccagggccttccttcagatcaagcaacccttccatcagtgatgacagctactttcgcaaagaatgtggccgggatctgg

SEQ ID NO: 187686 - DNA, 747 bp, Homo sapiens
  Payload ID: 16944
  Gene Symbol: SUGP2
  Gene Name: SURP and G patch domain containing 2
  ENST ID: ENST00000593795
  CDS Start-End: 1-161
tccatgaaccagttcgaattgcctatgacaggcctcggggtcgtcccatgtccaaaaagaagggcccaggtcgtgcacagctcccagaagggcctgacggatgccccgtttctcatctcagccgaaacccaaggacttggacttcgcccagcagaagctgaccgataagaacctgggcttccagatgctgcagaagatgggctggaaggagggccatggcctgggctccctcggaaagggcatcagggagccggtcagcgtgggaaccccctcggaaggggaagggttgggtgctgacgggcaggagcacaaagaagacacattcgatgtgttccgacagaggatgatgcagatgtacagacacaagcgggccaacaaatagatcaaaaccactgatgtgaaagataagccttgaagcagcaattgcccttaaaacatcatccctgccctggatcggcctggagccagtgcccaagtacggtttgttccagggtcacccccgagaggacaacaggcatctggaagtgctctctcgccactctgggtgctttactgtctctggcttgtttccatcactggaaatcacttagagaattgtagtgtttttggtccttgataaagcctagaagacatttgtgatgttacaaaatggaagttttcttttgtttctgttttttaagatctaagaagttgtgaatgttgttaatcatttagccgttgcaataaatgtagaggaaatgcagtgtg

SEQ ID NO: 187687 - DNA, 3235 bp, Homo sapiens
  Payload ID: 16944
  Gene Symbol: SUGP2
  Gene Name: SURP and G patch domain containing 2
  ENST ID: ENST00000598240
  CDS Start-End: 1-511
attacaagaaaaagccaaacgatatcacatggatgccagtggtgaggctgtaagcgaaactcttcagtttaaagctcaagatctcttaagggcagtcccaagatccagagcagagatgtatgatgacgtccacagcgatggcagatactccctcagtggatctgtagctcactctagagatgccggaagagaaggcctgagaagtgacgtatttccagggccttccttcagatcaagcaacccttccatcagtgatgacagctactttcgcaaagaatgtggccgggatctggaattttctcactctgattctcgggaccaggtcattggccaccggaaattggggcatttccgttctcaggactggaaatttgcgctccgtggttcttgggaacaagactttggccatccagtttctcaagagtcctcttggtcacaggagtatagttttgatccctctggggctggatctgaagaatcttcggctccccagaagaaagatgagctttgacatcatagataagtctgatgttttttcaagatttgggatagaaataatcaaatgggcaggattccacaccataaaagatgatattaaattttcccaacttttccagactctctttgaacttgaaacagaaacctgtgctaaaatgcttgcctcattcaaatgttccttaaaaccagagcacagagatttttgcttttttactatcaaatttttaaagcactctgctttgaaaacacccagagttgataatgagtttttaaacatgcttttagacaaaggtgctgtgaagaccaaaaattgcttttttgaaatcataaagccttttgacaagtacataatgagacttcaagaccggcttctgaagagtgtcacacctttgcttatggcctgcaatgcctacgagctaagtgtcaagatgaagaccctcagtaaccccctggacttggctcttgccctagaaaccaccaactctctctgccggaagtctttggcccttttgggacagacattttccttggcctcttctttccggcaggagaaaatcttagaagctgtcggcctgcaagatatagctccctcacctgctgcgtttccaaacttcgaagactccactttgtttgggcgagagtacatagaccacctgaaggcctggctagtcagcagcggatgtcccctccaggttaagaaagccgaaccagagccgatgcgagaggaggagaaaatgattcctcctacgaaacctgaaattcaggccaaggctccaagtagtctgagtgatgctgtcccccagcgagcagatcacagggtagtgggcaccatcgaccagcttgtgaaacgtgtcatcgaaggcagcctgtctcccaaagagagaactcttctcaaagaggaccctgcttactggtttttgtctgatgaaaatagtctggagtataaatattacaagctgaagttggcagaaatgcagcggatgagcgagaacttgcgaggagccgaccagaagccgacctcagcagactgtgcagtgagggccatgctgtactcccgggctgtccgcaacctcaagaagaaactccttccgtggcagcggcgggggctcctccgtgctcaagggctccggggctggaaggcgaggagagcgaccaccgggacccagaccctcctatcctcaggcaccaggctgaaacaccacggccggcaggctccaggcctctcacaggcaaaaccatccctgccagacagaaatgatgctgccaaggactgcccgccagacccagttggaccttctcctcaggaccccagcttagaagcctcaggcccatcccccaagccagcaggagtggacatctctgaagcacctcagacctcttctccctgcccatctgctgacattgacatgaagacaatggagactgcagagaaactggctagatttgttgctcaggtgggaccagagatcgaacaattcagcatagaaaacagcaccgataaccctgacctgtggtttctacatgaccaaaatagttctgctttcaaattctatcgaaagaaagtgtttgaactatgtccatcaatttgtttcacgtcatctccgcacaaccttcacactggtggtggtgacaccacgggttctcaggagagccccgtggacctcatggaaggggaagcagagtttgaagacgagccccctccgcgggaggctgagctggagagcccagaggtgatgcctgaggaggaggacgaggacgatgaggatgggggagaggaggcccccgctcctggaggggcgggcaagtctgagggcagcacccctgccgacggccttcccggcgaggctgccgaggacgacctggctggagcacctgccttgtcacaggcctcctcaggtacctgcttccctcggaagaggatcagcagcaagtcattgaaggttggcatgattccagctcccaagagagtgtgtctcatccaggagccaaaagtccatgaaccagttcgaattgcctatgacaggcctcggggtcgtcccatgtccaaaaagaagaaacccaaggacttggacttcgcccagcagaagctgaccgataagaacctgggcttccagatgctgcagaagatgggctggaaggagggccatggcctgggctccctcggaaagggcatcagggagccggtcagcgtgtacgcagcaggcagcctggggtgggagtgggtggggcctcagtccttccacctgcagcctgccgcttggctccttcacagccaagatggcttacagctggcagttgatttttgttttttaaacagaaggcatcttcagatgagaagctgatcatttacatgtgcaggtgtttacagggctcctttctgtcctggtgtagattttttaaccagcttgttggccctggtcattttggccacatttgtgaccatcataaaagctaagtggtatttctgtgtagtttccgtctggaactgctttcccattcccgggaacccatagccgggccagccagggtcccgaacacaggcccaaagtttattaaaccccgatcataacctccagcaggcatttcatttaatactgagcttagttcctgctgggtaaggcattccgaggtaaccagggccctctgggcaccccctcaaaagccagctcttcgagggtgagtactccttgtttctactgtgagtcgcgtcttgattttccctttctttgatgtctca

SEQ ID NO: 187688 - DNA, 5546 bp, Homo sapiens
  Payload ID: 16944
  Gene Symbol: SUGP2
  Gene Name: SURP and G patch domain containing 2
  Uniprot ID: Q8IX01
  ENST ID: ENST00000601879
  CDS Start-End: 299-3547
aaccacgtacccgagggtcgcgccagcccgaccctgcggcacccccactccccactccgcgcgggacaggcctcggcagccgcagcgtctcacccggtcttcgcggccacgtggggaaaggtggggcgcgcggttgtcacccagggagccgcctctagccccttccggccgccgtacgcgcgcaggcgctgtggcgcccctaggcttggcctcccagagactcgcggacgctcacgataaccaaggacgaccgcgaaccaagtgtatttttttctctctcaccatagggcaaaataacatggcagccagacgaattacacaggagacttttgatgctgtattacaagaaaaagccaaacgatatcacatggatgccagtggtgaggctgtaagcgaaactcttcagtttaaagctcaagatctcttaagggcagtcccaagatccagagcagagatgtatgatgacgtccacagcgatggcagatactccctcagtggatctgtagctcactctagagatgccggaagagaaggcctgagaagtgacgtatttccagggccttccttcagatcaagcaacccttccatcagtgatgacagctactttcgcaaagaatgtggccgggatctggaattttctcactctgattctcgggaccaggtcattggccaccggaaattggggcatttccgttctcaggactggaaatttgcgctccgtggttcttgggaacaagactttggccatccagtttctcaagagtcctcttggtcacaggagtatagttttggtccctctgcagttttgggggactttggatcttccaggctgattgagaaagagtgtttggagaaggagagtcgggattatgacgtggaccatcctggggaggctgactctgtgcttaggggcggcagtcaagtccaggccagaggtcgagctctaaacatcgttgaccaggaaggttccctcctaggaaagggggagactcagggcctgctcacagctaaggggggtgttgggaaacttgtcacattgagaaatgtgagcacaaaaaaaatacccaccgtgaatcgtattactcccaaaactcagggcactaaccaaatccagaaaaacactccaagtcctgatgtgaccctggggacaaacccagggacagaagatatccagttccccattcagaagatccctctggggctggatctgaagaatcttcggctccccagaagaaagatgagctttgacatcatagataagtctgatgttttttcaagatttgggatagaaataatcaaatgggcaggattccacaccataaaagatgatattaaattttcccaacttttccagactctctttgaacttgaaacagaaacctgtgctaaaatgcttgcctcattcaaatgttccttaaaaccagagcacagagatttttgcttttttactatcaaatttttaaagcactctgctttgaaaacacccagagttgataatgagtttttaaacatgcttttagacaaaggtgctgtgaagaccaaaaattgcttttttgaaatcataaagccttttgacaagtacataatgagacttcaagaccggcttctgaagagtgtcacacctttgcttatggcctgcaatgcctacgagctaagtgtcaagatgaagaccctcagtaaccccctggacttggctcttgccctagaaaccaccaactctctctgccggaagtctttggcccttttgggacagacattttccttggcctcttctttccggcaggagaaaatcttagaagctgtcggcctgcaagatatagctccctcacctgctgcgtttccaaacttcgaagactccactttgtttgggcgagagtacatagaccacctgaaggcctggctagtcagcagcggatgtcccctccaggttaagaaagccgaaccagagccgatgcgagaggaggagaaaatgattcctcctacgaaacctgaaattcaggccaaggctccaagtagtctgagtgatgctgtcccccagcgagcagatcacagggtagtgggcaccatcgaccagcttgtgaaacgtgtcatcgaaggcagcctgtctcccaaagagagaactcttctcaaagaggaccctgcttactggtttttgtctgatgaaaatagtctggagtataaatattacaagctgaagttggcagaaatgcagcggatgagcgagaacttgcgaggagccgaccagaagccgacctcagcagactgtgcagtgagggccatgctgtactcccgggctgtccgcaacctcaagaagaaactccttccgtggcagcggcgggggctcctccgtgctcaagggctccggggctggaaggcgaggagagcgaccaccgggacccagaccctcctatcctcaggcaccaggctgaaacaccacggccggcaggctccaggcctctcacaggcaaaaccatccctgccagacagaaatgatgctgccaaggactgcccgccagacccagttggaccttctcctcaggaccccagcttagaagcctcaggcccatcccccaagccagcaggagtggacatctctgaagcacctcagacctcttctccctgcccatctgctgacattgacatgaagacaatggagactgcagagaaactggctagatttgttgctcaggtgggaccagagatcgaacaattcagcatagaaaacagcaccgataaccctgacctgtggtttctacatgaccaaaatagttctgctttcaaattctatcgaaagaaagtgtttgaactatgtccatcaatttgtttcacgtcatctccgcacaaccttcacactggtggtggtgacaccacgggttctcaggagagccccgtggacctcatggaaggggaagcagagtttgaagacgagccccctccgcgggaggctgagctggagagcccagaggtgatgcctgaggaggaggacgaggacgatgaggatgggggagaggaggcccccgctcctggaggggcgggcaagtctgagggcagcacccctgccgacggccttcccggcgaggctgccgaggacgacctggctggagcacctgccttgtcacaggcctcctcaggtacctgcttccctcggaagaggatcagcagcaagtcattgaaggttggcatgattccagctcccaagagagtgtgtctcatccaggagccaaaagtccatgaaccagttcgaattgcctatgacaggcctcggggtcgtcccatgtccaaaaagaagaaacccaaggacttggacttcgcccagcagaagctgaccgataagaacctgggcttccagatgctgcagaagatgggctggaaggagggccatggcctgggctccctcggaaagggcatcagggagccggtcagcgtgggaaccccctcggaaggggaagggttgggtgctgacgggcaggagcacaaagaagacacattcgatgtgttccgacagaggatgatgcagatgtacagacacaagcgggccaacaaataggtatgttcacaggccagtgtgtaaggccgtctgccctcgctggcgtgctggtatgcagagaaatttcccccaacaaagttgatgttccctgctcccccaaaaatgccacacacaaaaaaaatcacaaaattctgtgagggaaacaaaagggtctatggatgtggatatgccccattcttaccttccaggtttgctgaaggagcaaacctcacactggccaagggcagatgcgcatggcctgcctggtgccccggctgtgagcccctcaaggcctccaggccagcctccgtggatgtgcgtgtggaaataggccacgcctgtctcttctcttgctcaagttttctctcacagatgacagccacctaccacataacatgaccagcaaacggactgttcctagtccagagggccttgccatcatgcaagtggaagggcgactgtgacagccactgccacagaggatggcagttggctgtgtccctttgtgagggtcttcaaatccttttccttctgcagggccttgggcctgtaaatatcctcatctttctattcttttttttttttagttgccccctcacctaatttccacctcagttttgaacaaaatcgttctcttcctgaatagatcaaaaccactgatgtgaaagataagccttgaagcagcaattgcccttaaaacatcatccctgccctggatcggcctggagccagtgcccaagtacggtttggtgtgtacatgaaaacaaacgtctctgcagtctctggggcggaggtttcgctggcttttctttctctcaaagaaaaaaacatgcaccattttcaatgtgcttttgcctctcctctctgttcacatgcttttagcagcaagtcccctccaaatctgtcttggttccccttcagaaggtggcgctgcccccgaaaggcacctcagcctgtgagtgctgaggaaccagctcctctggctgattttccagttggactggccattgctctccagaagtgctctgttagcaaacgtgatgtggaaacgatcacagatggtgttttctcgttgttcgccagaatttatacgggggagacaaattcccggtaattaccaagtctgcactcgggtaccaaagctctgaagctctctgaacagttgccatacttgagttgatgaatgtgttattcatggtgtctcatctcatcaatgcatcttgagagacttaatgaaattttagcaacagtatagaatagctctatcgggtggggagtaatcattaaacagatgaaatcggccccagatttacatgtctctttagaatccacagtgtaagcaaactacagttacaaagggatgggggttgtaaaccctctgagactctgcacttttcgcacgtatggcatcgtcaagtgctgtcttattacagcctttgtaaggagaggcaggctcctcctggggtgggctctgcagctgctctatttccaggcatgtgatcgcccccgctctccagattccccagcactctgctgcgtgtaactccactcaattctccactcatccttccttgtgaagcaggatcgttgaagttttaagtatgggcaaaaatctggaaaacttaggatccctctgacaccccaggattaggggacacagcagtggctagggcatcagccacagaactgagcgggaaatgccacttgtattggctgtaaagaaatcctggctttgggccaggcacagtggctcaagcctgtaatcccagcactttaggaggttgaggcggatggatcacctgaggtcaggagtttgagaccagcctggccaacatggtgtaaccccgtctctactaaaaatacaaaaaaattagccaggcgtggtagcgggcacctgtaatcccagctactcaggaggctgaggcaggagaatcacttgaaccggggaggcagaggttgcagtgagctgagatcatgccactccactccagcctgggcgacagagcaagactccatctcc

SEQ ID NO: 187689 - DNA, 814 bp, Homo sapiens
  Payload ID: 16944
  Gene Symbol: SUGP2
  Gene Name: SURP and G patch domain containing 2
  ENST ID: ENST00000597280
  CDS Start-End: 1-197
cctcaggtacctgcttccctcggaagaggatcagcagcaagtcattgaaggttggcatgattccagctcccaagagagtgtgtctcatccaggagccaaaagaggcgagaacccaccagtacagcagagctgaagcctgttcccagaacgggtctcttgtcccattgcagtcccctgcccgattcagcaaccactgactgttttccaagccccagtccatgaaccagttcgaattgcctatgacaggcctcggggtcgtcccatgtccaaaaagaagaaacccaaggacttggacttcgcccagcagaagctgaccgataagaacctgggcttccagatgctgcagaagatgggctggaaggagggccatggcctgggctccctcggaaagggcatcagggagccggtcagcgtgggaaccccctcggaaggggaagggttgggtgctgacgggcaggagcacaaagaagacacattcgatgtgttccgacagaggatgatgcagatgtacagacacaagcgggccaacaaatagatcaaaaccactgatgtgaaagataagccttgaagcagcaattgcccttaaaacatcatccctgccctggatcggcctggagccagtgcccaagtacggtttggtgtgtacatgaaaacaaacgtctctgcagtctctggggcggaggtttcgctggcttttctttctctcaaagaaaaaaacatgcaccattttcaatgtgcttttgcctctcctctctgttcacatgcttttagcagcaagtcccctccaaatctgtcttggttccccttcagaagg

SEQ ID NO: 187690 - DNA, 4752 bp, Homo sapiens
  Payload ID: 16944
  Gene Symbol: SUGP2
  Gene Name: SURP and G patch domain containing 2
  ENST ID: ENST00000600377
  CDS Start-End: 21-3311
gagaccgttggttcatttgcatgtccccgcctcgcgcggcggcggcggcggggcaaaataacatggcagccagacgaattacacaggagacttttgatgctgtattacaagaaaaagccaaacgatatcacatggatgccagtggtgaggctgtaagcgaaactcttcagtttaaagctcaagatctcttaagggcagtcccaagatccagagcagagatgtatgatgacgtccacagcgatggcagatactccctcagtggatctgtagctcactctagagatgccggaagagaaggcctgagaagtgacgtatttccagggccttccttcagatcaagcaacccttccatcagtgatgacagctactttcgcaaagaatgtggccgggatctggaattttctcactctgattctcgggaccaggtcattggccaccggaaattggggcatttccgttctcaggactggaaatttgcgctccgtggttcttgggaacaagactttggccatccagtttctcaagagtcctcttggtcacaggagtatagttttggtccctctgcagttttgggggactttggatcttccaggctgattgagaaagagtgtttggagaaggagagtcgggattatgacgtggaccatcctggggaggctgactctgtgcttaggggcggcagtcaagtccaggccagaggtcgagctctaaacatcgttgaccaggaaggttccctcctaggaaagggggagactcagggcctgctcacagctaaggggggtgttgggaaacttgtcacattgagaaatgtgagcacaaaaaaaatacccaccgtgaatcgtattactcccaaaactcagggcactaaccaaatccagaaaaacactccaagtcctgatgtgaccctggggacaaacccagggacagaagatatccagttccccattcagaagatccctctggggctggatctgaagaatcttcggctccccagaagaaagatgagctttgacatcatagataagtctgatgttttttcaagatttgggatagaaataatcaaatgggcaggattccacaccataaaagatgatattaaattttcccaacttttccagactctctttgaacttgaaacagaaacctgtgctaaaatgcttgcctcattcaaatgttccttaaaaccagagcacagagatttttgcttttttactatcaaatttttaaagcactctgctttgaaaacacccagagttgataatgagtttttaaacatgcttttagacaaaggtgctgtgaagaccaaaaattgcttttttgaaatcataaagccttttgacaagtacataatgagacttcaagaccggcttctgaagagtgtcacacctttgcttatggcctgcaatgcctacgagctaagtgtcaagatgaagaccctcagtaaccccctggacttggctcttgccctagaaaccaccaactctctctgccggaagtctttggcccttttgggacagacattttccttggcctcttctttccggcaggagaaaatcttagaagctgtcggcctgcaagatatagctccctcacctgctgcgtttccaaacttcgaagactccactttgtttgggcgagagtacatagaccacctgaaggcctggctagtcagcagcggatgtcccctccaggttaagaaagccgaaccagagccgatgcgagaggaggagaaaatgattcctcctacgaaacctgaaattcaggccaaggctccaagtagtctgagtgatgctgtcccccagcgagcagatcacagggtagtgggcaccatcgaccagcttgtgaaacgtgtcatcgaaggcagcctgtctcccaaagagagaactcttctcaaagaggaccctgcttactggtttttgtctgatgaaaatagtctggagtataaatattacaagctgaagttggcagaaatgcagcggatgagcgagaacttgcgaggagccgaccagaagccgacctcagcagactgtgcagtgagggccatgctgtactcccgggctgtccgcaacctcaagaagaaactccttccgtggcagcggcgggggctcctccgtgctcaagggctccggggctggaaggcgaggagagcgaccaccgggacccagaccctcctatcctcaggcaccaggctgaaacaccacggccggcaggctccaggcctctcacaggcaaaaccatccctgccagacagaaatgatgctgccaaggactgcccgccagacccagttggaccttctcctcaggaccccagcttagaagcctcaggcccatcccccaagccagcaggagtggacatctctgaagcacctcagacctcttctccctgcccatctgctgacattgacatgaagacaatggagactgcagagaaactggctagatttgttgctcaggtgggaccagagatcgaacaattcagcatagaaaacagcaccgataaccctgacctgtggtttctacatgaccaaaatagttctgctttcaaattctatcgaaagaaagtgtttgaactatgtccatcaatttgtttcacgtcatctccgcacaaccttcacactggtggtggtgacaccacgggttctcaggagagccccgtggacctcatggaaggggaagcagagtttgaagacgagccccctccgcgggaggctgagctggagagcccagaggtgatgcctgaggaggaggacgaggacgatgaggatgggggagaggaggcccccgctcctggaggggcgggcaagtctgagggcagcacccctgccgacggccttcccggcgaggctgccgaggacgacctggctggagcacctgccttgtcacaggcctcctcaggtacctgcttccctcggaagaggatcagcagcaagtcattgaaggttggcatgattccagctcccaagagagtgtgtctcatccaggagccaaaagtccatgaaccagttcgaattgcctatgacaggcctcggggtcgtcccatgtccaaaaagaagaaacccaaggacttggacttcgcccagcagaagctgaccgataagaacctgggcttccagatgctgcagaagatgggctggaaggagggccatggcctgggctccctcggaaagggcatcagggagccggtcagcgtgggaaccccctcggaaggggaagggttgggtgctgacgggcaggagcacaaagaagacacattcgatgtgttccgacagaggatgatgcagatgtacagacacaagcgggccaacaaataggtatgttcacaggccagtgtgtaaggccgtctgccctcgctggcgtgctggtatgcagagaaatttcccccaacaaagttgatgttccctgctcccccaaaaatgccacacacaaaaaaaatcacaaaattctgtgagggaaacaaaagggtctatggatgtggatatgccccattcttaccttccaggtttgctgaaggagcaaacctcacactggccaagggcagatgcgcatggcctgcctggtgccccggctgtgagcccctcaaggcctccaggccagcctccgtggatgtgcgtgtggaaataggccacgcctgtctcttctcttgctcaagttttctctcacagatgacagccacctaccacataacatgaccagcaaacggactgttcctagtccagagggccttgccatcatgcaagtggaagggcgactgtgacagccactgccacagaggatggcagttggctgtgtccctttgtgagggtcttcaaatccttttccttctgcagggccttgggcctgtaaatatcctcatctttctattcttttttttttttagttgccccctcacctaatttccacctcagttttgaacaaaatcgttctcttcctgaatagatcaaaaccactgatgtgaaagataagccttgaagcagcaattgcccttaaaacatcatccctgccctggatcggcctggagccagtgcccaagtacggtttggtgtgtacatgaaaacaaacgtctctgcagtctctggggcggaggtttcgctggcttttctttctctcaaagaaaaaaacatgcaccattttcaatgtgcttttgcctctcctctctgttcacatgcttttagcagcaagtcccctccaaatctgtcttggttccccttcagaaggtggcgctgcccccgaaaggcacctcagcctgtgagtgctgaggaaccagctcctctggctgattttccagttggactggccattgctctccagaagtgctctgttagcaaacgtgatgtggaaacgatcacagatggtgttttctcgttgttcgccagaatttatacgggggagacaaattcccggtaattaccaagtctgcactcgggtaccaaagctctgaagctctctgaacagttgccatacttgagttgatgaatgtgttattcatggtgtctcatctcatcaatgcatcttgagagacttaatgaaattttagcaacagtatagaatagctctatcgggtggggagtaatcattaaacagatgaaatcggccccagatttacatgtctctttagaatccacagtgtaagcaaactacagttacaaagggatgggggttgtaaaccctctgagactctgcacttttcgcacgtatggcatcgtcaagtgctgtcttattacagcctttgtaaggagaggcaggctcctcctg

SEQ ID NO: 187691 - DNA, 5565 bp, Homo sapiens
  Payload ID: 16944
  Gene Symbol: SUGP2
  Gene Name: SURP and G patch domain containing 2
  ENST ID: ENST00000600239
  CDS Start-End: 72-2597
ggcggcgggtgaggagcctgaggcggcggcgggggtggctccgcgcgcggtggtctcgggggcaaaataacatggcagccagacgaattacacaggagacttttgatgctgtattacaagaaaaagccaaacgatatcacatggatgccagtggtgaggctgtaagcgaaactcttcagtttaaagctcaagatctcttaagggcagtcccaagatccagagcagagatgtatgatgacgtccacagcgatggcagatactccctcagtggatctgtagctcactctagagatgccggaagagaaggcctgagaagtgacgtatttccagggccttccttcagatcaagcaacccttccatcagtgatgacagctactttcgcaaagaatgtggccgggatctggaattttctcactctgattctcgggaccaggtcattggccaccggaaattggggcatttccgttctcaggactggaaatttgcgctccgtggttcttgggaacaagactttggccatccagtttctcaagagtcctcttggtcacaggagtatagttttggtccctctgcagttttgggggactttggatcttccaggctgattgagaaagagtgtttggagaaggagagtcgggattatgacgtggaccatcctggggaggctgactctgtgcttaggggcggcagtcaagtccaggccagaggtcgagctctaaacatcgttgaccaggaaggttccctcctaggaaagggggagactcagggcctgctcacagctaaggggggtgttgggaaacttgtcacattgagaaatgtgagcacaaaaaaaatacccaccgtgaatcgtattactcccaaaactcagggcactaaccaaatccagaaaaacactccaagtcctgatgtgaccctggggacaaacccagggacagaagatatccagttccccattcagaagatccctctggggctggatctgaagaatcttcggctccccagaagaaagatgagctttgacatcatagataagtctgatgttttttcaagatttgggatagaaataatcaaatgggcaggattccacaccataaaagatgatattaaattttcccaacttttccagactctctttgaacttgaaacagaaacctgtgctaaaatgcttgcctcattcaaatgttccttaaaaccagagcacagagatttttgcttttttactatcaaatttttaaagcactctgctttgaaaacacccagagttgataatgagtttttaaacatgcttttagacaaaggtgctgtgaagaccaaaaattgcttttttgaaatcataaagccttttgacaagtacataatgagacttcaagaccggcttctgaagagtgtcacacctttgcttatggcctgcaatgcctacgagctaagtgtcaagatgaagaccctcagtaaccccctggacttggctcttgccctagaaaccaccaactctctctgccggaagtctttggcccttttgggacagacattttccttggcctcttctttccggcaggagaaaatcttagaagctgtcggcctgcaagatatagctccctcacctgctgcgtttccaaacttcgaagactccactttgtttgggcgagagtacatagaccacctgaaggcctggctagtcagcagcggatgtcccctccaggttaagaaagccgaaccagagccgatgcgagaggaggagaaaatgattcctcctacgaaacctgaaattcaggccaaggctccaagtagtctgagtgatgctgtcccccagcgagcagatcacagggtagtgggcaccatcgaccagcttgtgaaacgtgtcatcgaaggcagcctgtctcccaaagagagaactcttctcaaagaggaccctgcttactggtttttgtctgatgaaaatagtctggagtataaatattacaagctgaagttggcagaaatgcagcggatgagcgagaacttgcgaggagccgaccagaagccgacctcagcagactgtgcagtgagggccatgctgtactcccgggctgtccgcaacctcaagaagaaactccttccgtggcagcggcgggggctcctccgtgctcaagggctccggggctggaaggcgaggagagcgaccaccgggacccagaccctcctatcctcaggcaccaggctgaaacaccacggccggcaggctccaggcctctcacaggcaaaaccatccctgccagacagaaatgatgctgccaaggactgcccgccagacccagttggaccttctcctcaggaccccagcttagaagcctcaggcccatcccccaagccagcaggagtggacatctctgaagcacctcagacctcttctccctgcccatctgctgacattgacatgaagacaatggagactgcagagaaactggctagatttgttgctcaggtgggaccagagatcgaacaattcagcatagaaaacagcaccgataaccctgacctgtggggacctgccttcatctcgggcatcaggaaaaacctccccagagggacatttaatctgcatccaaaggctaaataggagttggccaggggaggggagagaggtttctacatgaccaaaatagttctgctttcaaattctatcgaaagaaagtgtttgaactatgtccatcaatttgtttcacgtcatctccgcacaaccttcacactggtggtggtgacaccacgggttctcaggagagccccgtggacctcatggaaggggaagcagagtttgaagacgagccccctccgcgggaggctgagctggagagcccagaggtgatgcctgaggaggaggacgaggacgatgaggatgggggagaggaggcccccgctcctggaggggcgggcaagtctgagggcagcacccctgccgacggccttcccggcgaggctgccgaggacgacctggctggagcacctgccttgtcacaggcctcctcaggtacctgcttccctcggaagaggatcagcagcaagtcattgaaggttggcatgattccagctcccaagagagtgtgtctcatccaggagccaaaagaggcgagaacccaccagtacagcagagctgaagcctgttcccagaacgggtctcttgtcccattgcagtcccctgcccgattcagcaaccactgactgttttccaagccccagtccatgaaccagttcgaattgcctatgacaggcctcggggtcgtcccatgtccaaaaagaagaaacccaaggacttggacttcgcccagcagaagctgaccgataagaacctgggcttccagatgctgcagaagatgggctggaaggagggccatggcctgggctccctcggaaagggcatcagggagccggtcagcgtgtacgcagcaggcagcctggggtgggagtgggtggggcctcagtccttccacctgcagcctgccgcttggctccttcacagccaagatggcttacagctggcagttgatttttgttttttaaacagaaggcatcttcagatgagaagctgatcatttacatgtgcaggtgtttacagggctcctttctgtcctggtgtagattttttaaccagcttgttggccctggtcattttggccacatttgtgaccatcataaaagctaagtggtatttctgtgtagtttccgtctggaactgctttcccattcccgggaacccatagccgggccagccagggtcccgaacacaggcccaaagtttattaaaccccgatcataacctccagcaggcatttcatttaatactgagcttagttcctgctgggtaaggcattccgaggtaaccagggccctctgggcaccccctcaaaagccagctcttcgagggtgagtactccttgtttctactgtgagtcgcgtcttgattttccctttctttgatgtctcagtgtgtgtcccaaacacctgcatctcatggactgtttgtgcccatgcccagttcctggcatgccaggccctgggctcaggtgcacaactgactctctttttcactccctaggggaaccccctcggaaggggaagggttgggtgctgacgggcaggagcacaaagaagacacattcgatgtgttccgacagaggatgatgcagatgtacagacacaagcgggccaacaaatagatcaaaaccactgatgtgaaagataagccttgaagcagcaattgcccttaaaacatcatccctgccctggatcggcctggagccagtgcccaagtacggtttggtgtgtacatgaaaacaaacgtctctgcagtctctggggcggaggtttcgctggcttttctttctctcaaagaaaaaaacatgcaccattttcaatgtgcttttgcctctcctctctgttcacatgcttttagcagcaagtcccctccaaatctgtcttggttccccttcagaaggtggcgctgcccccgaaaggcacctcagcctgtgagtgctgaggaaccagctcctctggctgattttccagttggactggccattgctctccagaagtgctctgttagcaaacgtgatgtggaaacgatcacagatggtgttttctcgttgttcgccagaatttatacgggggagacaaattcccggtaattaccaagtctgcactcgggtaccaaagctctgaagctctctgaacagttgccatacttgagttgatgaatgtgttattcatggtgtctcatctcatcaatgcatcttgagagacttaatgaaattttagcaacagtatagaatagctctatcgggtggggagtaatcattaaacagatgaaatcggccccagatttacatgtctctttagaatccacagtgtaagcaaactacagttacaaagggatgggggttgtaaaccctctgagactctgcacttttcgcacgtatggcatcgtcaagtgctgtcttattacagcctttgtaaggagaggcaggctcctcctggggtgggctctgcagctgctctatttccaggcatgtgatcgcccccgctctccagattccccagcactctgctgcgtgtaactccactcaattctccactcatccttccttgtgaagcaggatcgttgaagttttaagtatgggcaaaaatctggaaaacttaggatccctctgacaccccaggattaggggacacagcagtggctagggcatcagccacagaactgagcgggaaatgccacttgtattggctgtaaagaaatcctggctttgggccaggcacagtggctcaagcctgtaatcccagcactttaggaggttgaggcggatggatcacctgaggtcaggagtttgagaccagcctggccaacatggtgtaaccccgtctctactaaaaatacaaaaaaattagccaggcgtggtagcgggcacctgtaatcccagctactcaggaggctgaggcaggagaatcacttgaaccggggaggcagaggttgcagtgagctgagatcatgccactccactccagcctgggcgacagagcaagactccatctcc

SEQ ID NO: 187692 - DNA, 1110 bp, Homo sapiens
  Payload ID: 16945
  Gene Symbol: SMNDC1
  Gene Name: survival motor neuron domain containing 1
  Uniprot ID: O75940
  ENST ID: ENST00000369592
  CDS Start-End: 306-1022
tcccgaggtgaagcggaggcccaaggctgaggagcccgcctcgccggagacgcccaggcgctggccctggatcccggagccacggccgtctctcagccagagctgagcctcggcggcccggccggcgctggcctccgtgcggcggcggcaaacacggcccgcaggggaccgggtcgggtggggctgggcgccgcgcggctccctgtggagcctgcctgttggagcgcggcggggctccggcggtggtcttggagctggcgtgtggatttccacgtccgaatgatcgagttgtggcgggctttgagatgtcagaggatttagcaaagcagctggcaagctacaaagctcagctccagcaagttgaagctgcattatctggaaatggagaaaatgaagatttgctaaaattgaagaaagatttacaagaagttatagaactaaccaaagaccttctgtcaactcaaccttctgagacgcttgcaagttcagacagttttgcttctactcaacctactcattcatggaaagtaggagacaagtgtatggcagtctggagtgaagatggacagtgttatgaagcggagattgaggagatagatgaagaaaatggcaccgctgcaatcacctttgctggttatggcaatgctgaagtgactccactgttgaacctcaagcctgtagaagaaggaaggaaggcaaaggaggacagtggcaacaaacccatgtcaaaaaaagaaatgattgcccagcagcgtgaatataaaaagaagaaagctttgaaaaaagctcagagaataaaagaacttgagcaggaaagagaggaccagaaagtgaaatggcaacaattcaacaacagagcctattctaaaaacaaaaaaggccaggtaaagaggagtatttttgcttcacctgagagtgtgactggtaaagttggagtaggaacctgtggaattgctgataaacctatgacacaatatcaagatacctctaaatacaatgtcaggcatttgatgcctcaataatcagaaaaactgttggatttcatctctgcagggctttacatttacctttttatccttatatttttctaaaggtaaattatttgttaga

SEQ ID NO: 187693 - DNA, 4341 bp, Homo sapiens
  Payload ID: 16945
  Gene Symbol: SMNDC1
  Gene Name: survival motor neuron domain containing 1
  Uniprot ID: O75940
  ENST ID: ENST00000369603
  CDS Start-End: 205-921
tctctgtcttttcctccttccagtgcccggcgttcctcccttccccctcgccgccgaccgagttcttccttttcagaccgggtcgccttgctgtcgtcgcggtgattttcctgctactgctactgctgctgctgccaccgccactaccactgggctcatttgccccgaccccttcccgccgccccgcccccagccccacacaagatgtcagaggatttagcaaagcagctggcaagctacaaagctcagctccagcaagttgaagctgcattatctggaaatggagaaaatgaagatttgctaaaattgaagaaagatttacaagaagttatagaactaaccaaagaccttctgtcaactcaaccttctgagacgcttgcaagttcagacagttttgcttctactcaacctactcattcatggaaagtaggagacaagtgtatggcagtctggagtgaagatggacagtgttatgaagcggagattgaggagatagatgaagaaaatggcaccgctgcaatcacctttgctggttatggcaatgctgaagtgactccactgttgaacctcaagcctgtagaagaaggaaggaaggcaaaggaggacagtggcaacaaacccatgtcaaaaaaagaaatgattgcccagcagcgtgaatataaaaagaagaaagctttgaaaaaagctcagagaataaaagaacttgagcaggaaagagaggaccagaaagtgaaatggcaacaattcaacaacagagcctattctaaaaacaaaaaaggccaggtaaagaggagtatttttgcttcacctgagagtgtgactggtaaagttggagtaggaacctgtggaattgctgataaacctatgacacaatatcaagatacctctaaatacaatgtcaggcatttgatgcctcaataatcagaaaaactgttggatttcatctctgcagggctttacatttacctttttatccttatatttttctaaaggtaaattatttgttagatgagtaagcaagataccattgtcgtcattggttggcttcagtagaatgaaacgtgaagaaattgcatttgataactgctattcatttaacttttctcattatcagtaccacggttccctcaaagtttgttgaataaagcaacttttgtagatgctgtttcatacagcacttagatgaattattgatcttcctaatatcaggcgcctacttaacctatggtgtgtactttttgtaagttgtaacttgaaattttcagatgctttgaacttgacacatactctagcaattcattggaacaccaaggcaaaaacaccaacctgctaaaagagatcttttcatttttcttattttcagctttaaaacttagctgtcgttcagttaagcttaaagataggttaatttgtaaatggcaaagtttgttttgaggtttttcctcaataacttgtttcccaggcctattaggccatctctaaaattgatctagctgttttatttttatgtactcttagttttatgtaagaaaccttaggatgagctcccttttctaaggtgtttttgttttttgtatgtttgcttttttcctgttttttgttttttccatttacggcagtggtaccatgttttggatgtgtgatgtttatatgggagaacaaaaagctgatgtatagccctgtatacagtgtagatactatttttgtaaaaacacaaggctaaattaatgaacaagaatactgaatatttcatcattaaaaatttcttgtatttcttgtgcattaatctgacgataatttccctgtatattatgttcatttagctgtttgtaatttttgttaattagatcaggttgtctgcatttgttggtgtaagtgaacatcatcacagttatcctgagttgagtttaagccaaatacatgcatagaaaagggtcttcctattaatggaagaaggtaatttttaggatgtgtattatttcagttttgtatgtttaacttttattaaataaagtgtttttaaaatctccagggtgtgttaacaaaagggtaaagtctttagctgtcagcacttaaagcaattaaacctccaagtacttgcacacggcattcatgcaagagaatactgagtgtgtgagaggtttcagtaaatgcttaagtattccttccattagaagaaattggatcttaaagggcaaaccaggcctgtgtttataggatgtcctcattttaatgggtgtttgtagatttttggtggaaggggaaaataagtttttatttcatgaattttaattttttttataaattgaaacttaggacagtggtaggtagaattcttcatctctcccttccacacccacccctctcaacccaggagggtcactttttcttcatataattcgtggccacagggtaggacacaaaggacagaaaggcacaaactgcagtagaaaaagggtttgttgaagcctgtaaacttctaaataaaatatactttgttattgtaacatcttaagagcttatcaataatcaagagtagccttgatggattgcaagagaatcctttgaattaaaaagcactgggaagaaatttggtgtcattgtgtgaccccagaaaatggttgttgagattaccttggtggtattagaatagtaattcacttgatgtttgtgtaggcaggactgttaacagtcttgtccctcttttgaccctggggggccttagttttcccagaggactttgcagtaggagagagaaaaagaataaaagtgaccttaaaaaaaaatgttttgaaaatagacctttagaatgaaatcagcaacctttgtgtcaaagatctagatgtggccctttggaaaatcctagtgtcaggatgatgtttgtgtctctgaactaagaggcaggactcctggggagactacctgtcacagtgtgatactgaatttgagaagatgctcaatgagaagcatgatacccacagtattttacagttgaaggtggttaagctctctatattctgaaacaaaatataaaccttgaccttaaaaagctttgttagaaaatttaatgtagagttttccccattaagaaaggagacttgaagctttgaaactgtgacagactgaaatgttaaatattgagttatgggcccctaagtagaaatggttgcatgtaacttaccaaagcttgacgtttgactgttgttaccatttcaaggaaagaacagtcctaacctcccgaaaataaaatgttgagttttagtggtaatcacaggtaacaagtgctattttaattaacatgtagggaggccacagagcatactggaaaacagcaaggactctagagccagactagtgtttgtttattaccatttattacctgtgtattcccatttattacctgtgtattcctctgattcatttttctcagctgtagaatggaaaaatctgtttcagttttaaggattgaattcaaatgtgtaaatagcttaagagtatccggcataagcactatagaagcgtctgctattactctgcagagtggcagtggtgaattatctgatattttttccttaacttgaatagcaatccacattacaatggataacaatacccattgtttatgatttgaggcatccaattataactgtattattgaagtgttatcaaattaccaaggctgtagggtatatttagtattcctagttaaaggtttgaactaatttgtatactagggcatgtttcttaatgggaagggggtgaaggttataataaaagtcacccctaatgcttgtttaaaattaaagaggaatttgtgggcctgggaccaaccttagacttatccaggccaaggtatgttgtttgacgaacaccgcaggtgatcctgatgtgcatccccgtctgagaactgttaactataaaagtttgactttggaaatgaagaaaaattaccttttagcctaatcatgaagactaggcgtcaaaccaaaacaagatgcatcagttactgtagcaacacattttttttaaaaaattgcttgttgtcacaatgaagggtgtgtgtctgtttccagtatgcaattctaatgccaaatgtctgccttaaaaatagcaaaggagaccatcaggttaacataaaggaaaactgtagttgtgtgactcatgtgtctgtagattgtaattttataattacaatttttataagataaaaaactaccagttgtaaattcaaccaaaaaaaatttaaagctttgatttagctttttgctttaacttgggtagtaactgaaatataaaggaagaaaatctattaaaaccaatgaggttttatatttttttaaa

SEQ ID NO: 187694 - DNA, 900 bp, Homo sapiens
  Payload ID: 16946
  Gene Symbol: SMN1
  Gene Name: survival of motor neuron 1, telomeric
  Uniprot ID: Q16637
  ENST ID: ENST00000351205
  CDS Start-End: 1-885
atggcgatgagcagcggcggcagtggtggcggcgtcccggagcaggaggattccgtgctgttccggcgcggcacaggccagagcgatgattctgacatttgggatgatacagcactgataaaagcatatgataaagctgtggcttcatttaagcatgctctaaagaatggtgacatttgtgaaacttcgggtaaaccaaaaaccacacctaaaagaaaacctgctaagaagaataaaagccaaaagaagaatactgcagcttccttacaacagtggaaagttggggacaaatgttctgccatttggtcagaagacggttgcatttacccagctaccattgcttcaattgattttaagagagaaacctgtgttgtggtttacactggatatggaaatagagaggagcaaaatctgtccgatctactttccccaatctgtgaagtagctaataatatagaacaaaatgctcaagagaatgaaaatgaaagccaagtttcaacagatgaaagtgagaactccaggtctcctggaaataaatcagataacatcaagcccaaatctgctccatggaactcttttctccctccaccaccccccatgccagggccaagactgggaccaggaaagccaggtctaaaattcaatggcccaccaccgccaccgccaccaccaccaccccacttactatcatgctggctgcctccatttccttctggaccaccaataattcccccaccacctcccatatgtccagattctcttgatgatgctgatgctttgggaagtatgttaatttcatggtacatgagtggctatcatactggctattatatgggtttcagacaaaatcaaaaagaaggaaggtgctcacattccttaaattaaggagtaagtctgcca

SEQ ID NO: 187695 - DNA, 1536 bp, Homo sapiens
  Payload ID: 16946
  Gene Symbol: SMN1
  Gene Name: survival of motor neuron 1, telomeric
  Uniprot ID: Q16637
  ENST ID: ENST00000380707
  CDS Start-End: 75-959
agaagccccgggcggcggaagtcgtcactcttaagaagggacggggccccacgctgcgcacccgcgggtttgctatggcgatgagcagcggcggcagtggtggcggcgtcccggagcaggaggattccgtgctgttccggcgcggcacaggccagagcgatgattctgacatttgggatgatacagcactgataaaagcatatgataaagctgtggcttcatttaagcatgctctaaagaatggtgacatttgtgaaacttcgggtaaaccaaaaaccacacctaaaagaaaacctgctaagaagaataaaagccaaaagaagaatactgcagcttccttacaacagtggaaagttggggacaaatgttctgccatttggtcagaagacggttgcatttacccagctaccattgcttcaattgattttaagagagaaacctgtgttgtggtttacactggatatggaaatagagaggagcaaaatctgtccgatctactttccccaatctgtgaagtagctaataatatagaacaaaatgctcaagagaatgaaaatgaaagccaagtttcaacagatgaaagtgagaactccaggtctcctggaaataaatcagataacatcaagcccaaatctgctccatggaactcttttctccctccaccaccccccatgccagggccaagactgggaccaggaaagccaggtctaaaattcaatggcccaccaccgccaccgccaccaccaccaccccacttactatcatgctggctgcctccatttccttctggaccaccaataattcccccaccacctcccatatgtccagattctcttgatgatgctgatgctttgggaagtatgttaatttcatggtacatgagtggctatcatactggctattatatgggtttcagacaaaatcaaaaagaaggaaggtgctcacattccttaaattaaggagaaatgctggcatagagcagcactaaatgacaccactaaagaaacgatcagacagatctggaatgtgaagcgttatagaagataactggcctcatttcttcaaaatatcaagtgttgggaaagaaaaaaggaagtggaatgggtaactcttcttgattaaaagttatgtaataaccaaatgcaatgtgaaatattttactggactctattttgaaaaaccatctgtaaaagactggggtgggggtgggaggccagcacggtggtgaggcagttgagaaaatttgaatgtggattagattttgaatgatattggataattattggtaattttatgagctgtgagaagggtgttgtagtttataaaagactgtcttaatttgcatacttaagcatttaggaatgaagtgttagagtgtcttaaaatgtttcaaatggtttaacaaaatgtatgtgaggcgtatgtggcaaaatgttacagaatctaactggtggacatggctgttcattgtactgtttttttctatcttctatatgtttaaaagtatataataaaaatatttaatttttttttaaa

SEQ ID NO: 187696 - DNA, 1550 bp, Homo sapiens
  Payload ID: 16946
  Gene Symbol: SMN1
  Gene Name: survival of motor neuron 1, telomeric
  ENST ID: ENST00000506239
  CDS Start-End: 30-914
gccccacgctgcgcacccgcgggtttgctatggcgatgagcagcggcggcagtggtggcggcgtcccggagcaggaggattccgtgctgttccggcgcggcacaggccagagcgatgattctgacatttgggatgatacagcactgataaaagcatatgataaagctgtggcttcatttaagcatgctctaaagaatggtgacatttgtgaaacttcgggtaaaccaaaaaccacacctaaaagaaaacctgctaagaagaataaaagccaaaagaagaatactgcagcttccttacaacagtggaaagttggggacaaatgttctgccatttggtcagaagacggttgcatttacccagctaccattgcttcaattgattttaagagagaaacctgtgttgtggtttacactggatatggaaatagagaggagcaaaatctgtccgatctactttccccaatctgtgaagtagctaataatatagaacaaaatgctcaagagaatgaaaatgaaagccaagtttcaacagatgaaagtgagaactccaggtctcctggaaataaatcagataacatcaagcccaaatctgctccatggaactcttttctccctccaccaccccccatgccagggccaagactgggaccaggaaagccaggtctaaaattcaatggcccaccaccgccaccgccaccaccaccaccccacttactatcatgctggctgcctccatttccttctggaccaccaataattcccccaccacctcccatatgtccagattctcttgatgatgctgatgctttgggaagtatgttaatttcatggtacatgagtggctatcatactggctattatatgacagggtttcactgtgttagccaggatggtctcaatctcctgaccccgtgatccacccgcctcggccttccaagagaaatgaaatttttttaatgcacaaagatctggggaaatgctggcatagagcagcactaaatgacaccactaaagaaacgatcagacagatctggaatgtgaagcgttatagaagataactggcctcatttcttcaaaatatcaagtgttgggaaagaaaaaaggaagtggaatgggtaactcttcttgattaaaagttatgtaataaccaaatgcaatgtgaaatattttactggactctattttgaaaaaccatctgtaaaagactggggtgggggtgggaggccagcacggtggtgaggcagttgagaaaatttgaatgtggattagattttgaatgatattggataattattggtaattttatgagctgtgagaagggtgttgtagtttataaaagactgtcttaatttgcatacttaagcatttaggaatgaagtgttagagtgtcttaaaatgtttcaaatggtttaacaaaatgtatgtgaggcgtatgtggcaaaatgttacagaatctaactggtggacatggctgttcattgtactgtttttttctatcttctatatgtttaaaagtatataataaaaatatttaatttttttttaaattag

SEQ ID NO: 187697 - DNA, 1308 bp, Homo sapiens
  Payload ID: 16946
  Gene Symbol: SMN1
  Gene Name: survival of motor neuron 1, telomeric
  ENST ID: ENST00000514951
  CDS Start-End: 49-732
actcttaagaagggacggggccccacgctgcgcacccgcgggtttgctatggcgatgagcagcggcggcagtggtggcggcgtcccggagcaggaggattccgtgctgttccggcgcggcacaggccagagcgatgattctgacatttgggatgatacagcactgataaaagcatatgataaagctgtggcttcatttaagcatgctctaaagaatggtgacatttgtgaaacttcgggtaaaccaaaaaccacacctaaaagaaaacctgctaagaagaataaaagccaaaagaagaatactgcagcttccttacaacagaatgaaaatgaaagccaagtttcaacagatgaaagtgagaactccaggtctcctggaaataaatcagataacatcaagcccaaatctgctccatggaactcttttctccctccaccaccccccatgccagggccaagactgggaccaggaaagccaggtctaaaattcaatggcccaccaccgccaccgccaccaccaccaccccacttactatcatgctggctgcctccatttccttctggaccaccaataattcccccaccacctcccatatgtccagattctcttgatgatgctgatgctttgggaagtatgttaatttcatggtacatgagtggctatcatactggctattatatgggtttcagacaaaatcaaaaagaaggaaggtgctcacattccttaaattaaggagtaagtctgccagcattatgaaagtgaatcttacttttgtaaaactttatggtttgtggaaaacaaatgtttttgaacatttaaaaagttcagatgttaaaaagttgaaaggttaatgtaaaacaatcaatattaaagaattttgatgccaaaactattagataaaaggttaatctacatccctactagaattctcatacttaactggttggttatgtggaagaaacatactttcacaataaagagctttaggatatgatgccattttatatcactagtaggcagaccagcagacttttttttattgtgatatgggataacctaggcatactgcactgtacactctgacatatgaagtgctctagtcaagtttaactggtgtccacagaggacatggtttaactggaattcgtcaagcctctggttctaatttctcatttgcaggaaatgctggcatagagcagcactaaatgacaccactaaagaaacgatcagacagatctggaatgtgaagcgttatagaagataactggcctcatttcttcaaaatatcaagtgttgggaaagaaaaaa

SEQ ID NO: 187698 - DNA, 1445 bp, Homo sapiens
  Payload ID: 16946
  Gene Symbol: SMN1
  Gene Name: survival of motor neuron 1, telomeric
  Uniprot ID: Q16637
  ENST ID: ENST00000506163
  CDS Start-End: 10-858
gggtttgctatggcgatgagcagcggcggcagtggtggcggcgtcccggagcaggaggattccgtgctgttccggcgcggcacaggccagagcgatgattctgacatttgggatgatacagcactgataaaagcatatgataaagctgtggcttcatttaagcatgctctaaagaatggtgacatttgtgaaacttcgggtaaaccaaaaaccacacctaaaagaaaacctgctaagaagaataaaagccaaaagaagaatactgcagcttccttacaacagtggaaagttggggacaaatgttctgccatttggtcagaagacggttgcatttacccagctaccattgcttcaattgattttaagagagaaacctgtgttgtggtttacactggatatggaaatagagaggagcaaaatctgtccgatctactttccccaatctgtgaagtagctaataatatagaacaaaatgctcaagagaatgaaaatgaaagccaagtttcaacagatgaaagtgagaactccaggtctcctggaaataaatcagataacatcaagcccaaatctgctccatggaactcttttctccctccaccaccccccatgccagggccaagactgggaccaggaaagccaggtctaaaattcaatggcccaccaccgccaccgccaccaccaccaccccacttactatcatgctggctgcctccatttccttctggaccaccaataattcccccaccacctcccatatgtccagattctcttgatgatgctgatgctttgggaagtatgttaatttcatggtacatgagtggctatcatactggctattatatggaaatgctggcatagagcagcactaaatgacaccactaaagaaacgatcagacagatctggaatgtgaagcgttatagaagataactggcctcatttcttcaaaatatcaagtgttgggaaagaaaaaaggaagtggaatgggtaactcttcttgattaaaagttatgtaataaccaaatgcaatgtgaaatattttactggactctattttgaaaaaccatctgtaaaagactggggtgggggtgggaggccagcacggtggtgaggcagttgagaaaatttgaatgtggattagattttgaatgatattggataattattggtaattttatgagctgtgagaagggtgttgtagtttataaaagactgtcttaatttgcatacttaagcatttaggaatgaagtgttagagtgtcttaaaatgtttcaaatggtttaacaaaatgtatgtgaggcgtatgtggcaaaatgttacagaatctaactggtggacatggctgttcattgtactgtttttttctatcttctatatgtttaaaagtatataataaaaatatttaatttttttttaaattagctgtatctgtgattgtatttcttt

SEQ ID NO: 187699 - DNA, 1219 bp, Homo sapiens
  Payload ID: 16946
  Gene Symbol: SMN1
  Gene Name: survival of motor neuron 1, telomeric
  Uniprot ID: Q16637
  ENST ID: ENST00000503079
  CDS Start-End: 75-863
agaagccccgggcggcggaagtcgtcactcttaagaagggacggggccccacgctgcgcacccgcgggtttgctatggcgatgagcagcggcggcagtggtggcggcgtcccggagcaggaggattccgtgctgttccggcgcggcacaggccagagcgatgattctgacatttgggatgatacagcactgataaaagcatatgataaagctgtggcttcatttaagcatgctctaaagaatggtgacatttgtgaaacttcgggtaaaccaaaaaccacacctaaaagaaaacctgctaagaagaataaaagccaaaagaagaatactgcagcttccttacaacagtggaaagttggggacaaatgttctgccatttggtcagaagacggttgcatttacccagctaccattgcttcaattgattttaagagagaaacctgtgttgtggtttacactggatatggaaatagagaggagcaaaatctgtccgatctactttccccaatctgtgaagtagctaataatatagaacaaaatgctcaagagaatgaaaatgaaagccaagtttcaacagatgaaagtgagaactccaggtctcctggaaataaatcagataacatcaagcccaaatctgctccatggaactcttttctccctccaccaccccccatgccagggccaagactgggaccaggaaagataattcccccaccacctcccatatgtccagattctcttgatgatgctgatgctttgggaagtatgttaatttcatggtacatgagtggctatcatactggctattatatgggtttcagacaaaatcaaaaagaaggaaggtgctcacattccttaaattaaggagtaagtctgccagcattatgaaagtgaatcttacttttgtaaaactttatggtttgtggaaaacaaatgtttttgaacatttaaaaagttcagatgttaaaaagttgaaaggttaatgtaaaacaatcaatattaaagaattttgatgccaaaactattagataaaaggttaatctacatccctactagaattctcatacttaactggttggttatgtggaagaaacatactttcacaataaagagctttaggatatgatgccattttatatcactagtaggcagaccagcagacttttttttattgtgatatgggataacctaggcatactgcactgtacactctgacatat

SEQ ID NO: 187700 - DNA, 431 bp, Homo sapiens
  Payload ID: 16946
  Gene Symbol: SMN1
  Gene Name: survival of motor neuron 1, telomeric
  ENST ID: ENST00000507905
  CDS Start-End: 1-240
ctttccccaatctgtgaagtagctaataatatagaacaaaatgctcaagagaatgaaaatgaaagccaagtttcaacagatgaaagtgagaactccaggtctcctggaaataaatcagataacatcaagcccaaatctgctccatggaactcttttctccctccaccaccccccatgccagggccaagactgggaccaggaaagaaaggaaatgagaaaaatccagaggttgtcatttgacttatgagtctgtttgacttcaggatttggtacatgaaatttcacttaatctttttgatatgtataaaacaaatattctggccaggtctaaaattcaatggcccaccaccgccaccgccaccaccaccaccccacttactatcatgctggctgcctccatttccttctggaccaccaataattcccccacc

SEQ ID NO: 187701 - DNA, 885 bp, Homo sapiens
  Payload ID: 16946
  Gene Symbol: SMN1
  Gene Name: survival of motor neuron 1, telomeric
  ENST ID: ENST00000610814
  CDS Start-End: 1-885
atggcgatgagcagcggcggcagtggtggcggcgtcccggagcaggaggattccgtgctgttccggcgcggcacaggccagagcgatgattctgacatttgggatgatacagcactgataaaagcatatgataaagctgtggcttcatttaagcatgctctaaagaatggtgacatttgtgaaacttcgggtaaaccaaaaaccacacctaaaagaaaacctgctaagaagaataaaagccaaaagaagaatactgcagcttccttacaacagtggaaagttggggacaaatgttctgccatttggtcagaagacggttgcatttacccagctaccattgcttcaattgattttaagagagaaacctgtgttgtggtttacactggatatggaaatagagaggagcaaaatctgtccgatctactttccccaatctgtgaagtagctaataatatagaacagaatgctcaagagaatgaaaatgaaagccaagtttcaacagatgaaagtgagaactccaggtctcctggaaataaatcagataacatcaagcccaaatctgctccatggaactcttttctccctccaccaccccccatgccagggccaagactgggaccaggaaagccaggtctaaaattcaatggcccaccaccgccaccgccaccaccaccaccccacttactatcatgctggctgcctccatttccttctggaccaccaataattcccccaccacctcccatatgtccagattctcttgatgatgctgatgctttgggaagtatgttaatttcatggtacatgagtggctatcatactggctattatatgacagggtttcactgtgttagccaggatggtctcaatctcctgaccccgtga

SEQ ID NO: 187702 - DNA, 804 bp, Homo sapiens
  Payload ID: 16946
  Gene Symbol: SMN1
  Gene Name: survival of motor neuron 1, telomeric
  Uniprot ID: Q16637
  ENST ID: ENST00000622158
  CDS Start-End: 1-789
atggcgatgagcagcggcggcagtggtggcggcgtcccggagcaggaggattccgtgctgttccggcgcggcacaggccagagcgatgattctgacatttgggatgatacagcactgataaaagcatatgataaagctgtggcttcatttaagcatgctctaaagaatggtgacatttgtgaaacttcgggtaaaccaaaaaccacacctaaaagaaaacctgctaagaagaataaaagccaaaagaagaatactgcagcttccttacaacagtggaaagttggggacaaatgttctgccatttggtcagaagacggttgcatttacccagctaccattgcttcaattgattttaagagagaaacctgtgttgtggtttacactggatatggaaatagagaggagcaaaatctgtccgatctactttccccaatctgtgaagtagctaataatatagaacagaatgctcaagagaatgaaaatgaaagccaagtttcaacagatgaaagtgagaactccaggtctcctggaaataaatcagataacatcaagcccaaatctgctccatggaactcttttctccctccaccaccccccatgccagggccaagactgggaccaggaaagataattcccccaccacctcccatatgtccagattctcttgatgatgctgatgctttgggaagtatgttaatttcatggtacatgagtggctatcatactggctattatatgggtttcagacaaaatcaaaaagaaggaaggtgctcacattccttaaattaaggagtaagtctgcca

SEQ ID NO: 187703 - DNA, 900 bp, Homo sapiens
  Payload ID: 16946
  Gene Symbol: SMN1
  Gene Name: survival of motor neuron 1, telomeric
  Uniprot ID: Q16637
  ENST ID: ENST00000622739
  CDS Start-End: 1-885
atggcgatgagcagcggcggcagtggtggcggcgtcccggagcaggaggattccgtgctgttccggcgcggcacaggccagagcgatgattctgacatttgggatgatacagcactgataaaagcatatgataaagctgtggcttcatttaagcatgctctaaagaatggtgacatttgtgaaacttcgggtaaaccaaaaaccacacctaaaagaaaacctgctaagaagaataaaagccaaaagaagaatactgcagcttccttacaacagtggaaagttggggacaaatgttctgccatttggtcagaagacggttgcatttacccagctaccattgcttcaattgattttaagagagaaacctgtgttgtggtttacactggatatggaaatagagaggagcaaaatctgtccgatctactttccccaatctgtgaagtagctaataatatagaacagaatgctcaagagaatgaaaatgaaagccaagtttcaacagatgaaagtgagaactccaggtctcctggaaataaatcagataacatcaagcccaaatctgctccatggaactcttttctccctccaccaccccccatgccagggccaagactgggaccaggaaagccaggtctaaaattcaatggcccaccaccgccaccgccaccaccaccaccccacttactatcatgctggctgcctccatttccttctggaccaccaataattcccccaccacctcccatatgtccagattctcttgatgatgctgatgctttgggaagtatgttaatttcatggtacatgagtggctatcatactggctattatatgggtttcagacaaaatcaaaaagaaggaaggtgctcacattccttaaattaaggagtaagtctgcca

SEQ ID NO: 187704 - DNA, 789 bp, Homo sapiens
  Payload ID: 16946
  Gene Symbol: SMN1
  Gene Name: survival of motor neuron 1, telomeric
  ENST ID: ENST00000626580
  CDS Start-End: 1-448
gaatactgcagcttccttacaacagtggaaagttggggacaaatgttctgccatttggtcagaagacggttgcatttacccagctaccattgcttcaattgattttaagagagaaacctgtgttgtggtttacactggatatggaaatagagaggagcaaaatctgtccgatctactttccccaatctgtgaagtagctaataatatagaacagaatgctcaagagccaggtctaaaattcaatggcccaccaccgccaccgccaccaccaccaccccacttactatcatgctggctgcctccatttccttctggaccaccaataattcccccaccacctcccatatgtccagattctcttgatgatgctgatgctttgggaagtatgttaatttcatggtacatgagtggctatcatactggctattatatggaaatgctggcatagagcagcactaaatgacaccactaaagaaacgatcagacagatctggaatgtgaagcgttatagaagataactggcctcatttcttcaaaatatcaagtgttgggaaagaaaaaaggaagtggaatgggtaactcttcttgattaaaagttatgtaataaccaaatgcaatgtgaaatattttactggactctattttgaaaaaccatctgtaaaagactggggtgggggtgggaggccagcacggtggtgaggcagttgagaaaatttgaatgtggattagattttgaatgatattggataattattggtaattttatgagctgtgagaagggtgttgtag

SEQ ID NO: 187705 - DNA, 885 bp, Homo sapiens
  Payload ID: 16946
  Gene Symbol: SMN1
  Gene Name: survival of motor neuron 1, telomeric
  ENST ID: ENST00000625245
  CDS Start-End: 1-885
atggcgatgagcagcggcggcagtggtggcggcgtcccggagcaggaggattccgtgctgttccggcgcggcacaggccagagcgatgattctgacatttgggatgatacagcactgataaaagcatatgataaagctgtggcttcatttaagcatgctctaaagaatggtgacatttgtgaaacttcgggtaaaccaaaaaccacacctaaaagaaaacctgctaagaagaataaaagccaaaagaagaatactgcagcttccttacaacagtggaaagttggggacaaatgttctgccatttggtcagaagacggttgcatttacccagctaccattgcttcaattgattttaagagagaaacctgtgttgtggtttacactggatatggaaatagagaggagcaaaatctgtccgatctactttccccaatctgtgaagtagctaataatatagaacaaaatgctcaagagaatgaaaatgaaagccaagtttcaacagatgaaagtgagaactccaggtctcctggaaataaatcagataacatcaagcccaaatctgctccatggaactcttttctccctccaccaccccccatgccagggccaagactgggaccaggaaagccaggtctaaaattcaatggcccaccaccgccaccgccaccaccaccaccccacttactatcatgctggctgcctccatttccttctggaccaccaataattcccccaccacctcccatatgtccagattctcttgatgatgctgatgctttgggaagtatgttaatttcatggtacatgagtggctatcatactggctattatatgacagggtttcactgtgttagccaggatggtctcaatctcctgaccccgtga

SEQ ID NO: 187706 - DNA, 1440 bp, Homo sapiens
  Payload ID: 16946
  Gene Symbol: SMN1
  Gene Name: survival of motor neuron 1, telomeric
  Uniprot ID: Q16637
  ENST ID: ENST00000628353
  CDS Start-End: 33-881
ggggccccacgctgcgcacccgcgggtttgctatggcgatgagcagcggcggcagtggtggcggcgtcccggagcaggaggattccgtgctgttccggcgcggcacaggccagagcgatgattctgacatttgggatgatacagcactgataaaagcatatgataaagctgtggcttcatttaagcatgctctaaagaatggtgacatttgtgaaacttcgggtaaaccaaaaaccacacctaaaagaaaacctgctaagaagaataaaagccaaaagaagaatactgcagcttccttacaacagtggaaagttggggacaaatgttctgccatttggtcagaagacggttgcatttacccagctaccattgcttcaattgattttaagagagaaacctgtgttgtggtttacactggatatggaaatagagaggagcaaaatctgtccgatctactttccccaatctgtgaagtagctaataatatagaacagaatgctcaagagaatgaaaatgaaagccaagtttcaacagatgaaagtgagaactccaggtctcctggaaataaatcagataacatcaagcccaaatctgctccatggaactcttttctccctccaccaccccccatgccagggccaagactgggaccaggaaagccaggtctaaaattcaatggcccaccaccgccaccgccaccaccaccaccccacttactatcatgctggctgcctccatttccttctggaccaccaataattcccccaccacctcccatatgtccagattctcttgatgatgctgatgctttgggaagtatgttaatttcatggtacatgagtggctatcatactggctattatatggaaatgctggcatagagcagcactaaatgacaccactaaagaaacgatcagacagatctggaatgtgaagcgttatagaagataactggcctcatttcttcaaaatatcaagtgttgggaaagaaaaaaggaagtggaatgggtaactcttcttgattaaaagttatgtaataaccaaatgcaatgtgaaatattttactggactctattttgaaaaaccatctgtaaaagactggggtgggggtgggaggccagcacggtggtgaggcagttgagaaaatttgaatgtggattagattttgaatgatattggataattattggtaattttatgagctgtgagaagggtgttgtagtttataaaagactgtcttaatttgcatacttaagcatttaggaatgaagtgttagagtgtcttaaaatgtttcaaatggtttaacaaaatgtatgtgaggcgtatgtggcaaaatgttacagaatctaactggtggacatggctgttcattgtactgtttttttctatcttctatatgtttaaaagtatataataaaaatatttaatttttttttaaa

SEQ ID NO: 187707 - DNA, 567 bp, Homo sapiens
  Payload ID: 16946
  Gene Symbol: SMN1
  Gene Name: survival of motor neuron 1, telomeric
  ENST ID: ENST00000630432
  CDS Start-End: 1-430
gaatactgcagcttccttacaacagtggaaagttggggacaaatgttctgccatttggtcagaagacggttgcatttacccagctaccattgcttcaattgattttaagagagaaacctgtgttgtggtttacactggatatggaaatagagaggagcaaaatctgtccgatctactttccccaatctgtgaagtagctaataatatagaacagaatgctcaagagaatgaaaatgaaagccaagtttcaacagatgaaagtgagaactccaggtctcctggaaataaatcagataacatcaagcccaaatctgctccatggaactcttttctccctccaccaccccccatgccagggccaagactgggaccaggaaagggtttcagacaaaatcaaaaagaaggaaggtgctcacattccttaaattaaggagaaatgctggcatagagcagcactaaatgacaccactaaagaaacgatcagacagatctggaatgtgaagcgttatagaagataactggcctcatttcttcaaaatatcaagtgttgggaaagaaaaaaggaag

SEQ ID NO: 187708 - DNA, 678 bp, Homo sapiens
  Payload ID: 16946
  Gene Symbol: SMN1
  Gene Name: survival of motor neuron 1, telomeric
  ENST ID: ENST00000628043
  CDS Start-End: 1-541
gaatactgcagcttccttacaacagtggaaagttggggacaaatgttctgccatttggtcagaagacggttgcatttacccagctaccattgcttcaattgattttaagagagaaacctgtgttgtggtttacactggatatggaaatagagaggagcaaaatctgtccgatctactttccccaatctgtgaagtagctaataatatagaacagaatgctcaagagaatgaaaatgaaagccaagtttcaacagatgaaagtgagaactccaggtctcctggaaataaatcagataacatcaagcccaaatctgctccatggaactcttttctccctccaccaccccccatgccagggccaagactgggaccaggaaagataattcccccaccacctcccatatgtccagattctcttgatgatgctgatgctttgggaagtatgttaatttcatggtacatgagtggctatcatactggctattatatgggtttcagacaaaatcaaaaagaaggaaggtgctcacattccttaaattaaggagaaatgctggcatagagcagcactaaatgacaccactaaagaaacgatcagacagatctggaatgtgaagcgttatagaagataactggcctcatttcttcaaaatatcaagtgttgggaaagaaaaaaggaag

SEQ ID NO: 187709 - DNA, 423 bp, Homo sapiens
  Payload ID: 16946
  Gene Symbol: SMN1
  Gene Name: survival of motor neuron 1, telomeric
  ENST ID: ENST00000627306
  CDS Start-End: 1-240
ctttccccaatctgtgaagtagctaataatatagaacagaatgctcaagagaatgaaaatgaaagccaagtttcaacagatgaaagtgagaactccaggtctcctggaaataaatcagataacatcaagcccaaatctgctccatggaactcttttctccctccaccaccccccatgccagggccaagactgggaccaggaaagaaaggaaatgagaaaaatccagaggttgtcatttgacttatgagtctgtttgacttcaggatttggtacatgaaatttcacttaatctttttgatatgtataaaacaaatattctggccaggtctaaaattcaatggcccaccaccgccaccgccaccaccaccaccccacttactatcatgctggctgcctccatttccttctggaccaccagtaagt

SEQ ID NO: 187710 - DNA, 1512 bp, Homo sapiens
  Payload ID: 16946
  Gene Symbol: SMN1
  Gene Name: survival of motor neuron 1, telomeric
  Uniprot ID: Q16637
  ENST ID: ENST00000629122
  CDS Start-End: 48-932
ctcttaagaagggacggggccccacgctgcgcacccgcgggtttgctatggcgatgagcagcggcggcagtggtggcggcgtcccggagcaggaggattccgtgctgttccggcgcggcacaggccagagcgatgattctgacatttgggatgatacagcactgataaaagcatatgataaagctgtggcttcatttaagcatgctctaaagaatggtgacatttgtgaaacttcgggtaaaccaaaaaccacacctaaaagaaaacctgctaagaagaataaaagccaaaagaagaatactgcagcttccttacaacagtggaaagttggggacaaatgttctgccatttggtcagaagacggttgcatttacccagctaccattgcttcaattgattttaagagagaaacctgtgttgtggtttacactggatatggaaatagagaggagcaaaatctgtccgatctactttccccaatctgtgaagtagctaataatatagaacagaatgctcaagagaatgaaaatgaaagccaagtttcaacagatgaaagtgagaactccaggtctcctggaaataaatcagataacatcaagcccaaatctgctccatggaactcttttctccctccaccaccccccatgccagggccaagactgggaccaggaaagccaggtctaaaattcaatggcccaccaccgccaccgccaccaccaccaccccacttactatcatgctggctgcctccatttccttctggaccaccaataattcccccaccacctcccatatgtccagattctcttgatgatgctgatgctttgggaagtatgttaatttcatggtacatgagtggctatcatactggctattatatgggtttcagacaaaatcaaaaagaaggaaggtgctcacattccttaaattaaggagaaatgctggcatagagcagcactaaatgacaccactaaagaaacgatcagacagatctggaatgtgaagcgttatagaagataactggcctcatttcttcaaaatatcaagtgttgggaaagaaaaaaggaagtggaatgggtaactcttcttgattaaaagttatgtaataaccaaatgcaatgtgaaatattttactggactctattttgaaaaaccatctgtaaaagactggggtgggggtgggaggccagcacggtggtgaggcagttgagaaaatttgaatgtggattagattttgaatgatattggataattattggtaattttatgagctgtgagaagggtgttgtagtttataaaagactgtcttaatttgcatacttaagcatttaggaatgaagtgttagagtgtcttaaaatgtttcaaatggtttaacaaaatgtatgtgaggcgtatgtggcaaaatgttacagaatctaactggtggacatggctgttcattgtactgtttttttctatcttctatatgtttaaaagtatataataaaaatatttaatttttttttaaatta

SEQ ID NO: 187711 - DNA, 867 bp, Homo sapiens
  Payload ID: 16946
  Gene Symbol: SMN1
  Gene Name: survival of motor neuron 1, telomeric
  ENST ID: ENST00000631131
  CDS Start-End: 49-732
actcttaagaagggacggggccccacgctgcgcacccgcgggtttgctatggcgatgagcagcggcggcagtggtggcggcgtcccggagcaggaggattccgtgctgttccggcgcggcacaggccagagcgatgattctgacatttgggatgatacagcactgataaaagcatatgataaagctgtggcttcatttaagcatgctctaaagaatggtgacatttgtgaaacttcgggtaaaccaaaaaccacacctaaaagaaaacctgctaagaagaataaaagccaaaagaagaatactgcagcttccttacaacagaatgaaaatgaaagccaagtttcaacagatgaaagtgagaactccaggtctcctggaaataaatcagataacatcaagcccaaatctgctccatggaactcttttctccctccaccaccccccatgccagggccaagactgggaccaggaaagccaggtctaaaattcaatggcccaccaccgccaccgccaccaccaccaccccacttactatcatgctggctgcctccatttccttctggaccaccaataattcccccaccacctcccatatgtccagattctcttgatgatgctgatgctttgggaagtatgttaatttcatggtacatgagtggctatcatactggctattatatgggtttcagacaaaatcaaaaagaaggaaggtgctcacattccttaaattaaggagtaagtctgccagcattatgaaagtgaatcttacttttgtaaaactttatggtttgtggaaaacaaatgtttttgaacatttaaaaagttcagatgttaaaaagttgaaaggttaatgtaaaacaatcaata

SEQ ID NO: 187712 - DNA, 900 bp, Homo sapiens
  Payload ID: 16947
  Gene Symbol: SMN2
  Gene Name: survival of motor neuron 2, centromeric
  Uniprot ID: Q16637
  ENST ID: ENST00000380741
  CDS Start-End: 1-885
atggcgatgagcagcggcggcagtggtggcggcgtcccggagcaggaggattccgtgctgttccggcgcggcacaggccagagcgatgattctgacatttgggatgatacagcactgataaaagcatatgataaagctgtggcttcatttaagcatgctctaaagaatggtgacatttgtgaaacttcgggtaaaccaaaaaccacacctaaaagaaaacctgctaagaagaataaaagccaaaagaagaatactgcagcttccttacaacagtggaaagttggggacaaatgttctgccatttggtcagaagacggttgcatttacccagctaccattgcttcaattgattttaagagagaaacctgtgttgtggtttacactggatatggaaatagagaggagcaaaatctgtccgatctactttccccaatctgtgaagtagctaataatatagaacaaaatgctcaagagaatgaaaatgaaagccaagtttcaacagatgaaagtgagaactccaggtctcctggaaataaatcagataacatcaagcccaaatctgctccatggaactcttttctccctccaccaccccccatgccagggccaagactgggaccaggaaagccaggtctaaaattcaatggcccaccaccgccaccgccaccaccaccaccccacttactatcatgctggctgcctccatttccttctggaccaccaataattcccccaccacctcccatatgtccagattctcttgatgatgctgatgctttgggaagtatgttaatttcatggtacatgagtggctatcatactggctattatatgggttttagacaaaatcaaaaagaaggaaggtgctcacattccttaaattaaggagtaagtctgcca

SEQ ID NO: 187713 - DNA, 1388 bp, Homo sapiens
  Payload ID: 16947
  Gene Symbol: SMN2
  Gene Name: survival of motor neuron 2, centromeric
  Uniprot ID: Q16637
  ENST ID: ENST00000380742
  CDS Start-End: 23-811
gctgcgcacccgcgggtttgctatggcgatgagcagcggcggcagtggtggcggcgtcccggagcaggaggattccgtgctgttccggcgcggcacaggccagagcgatgattctgacatttgggatgatacagcactgataaaagcatatgataaagctgtggcttcatttaagcatgctctaaagaatggtgacatttgtgaaacttcgggtaaaccaaaaaccacacctaaaagaaaacctgctaagaagaataaaagccaaaagaagaatactgcagcttccttacaacagtggaaagttggggacaaatgttctgccatttggtcagaagacggttgcatttacccagctaccattgcttcaattgattttaagagagaaacctgtgttgtggtttacactggatatggaaatagagaggagcaaaatctgtccgatctactttccccaatctgtgaagtagctaataatatagaacaaaatgctcaagagaatgaaaatgaaagccaagtttcaacagatgaaagtgagaactccaggtctcctggaaataaatcagataacatcaagcccaaatctgctccatggaactcttttctccctccaccaccccccatgccagggccaagactgggaccaggaaagataattcccccaccacctcccatatgtccagattctcttgatgatgctgatgctttgggaagtatgttaatttcatggtacatgagtggctatcatactggctattatatgggttttagacaaaatcaaaaagaaggaaggtgctcacattccttaaattaaggagaaatgctggcatagagcagcactaaatgacaccactaaagaaacgatcagacagatctggaatgtgaagcgttatagaagataactggcctcatttcttcaaaatatcaagtgttgggaaagaaaaaaggaagtggaatgggtaactcttcttgattaaaagttatgtaataaccaaatgcaatgtgaaatattttactggactctattttgaaaaaccatctgtaaaagactgaggtgggggtgggaggccagcacggtggtgaggcagttgagaaaatttgaatgtggattagattttgaatgatattggataattattggtaattttatgagctgtgagaagggtgttgtagtttataaaagactgtcttaatttgcatacttaagcatttaggaatgaagtgttagagtgtcttaaaatgtttcaaatggtttaacaaaatgtatgtgaggcgtatgtggcaaaatgttacagaatctaactggtggacatggctgttcattgtactgtttttttctatcttctatatgtttaaaagtatataataaaaatatttaatttttttttaaa

SEQ ID NO: 187714 - DNA, 1536 bp, Homo sapiens
  Payload ID: 16947
  Gene Symbol: SMN2
  Gene Name: survival of motor neuron 2, centromeric
  Uniprot ID: Q16637
  ENST ID: ENST00000380743
  CDS Start-End: 75-959
agaagccccgggcggcggaagtcgtcactcttaagaagggacggggccccacgctgcgcacccgcgggtttgctatggcgatgagcagcggcggcagtggtggcggcgtcccggagcaggaggattccgtgctgttccggcgcggcacaggccagagcgatgattctgacatttgggatgatacagcactgataaaagcatatgataaagctgtggcttcatttaagcatgctctaaagaatggtgacatttgtgaaacttcgggtaaaccaaaaaccacacctaaaagaaaacctgctaagaagaataaaagccaaaagaagaatactgcagcttccttacaacagtggaaagttggggacaaatgttctgccatttggtcagaagacggttgcatttacccagctaccattgcttcaattgattttaagagagaaacctgtgttgtggtttacactggatatggaaatagagaggagcaaaatctgtccgatctactttccccaatctgtgaagtagctaataatatagaacaaaatgctcaagagaatgaaaatgaaagccaagtttcaacagatgaaagtgagaactccaggtctcctggaaataaatcagataacatcaagcccaaatctgctccatggaactcttttctccctccaccaccccccatgccagggccaagactgggaccaggaaagccaggtctaaaattcaatggcccaccaccgccaccgccaccaccaccaccccacttactatcatgctggctgcctccatttccttctggaccaccaataattcccccaccacctcccatatgtccagattctcttgatgatgctgatgctttgggaagtatgttaatttcatggtacatgagtggctatcatactggctattatatgggttttagacaaaatcaaaaagaaggaaggtgctcacattccttaaattaaggagaaatgctggcatagagcagcactaaatgacaccactaaagaaacgatcagacagatctggaatgtgaagcgttatagaagataactggcctcatttcttcaaaatatcaagtgttgggaaagaaaaaaggaagtggaatgggtaactcttcttgattaaaagttatgtaataaccaaatgcaatgtgaaatattttactggactctattttgaaaaaccatctgtaaaagactgaggtgggggtgggaggccagcacggtggtgaggcagttgagaaaatttgaatgtggattagattttgaatgatattggataattattggtaattttatgagctgtgagaagggtgttgtagtttataaaagactgtcttaatttgcatacttaagcatttaggaatgaagtgttagagtgtcttaaaatgtttcaaatggtttaacaaaatgtatgtgaggcgtatgtggcaaaatgttacagaatctaactggtggacatggctgttcattgtactgtttttttctatcttctatatgtttaaaagtatataataaaaatatttaatttttttttaaa

SEQ ID NO: 187715 - DNA, 867 bp, Homo sapiens
  Payload ID: 16947
  Gene Symbol: SMN2
  Gene Name: survival of motor neuron 2, centromeric
  ENST ID: ENST00000511812
  CDS Start-End: 49-732
actcttaagaagggacggggccccacgctgcgcacccgcgggtttgctatggcgatgagcagcggcggcagtggtggcggcgtcccggagcaggaggattccgtgctgttccggcgcggcacaggccagagcgatgattctgacatttgggatgatacagcactgataaaagcatatgataaagctgtggcttcatttaagcatgctctaaagaatggtgacatttgtgaaacttcgggtaaaccaaaaaccacacctaaaagaaaacctgctaagaagaataaaagccaaaagaagaatactgcagcttccttacaacagaatgaaaatgaaagccaagtttcaacagatgaaagtgagaactccaggtctcctggaaataaatcagataacatcaagcccaaatctgctccatggaactcttttctccctccaccaccccccatgccagggccaagactgggaccaggaaagccaggtctaaaattcaatggcccaccaccgccaccgccaccaccaccaccccacttactatcatgctggctgcctccatttccttctggaccaccaataattcccccaccacctcccatatgtccagattctcttgatgatgctgatgctttgggaagtatgttaatttcatggtacatgagtggctatcatactggctattatatgggttttagacaaaatcaaaaagaaggaaggtgctcacattccttaaattaaggagtaagtctgccagcattatgaaagtgaatcttacttttgtaaaactttatggtttgtggaaaacaaatgtttttgaacatttaaaaagttcagatgttagaaagttgaaaggttaatgtaaaacaatcaata

SEQ ID NO: 187716 - DNA, 1550 bp, Homo sapiens
  Payload ID: 16947
  Gene Symbol: SMN2
  Gene Name: survival of motor neuron 2, centromeric
  ENST ID: ENST00000506734
  CDS Start-End: 30-914
gccccacgctgcgcacccgcgggtttgctatggcgatgagcagcggcggcagtggtggcggcgtcccggagcaggaggattccgtgctgttccggcgcggcacaggccagagcgatgattctgacatttgggatgatacagcactgataaaagcatatgataaagctgtggcttcatttaagcatgctctaaagaatggtgacatttgtgaaacttcgggtaaaccaaaaaccacacctaaaagaaaacctgctaagaagaataaaagccaaaagaagaatactgcagcttccttacaacagtggaaagttggggacaaatgttctgccatttggtcagaagacggttgcatttacccagctaccattgcttcaattgattttaagagagaaacctgtgttgtggtttacactggatatggaaatagagaggagcaaaatctgtccgatctactttccccaatctgtgaagtagctaataatatagaacaaaatgctcaagagaatgaaaatgaaagccaagtttcaacagatgaaagtgagaactccaggtctcctggaaataaatcagataacatcaagcccaaatctgctccatggaactcttttctccctccaccaccccccatgccagggccaagactgggaccaggaaagccaggtctaaaattcaatggcccaccaccgccaccgccaccaccaccaccccacttactatcatgctggctgcctccatttccttctggaccaccaataattcccccaccacctcccatatgtccagattctcttgatgatgctgatgctttgggaagtatgttaatttcatggtacatgagtggctatcatactggctattatatgacagggtttcactgtgttagccaggatggtctcaatctcctgaccccgtgatccacccgcctcggccttccaagagaaatgaaatttttttaatgcacaaagatctggggaaatgctggcatagagcagcactaaatgacaccactaaagaaacgatcagacagatctggaatgtgaagcgttatagaagataactggcctcatttcttcaaaatatcaagtgttgggaaagaaaaaaggaagtggaatgggtaactcttcttgattaaaagttatgtaataaccaaatgcaatgtgaaatattttactggactctattttgaaaaaccatctgtaaaagactgaggtgggggtgggaggccagcacggtggtgaggcagttgagaaaatttgaatgtggattagattttgaatgatattggataattattggtaattttatgagctgtgagaagggtgttgtagtttataaaagactgtcttaatttgcatacttaagcatttaggaatgaagtgttagagtgtcttaaaatgtttcaaatggtttaacaaaatgtatgtgaggcgtatgtggcaaaatgttacagaatctaactggtggacatggctgttcattgtactgtttttttctatcttctatatgtttaaaagtatataataaaaatatttaatttttttttaaattag

SEQ ID NO: 187717 - DNA, 1045 bp, Homo sapiens
  Payload ID: 16947
  Gene Symbol: SMN2
  Gene Name: survival of motor neuron 2, centromeric
  ENST ID: ENST00000507458
  CDS Start-End: 1-139
atgtccagattctcttgatgatgctgatgctttgggaagtatgttaatttcatggtacatgagtggctatcatactggctattatatgggttttagacaaaatcaaaaagaaggaaggtgctcacattccttaaattaaggagaaatgctggcatagagcagcactaaatgacaccactaaagaaacgatcagacagatctggaatgtgaagcgttatagaagataactggcctcatttcttcaaaatatcaagtgttgggaaagaaaaaaggaagtggaatggagtctcgctctgctgcccacgctggagtgcagtggtgcaatctcagctcactgcaacctctgctatccgggttcaagcagttctcgtgcctcacccacgtgagtagttgggattacaggcatgtggcaccatgccccactaagttttgtatttttagtagagatggagtttcaccatgttggccaggctggtctcaaactcctgccctcaagtgattcgaccaccctggcctcccaaagtgctgggattacagccgtgagccaccgcacacggcctctctatttatttctatacatagcttttcacattatattatgtttatatattgtttatatctgtatttcctctttcattagagaaaaggtagtacatcttattcttcatggtgtctacaatatctggcagtttttggaagtcaagcgtgagcttagagcatagactggtgggattgtcaaagaagagggcaactggaagagaactgtcagttatttttggatcagtctttaattcatcatgacgggttaggcattagttgtatttcttgctaattttgaagaagacttattaacaaatcctacattaggtaaatggttttgaaagttgagttaatcataatggtgtttgacctaggactatttttaggccctatttatcttaatatcgaataatgaagcagcttcccccttagatatagacagaaaacatcaaagccaccacactacctggctggatttatcctagtaataaaatcaaaactgagc

SEQ ID NO: 187718 - DNA, 431 bp, Homo sapiens; identical to SEQ ID NO: 187700
  Payload ID: 16947
  Gene Symbol: SMN2
  Gene Name: survival of motor neuron 2, centromeric
  ENST ID: ENST00000511873
  CDS Start-End: 1-240

SEQ ID NO: 187719 - DNA, 885 bp, Homo sapiens; identical to SEQ ID NO: 187701
  Payload ID: 16947
  Gene Symbol: SMN2
  Gene Name: survival of motor neuron 2, centromeric
  ENST ID: ENST00000612974
  CDS Start-End: 1-885

SEQ ID NO: 187720 - DNA, 1550 bp, Homo sapiens
  Payload ID: 16947
  Gene Symbol: SMN2
  Gene Name: survival of motor neuron 2, centromeric
  ENST ID: ENST00000612446
  CDS Start-End: 30-914
gccccacgctgcgcacccgcgggtttgctatggcgatgagcagcggcggcagtggtggcggcgtcccggagcaggaggattccgtgctgttccggcgcggcacaggccagagcgatgattctgacatttgggatgatacagcactgataaaagcatatgataaagctgtggcttcatttaagcatgctctaaagaatggtgacatttgtgaaacttcgggtaaaccaaaaaccacacctaaaagaaaacctgctaagaagaataaaagccaaaagaagaatactgcagcttccttacaacagtggaaagttggggacaaatgttctgccatttggtcagaagacggttgcatttacccagctaccattgcttcaattgattttaagagagaaacctgtgttgtggtttacactggatatggaaatagagaggagcaaaatctgtccgatctactttccccaatctgtgaagtagctaataatatagaacagaatgctcaagagaatgaaaatgaaagccaagtttcaacagatgaaagtgagaactccaggtctcctggaaataaatcagataacatcaagcccaaatctgctccatggaactcttttctccctccaccaccccccatgccagggccaagactgggaccaggaaagccaggtctaaaattcaatggcccaccaccgccaccgccaccaccaccaccccacttactatcatgctggctgcctccatttccttctggaccaccaataattcccccaccacctcccatatgtccagattctcttgatgatgctgatgctttgggaagtatgttaatttcatggtacatgagtggctatcatactggctattatatgacagggtttcactgtgttagccaggatggtctcaatctcctgaccccgtgatccacccgcctcggccttccaagagaaatgaaatttttttaatgcacaaagatctggggaaatgctggcatagagcagcactaaatgacaccactaaagaaacgatcagacagatctggaatgtgaagcgttatagaagataactggcctcatttcttcaaaatatcaagtgttgggaaagaaaaaaggaagtggaatgggtaactcttcttgattaaaagttatgtaataaccaaatgcaatgtgaaatattttactggactctattttgaaaaaccatctgtaaaagactggggtgggggtgggaggccagcacggtggtgaggcagttgagaaaatttgaatgtggattagattttgaatgatattggataattattggtaattttatgagctgtgagaagggtgttgtagtttataaaagactgtcttaatttgcatacttaagcatttaggaatgaagtgttagagtgtcttaaaatgtttcaaatggtttaacaaaatgtatgtgaggcgtatgtggcaaaatgttacagaatctaactggtggacatggctgttcattgtactgtttttttctatcttctatatgtttaaaagtatataataaaaatatttaatttttttttaaattag

SEQ ID NO: 187721 - DNA, 867 bp, Homo sapiens; identical to SEQ ID NO: 187711
  Payload ID: 16947
  Gene Symbol: SMN2
  Gene Name: survival of motor neuron 2, centromeric
  ENST ID: ENST00000619658
  CDS Start-End: 49-732

SEQ ID NO: 187722 - DNA, 804 bp, Homo sapiens
  Payload ID: 16947
  Gene Symbol: SMN2
  Gene Name: survival of motor neuron 2, centromeric
  Uniprot ID: Q16637
  ENST ID: ENST00000614240
  CDS Start-End: 1-789
atggcgatgagcagcggcggcagtggtggcggcgtcccggagcaggaggattccgtgctgttccggcgcggcacaggccagagcgatgattctgacatttgggatgatacagcactgataaaagcatatgataaagctgtggcttcatttaagcatgctctaaagaatggtgacatttgtgaaacttcgggtaaaccaaaaaccacacctaaaagaaaacctgctaagaagaataaaagccaaaagaagaatactgcagcttccttacaacagtggaaagttggggacaaatgttctgccatttggtcagaagacggttgcatttacccagctaccattgcttcaattgattttaagagagaaacctgtgttgtggtttacactggatatggaaatagagaggagcaaaatctgtccgatctactttccccaatctgtgaagtagctaataatatagaacaaaatgctcaagagaatgaaaatgaaagccaagtttcaacagatgaaagtgagaactccaggtctcctggaaataaatcagataacatcaagcccaaatctgctccatggaactcttttctccctccaccaccccccatgccagggccaagactgggaccaggaaagataattcccccaccacctcccatatgtccagattctcttgatgatgctgatgctttgggaagtatgttaatttcatggtacatgagtggctatcatactggctattatatgggttttagacaaaatcaaaaagaaggaaggtgctcacattccttaaattaaggagtaagtctgcca

SEQ ID NO: 187723 - DNA, 885 bp, Homo sapiens
  Payload ID: 16947
  Gene Symbol: SMN2
  Gene Name: survival of motor neuron 2, centromeric
  Uniprot ID: Q16637
  ENST ID: ENST00000614610
  CDS Start-End: 1-885
atggcgatgagcagcggcggcagtggtggcggcgtcccggagcaggaggattccgtgctgttccggcgcggcacaggccagagcgatgattctgacatttgggatgatacagcactgataaaagcatatgataaagctgtggcttcatttaagcatgctctaaagaatggtgacatttgtgaaacttcgggtaaaccaaaaaccacacctaaaagaaaacctgctaagaagaataaaagccaaaagaagaatactgcagcttccttacaacagtggaaagttggggacaaatgttctgccatttggtcagaagacggttgcatttacccagctaccattgcttcaattgattttaagagagaaacctgtgttgtggtttacactggatatggaaatagagaggagcaaaatctgtccgatctactttccccaatctgtgaagtagctaataatatagaacagaatgctcaagagaatgaaaatgaaagccaagtttcaacagatgaaagtgagaactccaggtctcctggaaataaatcagataacatcaagcccaaatctgctccatggaactcttttctccctccaccaccccccatgccagggccaagactgggaccaggaaagccaggtctaaaattcaatggcccaccaccgccaccgccaccaccaccaccccacttactatcatgctggctgcctccatttccttctggaccaccaataattcccccaccacctcccatatgtccagattctcttgatgatgctgatgctttgggaagtatgttaatttcatggtacatgagtggctatcatactggctattatatgggttttagacaaaatcaaaaagaaggaaggtgctcacattccttaaattaa

SEQ ID NO: 187724 - DNA, 1045 bp, Homo sapiens
  Payload ID: 16947
  Gene Symbol: SMN2
  Gene Name: survival of motor neuron 2, centromeric
  ENST ID: ENST00000620650
  CDS Start-End: 1-139
atgtccagattctcttgatgatgctgatgctttgggaagtatgttaatttcatggtacatgagtggctatcatactggctattatatgggtttcagacaaaatcaaaaagaaggaaggtgctcacattccttaaattaaggagaaatgctggcatagagcagcactaaatgacaccactaaagaaacgatcagacagatctggaatgtgaagcgttatagaagataactggcctcatttcttcaaaatatcaagtgttgggaaagaaaaaaggaagtggaatggagtctcgctctgctgcccacgctggagtgcagtggtgcaatctcagctcactgcaacctctgctatccgggttcaagcggttctcgtgcctcacccacgtgagtagttgggattacaggcatgtggcaccatgccccactaagttttgtatttttagtagagatggagtttcaccatgttggccaggctggtctcaaactcctgccctcaagtgattcgaccaccctggcctcccaaagtgctgggattacagccgtgagccaccgcacacggcctctctatttatttctatacatagcttttcacattatattatgtttatatattgtttatatctgtatttcctctttcattagagaaaaggtagtacatcttattcttcatggtgtctacaatatctggcagtttttggaagtcaagcgtgagcttagagcatagactggtgggattgtcaaagaagagggcaactggaagagaactgtcagttatttttggatcagtctttaattcatcatgacgggttaggcattagttgtatttcttgctaattttgaagaagacttattaacaaatcctacattaggtaaatggttttgaaagttgagttaatcataatggtgtttgacctaggactatttttaggccctatttatcttaatatcgaataatgaagcagcttcccccttagatatagacagaaaacatcaaagccaccacactacctggctggatttatcctagtaataaaatcaaaactgagc

SEQ ID NO: 187725 - DNA, 1221 bp, Homo sapiens
  Payload ID: 16947
  Gene Symbol: SMN2
  Gene Name: survival of motor neuron 2, centromeric
  Uniprot ID: Q16637
  ENST ID: ENST00000614773
  CDS Start-End: 75-863
agaagccccgggcggcggaagtcgtcactcttaagaagggacggggccccacgctgcgcacccgcgggtttgctatggcgatgagcagcggcggcagtggtggcggcgtcccggagcaggaggattccgtgctgttccggcgcggcacaggccagagcgatgattctgacatttgggatgatacagcactgataaaagcatatgataaagctgtggcttcatttaagcatgctctaaagaatggtgacatttgtgaaacttcgggtaaaccaaaaaccacacctaaaagaaaacctgctaagaagaataaaagccaaaagaagaatactgcagcttccttacaacagtggaaagttggggacaaatgttctgccatttggtcagaagacggttgcatttacccagctaccattgcttcaattgattttaagagagaaacctgtgttgtggtttacactggatatggaaatagagaggagcaaaatctgtccgatctactttccccaatctgtgaagtagctaataatatagaacagaatgctcaagagaatgaaaatgaaagccaagtttcaacagatgaaagtgagaactccaggtctcctggaaataaatcagataacatcaagcccaaatctgctccatggaactcttttctccctccaccaccccccatgccagggccaagactgggaccaggaaagataattcccccaccacctcccatatgtccagattctcttgatgatgctgatgctttgggaagtatgttaatttcatggtacatgagtggctatcatactggctattatatgggttttagacaaaatcaaaaagaaggaaggtgctcacattccttaaattaaggagtaagtctgccagcattatgaaagtgaatcttacttttgtaaaactttatggtttgtggaaaacaaatgtttttgaacatttaaaaagttcagatgttagaaagttgaaaggttaatgtaaaacaatcaatattaaagaattttgatgccaaaactattagataaaaggttaatctacatccctactagaattctcatacttaactggttggttgtgtggaagaaacatactttcacaataaagagctttaggatatgatgccattttatatcactagtaggcagaccagcagacttttttttattgtgatatgggataacctaggcatactgcactgtacactctgacatatga

SEQ ID NO: 187726 - DNA, 417 bp, Homo sapiens
  Payload ID: 16947
  Gene Symbol: SMN2
  Gene Name: survival of motor neuron 2, centromeric
  ENST ID: ENST00000617648
  CDS Start-End: 1-240
ctttccccaatctgtgaagtagctaataatatagaacagaatgctcaagagaatgaaaatgaaagccaagtttcaacagatgaaagtgagaactccaggtctcctggaaataaatcagataacatcaagcccaaatctgctccatggaactcttttctccctccaccaccccccatgccagggccaagactgggaccaggaaagaaaggaaatgagaaaaatccagaggttgtcatttgacttatgagtctgtttgacttcaggatttggtacatgaaatttcacttaatctttttgatatgtataaaacaaatattctggccaggtctaaaattcaatggcccaccaccgccaccgccaccaccaccaccccacttactatcatgctggctgcctccatttccttctggaccacca

SEQ ID NO: 187727 - DNA, 1492 bp, Homo sapiens
  Payload ID: 16947
  Gene Symbol: SMN2
  Gene Name: survival of motor neuron 2, centromeric
  Uniprot ID: Q16637
  ENST ID: ENST00000618251
  CDS Start-End: 31-915
ggccccacgctgcgcacccgcgggtttgctatggcgatgagcagcggcggcagtggtggcggcgtcccggagcaggaggattccgtgctgttccggcgcggcacaggccagagcgatgattctgacatttgggatgatacagcactgataaaagcatatgataaagctgtggcttcatttaagcatgctctaaagaatggtgacatttgtgaaacttcgggtaaaccaaaaaccacacctaaaagaaaacctgctaagaagaataaaagccaaaagaagaatactgcagcttccttacaacagtggaaagttggggacaaatgttctgccatttggtcagaagacggttgcatttacccagctaccattgcttcaattgattttaagagagaaacctgtgttgtggtttacactggatatggaaatagagaggagcaaaatctgtccgatctactttccccaatctgtgaagtagctaataatatagaacagaatgctcaagagaatgaaaatgaaagccaagtttcaacagatgaaagtgagaactccaggtctcctggaaataaatcagataacatcaagcccaaatctgctccatggaactcttttctccctccaccaccccccatgccagggccaagactgggaccaggaaagccaggtctaaaattcaatggcccaccaccgccaccgccaccaccaccaccccacttactatcatgctggctgcctccatttccttctggaccaccaataattcccccaccacctcccatatgtccagattctcttgatgatgctgatgctttgggaagtatgttaatttcatggtacatgagtggctatcatactggctattatatgggtttcagacaaaatcaaaaagaaggaaggtgctcacattccttaaattaaggagaaatgctggcatagagcagcactaaatgacaccactaaagaaacgatcagacagatctggaatgtgaagcgttatagaagataactggcctcatttcttcaaaatatcaagtgttgggaaagaaaaaaggaagtggaatgggtaactcttcttgattaaaagttatgtaataaccaaatgcaatgtgaaatattttactggactctattttgaaaaaccatctgtaaaagactggggtgggggtgggaggccagcacggtggtgaggcagttgagaaaatttgaatgtggattagattttgaatgatattggataattattggtaattttatgagctgtgagaagggtgttgtagtttataaaagactgtcttaatttgcatacttaagcatttaggaatgaagtgttagagtgtcttaaaatgtttcaaatggtttaacaaaatgtatgtgaggcgtatgtggcaaaatgttacagaatctaactggtggacatggctgttcattgtactgtttttttctatcttctatatgtttaaaagtatataataaaaatatttaatttttttttaaa

SEQ ID NO: 187728 - DNA, 804 bp, Homo sapiens; identical to SEQ ID NO: 187702
  Payload ID: 16947
  Gene Symbol: SMN2
  Gene Name: survival of motor neuron 2, centromeric
  Uniprot ID: Q16637
  ENST ID: ENST00000611442
  CDS Start-End: 1-789

SEQ ID NO: 187729 - DNA, 900 bp, Homo sapiens; identical to SEQ ID NO: 187703
  Payload ID: 16947
  Gene Symbol: SMN2
  Gene Name: survival of motor neuron 2, centromeric
  Uniprot ID: Q16637
  ENST ID: ENST00000618661
  CDS Start-End: 1-885

SEQ ID NO: 187730 - DNA, 1388 bp, Homo sapiens
  Payload ID: 16947
  Gene Symbol: SMN2
  Gene Name: survival of motor neuron 2, centromeric
  Uniprot ID: Q16637
  ENST ID: ENST00000624634
  CDS Start-End: 23-811
gctgcgcacccgcgggtttgctatggcgatgagcagcggcggcagtggtggcggcgtcccggagcaggaggattccgtgctgttccggcgcggcacaggccagagcgatgattctgacatttgggatgatacagcactgataaaagcatatgataaagctgtggcttcatttaagcatgctctaaagaatggtgacatttgtgaaacttcgggtaaaccaaaaaccacacctaaaagaaaacctgctaagaagaataaaagccaaaagaagaatactgcagcttccttacaacagtggaaagttggggacaaatgttctgccatttggtcagaagacggttgcatttacccagctaccattgcttcaattgattttaagagagaaacctgtgttgtggtttacactggatatggaaatagagaggagcaaaatctgtccgatctactttccccaatctgtgaagtagctaataatatagaacagaatgctcaagagaatgaaaatgaaagccaagtttcaacagatgaaagtgagaactccaggtctcctggaaataaatcagataacatcaagcccaaatctgctccatggaactcttttctccctccaccaccccccatgccagggccaagactgggaccaggaaagataattcccccaccacctcccatatgtccagattctcttgatgatgctgatgctttgggaagtatgttaatttcatggtacatgagtggctatcatactggctattatatgggtttcagacaaaatcaaaaagaaggaaggtgctcacattccttaaattaaggagaaatgctggcatagagcagcactaaatgacaccactaaagaaacgatcagacagatctggaatgtgaagcgttatagaagataactggcctcatttcttcaaaatatcaagtgttgggaaagaaaaaaggaagtggaatgggtaactcttcttgattaaaagttatgtaataaccaaatgcaatgtgaaatattttactggactctattttgaaaaaccatctgtaaaagactggggtgggggtgggaggccagcacggtggtgaggcagttgagaaaatttgaatgtggattagattttgaatgatattggataattattggtaattttatgagctgtgagaagggtgttgtagtttataaaagactgtcttaatttgcatacttaagcatttaggaatgaagtgttagagtgtcttaaaatgtttcaaatggtttaacaaaatgtatgtgaggcgtatgtggcaaaatgttacagaatctaactggtggacatggctgttcattgtactgtttttttctatcttctatatgtttaaaagtatataataaaaatatttaatttttttttaaa

SEQ ID NO: 187731 - DNA, 431 bp, Homo sapiens
  Payload ID: 16947
  Gene Symbol: SMN2
  Gene Name: survival of motor neuron 2, centromeric
  ENST ID: ENST00000625462
  CDS Start-End: 1-240
ctttccccaatctgtgaagtagctaataatatagaacagaatgctcaagagaatgaaaatgaaagccaagtttcaacagatgaaagtgagaactccaggtctcctggaaataaatcagataacatcaagcccaaatctgctccatggaactcttttctccctccaccaccccccatgccagggccaagactgggaccaggaaagaaaggaaatgagaaaaatccagaggttgtcatttgacttatgagtctgtttgacttcaggatttggtacatgaaatttcacttaatctttttgatatgtataaaacaaatattctggccaggtctaaaattcaatggcccaccaccgccaccgccaccaccaccaccccacttactatcatgctggctgcctccatttccttctggaccaccaataattcccccacc

SEQ ID NO: 187732 - DNA, 885 bp, Homo sapiens; identical to SEQ ID NO: 187701
  Payload ID: 16947
  Gene Symbol: SMN2
  Gene Name: survival of motor neuron 2, centromeric
  ENST ID: ENST00000629741
  CDS Start-End: 1-885

SEQ ID NO: 187733 - DNA, 1550 bp, Homo sapiens
  Payload ID: 16947
  Gene Symbol: SMN2
  Gene Name: survival of motor neuron 2, centromeric
  ENST ID: ENST00000631104
  CDS Start-End: 30-914
gccccacgctgcgcacccgcgggtttgctatggcgatgagcagcggcggcagtggtggcggcgtcccggagcaggaggattccgtgctgttccggcgcggcacaggccagagcgatgattctgacatttgggatgatacagcactgataaaagcatatgataaagctgtggcttcatttaagcatgctctaaagaatggtgacatttgtgaaacttcgggtaaaccaaaaaccacacctaaaagaaaacctgctaagaagaataaaagccaaaagaagaatactgcagcttccttacaacagtggaaagttggggacaaatgttctgccatttggtcagaagacggttgcatttacccagctaccattgcttcaattgattttaagagagaaacctgtgttgtggtttacactggatatggaaatagagaggagcaaaatctgtccgatctactttccccaatctgtgaagtagctaataatatagaacagaatgctcaagagaatgaaaatgaaagccaagtttcaacagatgaaagtgagaactccaggtctcctggaaataaatcagataacatcaagcccaaatctgctccatggaactcttttctccctccaccaccccccatgccagggccaagactgggaccaggaaagccaggtctaaaattcaatggcccaccaccgccaccgccaccaccaccaccccacttactatcatgctggctgcctccatttccttctggaccaccaataattcccccaccacctcccatatgtccagattctcttgatgatgctgatgctttgggaagtatgttaatttcatggtacatgagtggctatcatactggctattatatgacagggtttcactgtgttagccaggatggtctcaatctcctgaccccgtgatccacccgcctcggccttccaagagaaatgaaatttttttaatgcacaaagatctggggaaatgctggcatagagcagcactaaatgacaccactaaagaaacgatcagacagatctggaatgtgaagcgttatagaagataactggcctcatttcttcaaaatatcaagtgttgggaaagaaaaaaggaagtggaatgggtaactcttcttgattaaaagttatgtaataaccaaatgcaatgtgaaatattttactggactctattttgaaaaaccatctgtaaaagactgaggtgggggtgggaggccagcacggtggtgaggcagttgagaaaatttgaatgtggattagattttgaatgatattggataattattggtaattttatgagctgtgagaagggtgttgtagtttataaaagactgtcttaatttgcatacttaagcatttaggaatgaagtgttagagtgtcttaaaatgtttcaaatggtttaacaaaatgtatgtgaggcgtatgtggcaaaatgttacagaatctaactggtggacatggctgttcattgtactgtttttttctatcttctatatgtttaaaagtatataataaaaatatttaatttttttttaaattag

SEQ ID NO: 187734 - DNA, 1440 bp, Homo sapiens
  Payload ID: 16947
  Gene Symbol: SMN2
  Gene Name: survival of motor neuron 2, centromeric
  Uniprot ID: Q16637
  ENST ID: ENST00000626847
  CDS Start-End: 33-881
ggggccccacgctgcgcacccgcgggtttgctatggcgatgagcagcggcggcagtggtggcggcgtcccggagcaggaggattccgtgctgttccggcgcggcacaggccagagcgatgattctgacatttgggatgatacagcactgataaaagcatatgataaagctgtggcttcatttaagcatgctctaaagaatggtgacatttgtgaaacttcgggtaaaccaaaaaccacacctaaaagaaaacctgctaagaagaataaaagccaaaagaagaatactgcagcttccttacaacagtggaaagttggggacaaatgttctgccatttggtcagaagacggttgcatttacccagctaccattgcttcaattgattttaagagagaaacctgtgttgtggtttacactggatatggaaatagagaggagcaaaatctgtccgatctactttccccaatctgtgaagtagctaataatatagaacaaaatgctcaagagaatgaaaatgaaagccaagtttcaacagatgaaagtgagaactccaggtctcctggaaataaatcagataacatcaagcccaaatctgctccatggaactcttttctccctccaccaccccccatgccagggccaagactgggaccaggaaagccaggtctaaaattcaatggcccaccaccgccaccgccaccaccaccaccccacttactatcatgctggctgcctccatttccttctggaccaccaataattcccccaccacctcccatatgtccagattctcttgatgatgctgatgctttgggaagtatgttaatttcatggtacatgagtggctatcatactggctattatatggaaatgctggcatagagcagcactaaatgacaccactaaagaaacgatcagacagatctggaatgtgaagcgttatagaagataactggcctcatttcttcaaaatatcaagtgttgggaaagaaaaaaggaagtggaatgggtaactcttcttgattaaaagttatgtaataaccaaatgcaatgtgaaatattttactggactctattttgaaaaaccatctgtaaaagactgaggtgggggtgggaggccagcacggtggtgaggcagttgagaaaatttgaatgtggattagattttgaatgatattggataattattggtaattttatgagctgtgagaagggtgttgtagtttataaaagactgtcttaatttgcatacttaagcatttaggaatgaagtgttagagtgtcttaaaatgtttcaaatggtttaacaaaatgtatgtgaggcgtatgtggcaaaatgttacagaatctaactggtggacatggctgttcattgtactgtttttttctatcttctatatgtttaaaagtatataataaaaatatttaatttttttttaaa

SEQ ID NO: 187735 - DNA, 885 bp, Homo sapiens; identical to SEQ ID NO: 187705
  Payload ID: 16947
  Gene Symbol: SMN2
  Gene Name: survival of motor neuron 2, centromeric
  ENST ID: ENST00000628696
  CDS Start-End: 1-885

SEQ ID NO: 187736 - DNA, 867 bp, Homo sapiens; identical to SEQ ID NO: 187715
  Payload ID: 16947
  Gene Symbol: SMN2
  Gene Name: survival of motor neuron 2, centromeric
  ENST ID: ENST00000625687
  CDS Start-End: 49-732

SEQ ID NO: 187737 - DNA, 1416 bp, Homo sapiens
  Payload ID: 16947
  Gene Symbol: SMN2
  Gene Name: survival of motor neuron 2, centromeric
  Uniprot ID: Q16637
  ENST ID: ENST00000628642
  CDS Start-End: 10-858
gggtttgctatggcgatgagcagcggcggcagtggtggcggcgtcccggagcaggaggattccgtgctgttccggcgcggcacaggccagagcgatgattctgacatttgggatgatacagcactgataaaagcatatgataaagctgtggcttcatttaagcatgctctaaagaatggtgacatttgtgaaacttcgggtaaaccaaaaaccacacctaaaagaaaacctgctaagaagaataaaagccaaaagaagaatactgcagcttccttacaacagtggaaagttggggacaaatgttctgccatttggtcagaagacggttgcatttacccagctaccattgcttcaattgattttaagagagaaacctgtgttgtggtttacactggatatggaaatagagaggagcaaaatctgtccgatctactttccccaatctgtgaagtagctaataatatagaacagaatgctcaagagaatgaaaatgaaagccaagtttcaacagatgaaagtgagaactccaggtctcctggaaataaatcagataacatcaagcccaaatctgctccatggaactcttttctccctccaccaccccccatgccagggccaagactgggaccaggaaagccaggtctaaaattcaatggcccaccaccgccaccgccaccaccaccaccccacttactatcatgctggctgcctccatttccttctggaccaccaataattcccccaccacctcccatatgtccagattctcttgatgatgctgatgctttgggaagtatgttaatttcatggtacatgagtggctatcatactggctattatatggaaatgctggcatagagcagcactaaatgacaccactaaagaaacgatcagacagatctggaatgtgaagcgttatagaagataactggcctcatttcttcaaaatatcaagtgttgggaaagaaaaaaggaagtggaatgggtaactcttcttgattaaaagttatgtaataaccaaatgcaatgtgaaatattttactggactctattttgaaaaaccatctgtaaaagactgaggtgggggtgggaggccagcacggtggtgaggcagttgagaaaatttgaatgtggattagattttgaatgatattggataattattggtaattttatgagctgtgagaagggtgttgtagtttataaaagactgtcttaatttgcatacttaagcatttaggaatgaagtgttagagtgtcttaaaatgtttcaaatggtttaacaaaatgtatgtgaggcgtatgtggcaaaatgttacagaatctaactggtggacatggctgttcattgtactgtttttttctatcttctatatgtttaaaagtatataataaaaatatttaatttttttttaa

SEQ ID NO: 187738 - DNA, 1539 bp, Homo sapiens
  Payload ID: 16947
  Gene Symbol: SMN2
  Gene Name: survival of motor neuron 2, centromeric
  Uniprot ID: Q16637
  ENST ID: ENST00000627341
  CDS Start-End: 75-959
agaagccccgggcggcggaagtcgtcactcttaagaagggacggggccccacgctgcgcacccgcgggtttgctatggcgatgagcagcggcggcagtggtggcggcgtcccggagcaggaggattccgtgctgttccggcgcggcacaggccagagcgatgattctgacatttgggatgatacagcactgataaaagcatatgataaagctgtggcttcatttaagcatgctctaaagaatggtgacatttgtgaaacttcgggtaaaccaaaaaccacacctaaaagaaaacctgctaagaagaataaaagccaaaagaagaatactgcagcttccttacaacagtggaaagttggggacaaatgttctgccatttggtcagaagacggttgcatttacccagctaccattgcttcaattgattttaagagagaaacctgtgttgtggtttacactggatatggaaatagagaggagcaaaatctgtccgatctactttccccaatctgtgaagtagctaataatatagaacagaatgctcaagagaatgaaaatgaaagccaagtttcaacagatgaaagtgagaactccaggtctcctggaaataaatcagataacatcaagcccaaatctgctccatggaactcttttctccctccaccaccccccatgccagggccaagactgggaccaggaaagccaggtctaaaattcaatggcccaccaccgccaccgccaccaccaccaccccacttactatcatgctggctgcctccatttccttctggaccaccaataattcccccaccacctcccatatgtccagattctcttgatgatgctgatgctttgggaagtatgttaatttcatggtacatgagtggctatcatactggctattatatgggttttagacaaaatcaaaaagaaggaaggtgctcacattccttaaattaaggagaaatgctggcatagagcagcactaaatgacaccactaaagaaacgatcagacagatctggaatgtgaagcgttatagaagataactggcctcatttcttcaaaatatcaagtgttgggaaagaaaaaaggaagtggaatgggtaactcttcttgattaaaagttatgtaataaccaaatgcaatgtgaaatattttactggactctattttgaaaaaccatctgtaaaagactgaggtgggggtgggaggccagcacggtggtgaggcagttgagaaaatttgaatgtggattagattttgaatgatattggataattattggtaattttatgagctgtgagaagggtgttgtagtttataaaagactgtcttaatttgcatacttaagcatttaggaatgaagtgttagagtgtcttaaaatgtttcaaatggtttaacaaaatgtatgtgaggcgtatgtggcaaaatgttacagaatctaactggtggacatggctgttcattgtactgtttttttctatcttctatatgtttaaaagtatataataaaaatatttaatttttttttaaatta

SEQ ID NO: 187739 - DNA, 2861 bp, Homo sapiens
  Payload ID: 16948
  Gene Symbol: SUSD1
  Gene Name: sushi domain containing 1
  ENST ID: ENST00000355396
  CDS Start-End: 1-2119
gttgctgctgctcggcctggcccgcggcgccgcgggagcgccgggccccgacggtttagacgtctgtgccacttgccatgaacatgccacatgccagcaaagagaagggaagaagatctgtatttgcaactatggatttgtagggaacgggaggactcagtgtgttgataaaaatgagtgccagtttggagccactcttgtctgtgggaaccacacatcttgccacaacacccccgggggcttctattgcatttgcctggaaggatatcgagccacaaacaacaacaagacattcattcccaacgatggcaccttttgtacagacatagatgagtgtgaagtttctggcctgtgcaggcatggagggcgatgcgtgaacactcatgggagctttgaatgctactgtatggatggatacttgccaaggaatggacctgaacctttccacccgaccaccgatgccacatcatgcacagaaatagactgtggtacccctcctgaggttccagatggctatatcataggaaattatacgtctagtctgggcagccaggttcgttatgcttgcagagaaggattcttcagtgttccagaagatacagtttcaagctgcacaggcctgggcacatgggagtccccaaaattacattgccaagagatcaactgtggcaaccctccagaaatgcggcacgccatcttggtaggaaatcacagctccaggctgggcggtgtggctcgctatgtctgtcaagagggctttgagagccctggaggaaagatcacttctgtttgcacagagaaaggcacctggagagaaagtactttaacatgcacagaaattctgacaaagattaatgatgtatcactgtttaatgatacctgtgtgagatggcaaataaactcaagaagaataaaccccaagatctcatatgtgatatccataaaaggacaacggttggaccctatggaatcagttcgtgaggagacagtcaacttgaccacagacagcaggaccccagaagtgtgcctagccctgtacccaggcaccaactacaccgtgaacatctccacagcacctcccaggcgctcgatgccagccgtcatcggtttccagacagctgaagttgatctcttagaagatgatggaagtttcaatatttcaatatttaatgaaacttgtttgaaattgaacaggcgttctaggaaagttggatcagaacacatgtaccaatttaccgttctgggtcagaggtggtatctggctaacttttctcatgcaacatcgtttaacttcacaacgagggaacaagtgcctgtagtgtgtttggatctgtaccctacgactgattatacggtgaatgtgaccctgctgagatctcctaagcggcactcagtgcaaataacaatagcaactcccccagcagtaaaacagaccatcagtaacatttcaggatttaatgaaacctgcttgagatggagaagcatcaagacagctgatatggaggagatgtatttattccacatttggggccagagatggtatcagaaggaatttgcccaggaaatgacctttaatatcagtagcagcagccgagatcccgaggtgtgcttggacctacgtccgggtaccaactacaatgtcagtctccgggctctgtcttcggaacttcctgtggtcatctccctgacaacccagataacagagcctcccctcccggaagtagaattttttacggtgcacagaggacctctaccacgcctcagactgaggaaagccaaggagaaaaatggaccaatcagttcatatcaggtgttagtgcttcccctggccctccaaagcacattttcttgtgattctgaaggcgcttcctccttctttagcaacgcctctgatgctgatggatacgtggctgcagaactactggccaaagatgttccagatgatgccatggagatacctataggagacaggctgtactatggggaatattataatgcacccttgaaaagagggagtgattactgcattatattacgaatcacaagtgaatggaataagattcgtcactcatgctgctgcagatggcgggtgttggactgggttccctggctgttgtgatcattctcacattcctctccttctcagcggtgtgatggcagatggacactgagtggggaggatgcactgctgctgggcaggtgttctggcagcttctcaggtgcccgcacagaggctccgtgtgacttccgtccagggagcatgtgggcctgcaactttctccattcccagctgggccccattcctggatttaagatggtggctatccctgaggagtcaccataaggagaaaactcaggaattctgagtcttccctgctacaggaccagttctgtgcaatgaacttgagactcctgatgtacactgtgatattgaccgaaggctacatacagatctgtgaatcttggctgggacttcctctgagtgatgcctgagggtcagctcctctagacattgactgcaagagaatctctgcaacctcctatataaaagcatttctgttaattcattcagaatccattctttacaatatgcagtgagatgggcttaagtttgggctagagtttgactttatgaaggaggtcattgaaaaagagaacagtgacgtaggcaaatgtttcaagcactttagaaacagtacttttcctataattagttgatatactaatgagaaaatatactagcctggccatgccaataagtttcctgctgtgtctgttaggcagcattgctttgatgcaatttctattgtcctatatattcaaaagtaatgtctacattccagtaaaaatatcccgtaatt

SEQ ID NO: 187740 - DNA, 2973 bp, Homo sapiens
  Payload ID: 16948
  Gene Symbol: SUSD1
  Gene Name: sushi domain containing 1
  ENST ID: ENST00000374263
  CDS Start-End: 63-2231
atctctgcaccctgagggccccgggaggaggcgcgggcgcgccgggagggaccggcggcggcatgggccgggggccctgggatgcgggcccgtctcgccgcctgctgccgctgttgctgctgctcggcctggcccgcggcgccgcgggagcgccgggccccgacggtttagacgtctgtgccacttgccatgaacatgccacatgccagcaaagagaagggaagaagatctgtatttgcaactatggatttgtagggaacgggaggactcagtgtgttgataaaaatgagtgccagtttggagccactcttgtctgtgggaaccacacatcttgccacaacacccccgggggcttctattgcatttgcctggaaggatatcgagccacaaacaacaacaagacattcattcccaacgatggcaccttttgtacagacatagatgagtgtgaagtttctggcctgtgcaggcatggagggcgatgcgtgaacactcatgggagctttgaatgctactgtatggatggatacttgccaaggaatggacctgaacctttccacccgaccaccgatgccacatcatgcacagaaatagactgtggtacccctcctgaggttccagatggctatatcataggaaattatacgtctagtctgggcagccaggttcgttatgcttgcagagaaggattcttcagtgttccagaagatacagtttcaagctgcacaggcctgggcacatgggagtccccaaaattacattgccaagagatcaactgtggcaaccctccagaaatgcggcacgccatcttggtaggaaatcacagctccaggctgggcggtgtggctcgctatgtctgtcaagagggctttgagagccctggaggaaagatcacttctgtttgcacagagaaaggcacctggagagaaagtactttaacatgcacagaaattctgacaaagattaatgatgtatcactgtttaatgatacctgtgtgagatggcaaataaactcaagaagaataaaccccaagatctcatatgtgatatccataaaaggacaacggttggaccctatggaatcagttcgtgaggagacagtcaacttgaccacagacagcaggaccccagaagtgtgcctagccctgtacccaggcaccaactacaccgtgaacatctccacagcacctcccaggcgctcgatgccagccgtcatcggtttccagacagctgaagttgatctcttagaagatgatggaagtttcaatatttcaatatttaatgaaacttgtttgaaattgaacaggcgttctaggaaagttggatcagaacacatgtaccaatttaccgttctgggtcagaggtggtatctggctaacttttctcatgcaacatcgtttaacttcacaacgagggaacaagtgcctgtagtgtgtttggatctgtaccctacgactgattatacggtgaatgtgaccctgctgagatctcctaagcggcactcagtgcaaataacaatagcaactcccccagcagtaaaacagaccatcagtaacatttcaggatttaatgaaacctgcttgagatggagaagcatcaagacagctgatatggaggagatgtatttattccacatttggggccagagatggtatcagaaggaatttgcccaggaaatgacctttaatatcagtagcagcagccgagatcccgaggtgtgcttggacctacgtccgggtaccaactacaatgtcagtctccgggctctgtcttcggaacttcctgtggtcatctccctgacaacccagataacagagcctcccctcccggaagtagaattttttacggtgcacagaggacctctaccacgcctcagactgaggaaagccaaggagaaaaatggaccaatcagttcatatcaggtgttagtgcttcccctggccctccaaagcacattttcttgtgattctgaaggcgcttcctccttctttagcaacgcctctgatgctgatggatacgtggctgcagaactactggccaaagatgttccagatgatgccatggagatacctataggagacaggctgtactatggggaatattataatgcacccttgaaaagagggagtgattactgcattatattacgaatcacaagtgaatggaataagattcgtcactcatgctgctgcagatggcgggtgttggactgggttccctggctgttgtgatcattctcacattcctctccttctcagcggtgtgatggcagatggacactgagtggggaggatgcactgctgctgggcaggtgttctggcagcttctcaggtgcccgcacagaggctccgtgtgacttccgtccagggagcatgtgggcctgcaactttctccattcccagctgggccccattcctggatttaagatggtggctatccctgaggagtcaccataaggagaaaactcaggaattctgagtcttccctgctacaggaccagttctgtgcaatgaacttgagactcctgatgtacactgtgatattgaccgaaggctacatacagatctgtgaatcttggctgggacttcctctgagtgatgcctgagggtcagctcctctagacattgactgcaagagaatctctgcaacctcctatataaaagcatttctgttaattcattcagaatccattctttacaatatgcagtgagatgggcttaagtttgggctagagtttgactttatgaaggaggtcattgaaaaagagaacagtgacgtaggcaaatgtttcaagcactttagaaacagtacttttcctataattagttgatatactaatgagaaaatatactagcctggccatgccaataagtttcctgctgtgtctgttaggcagcattgctttgatgcaatttctattgtcctatatattcaaaagtaatgtctacattccagtaaaaatatcccgtaatt

SEQ ID NO: 187741 - DNA, 2754 bp, Homo sapiens
  Payload ID: 16948
  Gene Symbol: SUSD1
  Gene Name: sushi domain containing 1
  Uniprot ID: Q6UWL2
  ENST ID: ENST00000374264
  CDS Start-End: 33-2306
gcgcgggcgcgccgggagggaccggcggcggcatgggccgggggccctgggatgcgggcccgtctcgccgcctgctgccgctgttgctgctgctcggcctggcccgcggcgccgcgggagcgccgggccccgacggtttagacgtctgtgccacttgccatgaacatgccacatgccagcaaagagaagggaagaagatctgtatttgcaactatggatttgtagggaacgggaggactcagtgtgttgataaaaatgagtgccagtttggagccactcttgtctgtgggaaccacacatcttgccacaacacccccgggggcttctattgcatttgcctggaaggatatcgagccacaaacaacaacaagacattcattcccaacgatggcaccttttgtacagacatagatgagtgtgaagtttctggcctgtgcaggcatggagggcgatgcgtgaacactcatgggagctttgaatgctactgtatggatggatacttgccaaggaatggacctgaacctttccacccgaccaccgatgccacatcatgcacagaaatagactgtggtacccctcctgaggttccagatggctatatcataggaaattatacgtctagtctgggcagccaggttcgttatgcttgcagagaaggattcttcagtgttccagaagatacagtttcaagctgcacaggcctgggcacatgggagtccccaaaattacattgccaagagatcaactgtggcaaccctccagaaatgcggcacgccatcttggtaggaaatcacagctccaggctgggcggtgtggctcgctatgtctgtcaagagggctttgagagccctggaggaaagatcacttctgtttgcacagagaaaggcacctggagagaaagtactttaacatgcacagaaattctgacaaagattaatgatgtatcactgtttaatgatacctgtgtgagatggcaaataaactcaagaagaataaaccccaagatctcatatgtgatatccataaaaggacaacggttggaccctatggaatcagttcgtgaggagacagtcaacttgaccacagacagcaggaccccagaagtgtgcctagccctgtacccaggcaccaactacaccgtgaacatctccacagcacctcccaggcgctcgatgccagccgtcatcggtttccagacagctgaagttgatctcttagaagatgatggaagtttcaatatttcaatatttaatgaaacttgtttgaaattgaacaggcgttctaggaaagttggatcagaacacatgtaccaatttaccgttctgggtcagaggtggtatctggctaacttttctcatgcaacatcgtttaacttcacaacgagggaacaagtgcctgtagtgtgtttggatctgtaccctacgactgattatacggtgaatgtgaccctgctgagatctcctaagcggcactcagtgcaaataacaatagcaactcccccagcagtaaaacagaccatcagtaacatttcaggatttaatgaaacctgcttgagatggagaagcatcaagacagctgatatggaggagatgtatttattccacatttggggccagagatggtatcagaaggaatttgcccaggaaatgacctttaatatcagtagcagcagccgagatcccgaggtgtgcttggacctacgtccgggtaccaactacaatgtcagtctccgggctctgtcttcggaacttcctgtggtcatctccctgacaacccagataacagagcctcccctcccggaagtagaattttttacggtgcacagaggacctctaccacgcctcagactgaggaaagccaaggagaaaaatggaccaatcagttcatatcaggtgttagtgcttcccctggccctccaaagcacattttcttgtgattctgaaggcgcttcctccttctttagcaacgcctctgatgctgatggatacgtggctgcagaactactggccaaagatgttccagatgatgccatggagatacctataggagacaggctgtactatggggaatattataatgcacccttgaaaagagggagtgattactgcattatattacgaatcacaagtgaatggaataaggtgagaagacactcctgtgcagtttgggctcaggtgaaagaaataccttgtaactgtaatttcctgaggctgcatatccacagggccaactcaggggacacacagattcgtcactcatgctgctgcagatggcgggtgttggactgggttccctggctgttgtgatcattctcacattcctctccttctcagcggtgtgatggcagatggacactgagtggggaggatgcactgctgctgggcaggtgttctggcagcttctcaggtgcccgcacagaggctccgtgtgacttccgtccagggagcatgtgggcctgcaactttctccattcccagctgggccccattcctggatttaagatggtggctatccctgaggagtcaccataaggagaaaactcaggaattctgagtcttccctgctacaggaccagttctgtgcaatgaacttgagactcctgatgtacactgtgatattgaccgaaggctacatacagatctgtgaatcttggctgggacttcctctgagtgatgcctgagggtcagctcctctagacattgactgcaagagaatctctgcaacctcctatataaaagcatttctgttaattca

SEQ ID NO: 187742 - DNA, 3124 bp, Homo sapiens
  Payload ID: 16948
  Gene Symbol: SUSD1
  Gene Name: sushi domain containing 1
  Uniprot ID: Q6UWL2
  ENST ID: ENST00000374270
  CDS Start-End: 174-2417
gaggaaggacccgcgctctgcggcctcccggggaccccgcagcgccccccgcttccctcggcggcgccggaagccgccggctggtcccctccccgcggcgcctgtagccttatctctgcaccctgagggccccgggaggaggcgcgggcgcgccgggagggaccggcggcggcatgggccgggggccctgggatgcgggcccgtctcgccgcctgctgccgctgttgctgctgctcggcctggcccgcggcgccgcgggagcgccgggccccgacggtttagacgtctgtgccacttgccatgaacatgccacatgccagcaaagagaagggaagaagatctgtatttgcaactatggatttgtagggaacgggaggactcagtgtgttgataaaaatgagtgccagtttggagccactcttgtctgtgggaaccacacatcttgccacaacacccccgggggcttctattgcatttgcctggaaggatatcgagccacaaacaacaacaagacattcattcccaacgatggcaccttttgtacagacatagatgagtgtgaagtttctggcctgtgcaggcatggagggcgatgcgtgaacactcatgggagctttgaatgctactgtatggatggatacttgccaaggaatggacctgaacctttccacccgaccaccgatgccacatcatgcacagaaatagactgtggtacccctcctgaggttccagatggctatatcataggaaattatacgtctagtctgggcagccaggttcgttatgcttgcagagaaggattcttcagtgttccagaagatacagtttcaagctgcacaggcctgggcacatgggagtccccaaaattacattgccaagagatcaactgtggcaaccctccagaaatgcggcacgccatcttggtaggaaatcacagctccaggctgggcggtgtggctcgctatgtctgtcaagagggctttgagagccctggaggaaagatcacttctgtttgcacagagaaaggcacctggagagaaagtactttaacatgcacagaaattctgacaaagattaatgatgtatcactgtttaatgatacctgtgtgagatggcaaataaactcaagaagaataaaccccaagatctcatatgtgatatccataaaaggacaacggttggaccctatggaatcagttcgtgaggagacagtcaacttgaccacagacagcaggaccccagaagtgtgcctagccctgtacccaggcaccaactacaccgtgaacatctccacagcacctcccaggcgctcgatgccagccgtcatcggtttccagacagctgaagttgatctcttagaagatgatggaagtttcaatatttcaatatttaatgaaacttgtttgaaattgaacaggcgttctaggaaagttggatcagaacacatgtaccaatttaccgttctgggtcagaggtggtatctggctaacttttctcatgcaacatcgtttaacttcacaacgagggaacaagtgcctgtagtgtgtttggatctgtaccctacgactgattatacggtgaatgtgaccctgctgagatctcctaagcggcactcagtgcaaataacaatagcaactcccccagcagtaaaacagaccatcagtaacatttcaggatttaatgaaacctgcttgagatggagaagcatcaagacagctgatatggaggagatgtatttattccacatttggggccagagatggtatcagaaggaatttgcccaggaaatgacctttaatatcagtagcagcagccgagatcccgaggtgtgcttggacctacgtccgggtaccaactacaatgtcagtctccgggctctgtcttcggaacttcctgtggtcatctccctgacaacccagataacagagcctcccctcccggaagtagaattttttacggtgcacagaggacctctaccacgcctcagactgaggaaagccaaggagaaaaatggaccaatcagttcatatcaggtgttagtgcttcccctggccctccaaagcacattttcttgtgattctgaaggcgcttcctccttctttagcaacgcctctgatgctgatggatacgtggctgcagaactactggccaaagatgttccagatgatgccatggagatacctataggagacaggctgtactatggggaatattataatgcacccttgaaaagagggagtgattactgcattatattacgaatcacaagtgaatggaataaggtgagaagacactcctgtgcagtttgggctcaggtgaaagattcgtcactcatgctgctgcagatggcgggtgttggactgggttccctggctgttgtgatcattctcacattcctctccttctcagcggtgtgatggcagatggacactgagtggggaggatgcactgctgctgggcaggtgttctggcagcttctcaggtgcccgcacagaggctccgtgtgacttccgtccagggagcatgtgggcctgcaactttctccattcccagctgggccccattcctggatttaagatggtggctatccctgaggagtcaccataaggagaaaactcaggaattctgagtcttccctgctacaggaccagttctgtgcaatgaacttgagactcctgatgtacactgtgatattgaccgaaggctacatacagatctgtgaatcttggctgggacttcctctgagtgatgcctgagggtcagctcctctagacattgactgcaagagaatctctgcaacctcctatataaaagcatttctgttaattcattcagaatccattctttacaatatgcagtgagatgggcttaagtttgggctagagtttgactttatgaaggaggtcattgaaaaagagaacagtgacgtaggcaaatgtttcaagcactttagaaacagtacttttcctataattagttgatatactaatgagaaaatatactagcctggccatgccaataagtttcctgctgtgtctgttaggcagcattgctttgatgcaatttctattgtcctatatattcaaaagtaatgtctacattccagtaaaaatatcccgtaatt

SEQ ID NO: 187743 - DNA, 842 bp, Homo sapiens
  Payload ID: 16948
  Gene Symbol: SUSD1
  Gene Name: sushi domain containing 1
  ENST ID: ENST00000415074
  CDS Start-End: 1-842
atggctatatcataggaaattatacgtctagtctgggcagccaggttcgttatgcttgcagagaaggattcttcagtgttccagaagatacagtttcaagctgcacaggcctgggcacatgggagtccccaaaattacattgccaagagatcaactgtggcaaccctccagaaatgcggcacgccatcttggtaggaaatcacagctccaggctgggcggtgtggctcgctatgtctgtcaagagggctttgagagccctggaggaaagatcacttctgtttgcacagagaaaggcacctggagagaaagtactttaacatgcacagaaattctgacaaagattaatgatgtatcactgtttaatgatacctgtgtgagatggcaaataaactcaagaagaataaaccccaagatctcatatgtgatatccataaaaggacaacggttggaccctatggaatcagttcgtgaggagacagtcaacttgaccacagacagcaggaccccagaagtgtgcctagccctgtacccaggcaccaactacaccgtgaacatctccacagcacctcccaggcgctcgatgccagccgtcatcggtttccagacagctggtagcagaaactcccacgggagaaatacacatataaaagaagttgatctcttagaagatgatggaagtttcaatatttcaatatttaatgaaacttgtttgaaattgaacaggcgttctaggaaagttggatcagaacacatgtaccaatttaccgttctgggtcagaggtggtatctggctaacttttctcatgcaacatcgtttaacttcacaacgagggaacaagtg

SEQ ID NO: 187744 - DNA, 743 bp, Homo sapiens
  Payload ID: 16948
  Gene Symbol: SUSD1
  Gene Name: sushi domain containing 1
  ENST ID: ENST00000475283
  CDS Start-End: 1-138
gtgattactgcattatattacgaatcacaagtgaatggaataagcatcaagttcatattgatgagatctgtttatataattgtcactggtgaccagaacccaattcatactactttaagcaaagagcttcatagctgaaaaaaaatgggaggagggtgagtggatgggagcttatggaattatacaaagagctaccccaccaagaaggctccaggaactgggactggggactcaacaccattcgtcactcatgctgctgcagatggcgggtgttggactgggttccctggctgttgtgatcattctcacattcctctccttctcagcggtgtgatggcagatggacactgagtggggaggatgcactgctgctgggcaggtgttctggcagcttctcaggtgcccgcacagaggctccgtgtgacttccgtccagggagcatgtgggcctgcaactttctccattcccagctgggccccattcctggatttaagatggtggctatccctgaggagtcaccataaggagaaaactcaggaattctgagtcttccctgctacaggaccagttctgtgcaatgaacttgagactcctgatgtacactgtgatattgaccgaaggctacatacagatctgtgaatcttggctgggacttcctctgagtgatgcctgagggtcagctcctctagacattgactgcaagagaatctctgcaacctcctatataaaagcatttctgttaa

SEQ ID NO: 187745 - DNA, 3404 bp, Homo sapiens
  Payload ID: 16949
  Gene Symbol: SUSD2
  Gene Name: sushi domain containing 2
  Uniprot ID: Q9UGT4
  ENST ID: ENST00000358321
  CDS Start-End: 262-2730
ctcctcaccctcccacagggtcccagggccgatccaggcctgcgggccaggaatgtgctaacggggcaacttgggccttgctggtccacgcaggcacctgtggactttgagaggggactgggtggggaggggcggggaggggcggggcggggcggtgccgcagagtgcagggcgggcggggccaggccagcagggagtgagcttgtctggccgcctcgcctcggagccactgcactgctggctgcagacacaggctgcaccatgaagccagccctcctgccctgggccctgctgctgctggcgacagccctcggcccgggccccggacccacagcagatgcccaagagagctgctccatgcgctgtggcgccctggacgggccatgttcctgccacccgacgtgctctggccttggcacctgctgcttggatttccgggacttctgcctggagatattgccctactcaggatccatgatgggcggcaaggactttgtggtgcggcacttcaagatgtccagccccacagacgccagtgtgatctgcaggtttaaggacagcatccagaccctcggccatgtggactcctccgggcaagtgcactgtgtgtcacctctgctctatgagagcggccgcatccccttcactgtgtcactggacaacggccactccttccctcgtgcgggcacctggctggctgtgcaccccaacaaagtgtcaatgatggagaagagcgagttggtgaacgagacgcgttggcaatactacggcaccgccaacacctcaggcaacctcagcctgacctggcatgtcaagtcgctgcccacgcagaccatcaccatcgaactgtggggctacgaggagacaggaatgccctactcacaggagtggactgcaaagtggtcgtacctgtaccccctggccacacacatccccaactccggctctttcactttcaccccaaaacctgctcctcccagctaccagagatggcgagtgggtgcacttcggatcatcgacagcaaaaattacgcagggcagaaggacgtgcaggcgctctggaccaacgaccacgcactggcctggcacctgagcgatgacttccgagaggaccctgtggcctgggcacgaactcagtgccaggcctgggaggagctggaggatcagctgcccaacttcctggaggagctgccggactgcccctgcaccctgacccaggcccgggctgactccggccgcttcttcacggactacggctgtgacatggagcagggcagcgtgtgcacctaccaccccggggccgtgcactgtgtgcgttctgtgcaggccagcctccggtacggctcaggtcagcagtgctgctacacagcggacgggacgcagctcctgacagctgactccagcggcggcagcactcccgaccgcggccatgactggggcgcacccccgttccgcacgccaccccgagtgcccagcatgtcccactggctctacgatgtcctcagcttctattactgctgcctctgggcacccgactgcccccgctacatgcaacggcggccctccaatgactgccgcaactaccggcccccaagactggcctccgccttcggagacccacactttgtgaccttcgacggcaccaacttcacattcaatgggcgcggagagtacgtgctgctggaggcagcgctgaccgacctgagggtgcaggcgcgggcccagcccgggacgatgtccaacggcacggagacccgtggcactgggctgaccgcagtggccgtccaggagggcaactcagatgtggtggaagtcaggctggccaacaggaccggaggtctggaggtgctgctgaaccaggaggtgctgagcttcaccgagcagagctggatggacctgaaaggaatgttcctgtcggtggctgccggggacagggtctccatcatgctggcatcaggggccggcctggaggtcagcgtgcagggcccgttcctgagtgtgtccgtcctgctgcctgagaagttcctcacccacacccacggcctcctcgggacactcaacaacgaccccaccgacgacttcaccctgcacagcgggcgcgtcctgcccccaggcaccagtccccaggagctgttcctgtttggggccaactggaccgtgcacaatgcgtcctccctgctcacctacgattcctggttcctggtccacaacttcctgtaccaacccaagcacgaccccaccttcgagcccctcttccccagtgagaccaccctcaaccccagcctggcacaagaggcagccaaactatgtggggacgatcatttctgcaactttgatgtggcagccactgggagcctgagcacgggcactgccactcgggtggcccaccagctgcaccagcgtcgcatgcagagcctgcagccagtggtgtcctgtggctggctggccccacctcccaacggacaaaaggagggcaacaggtacctggcgggttccaccatctacttccactgtgacaacggctacagcctggccggggcagagaccagcacctgccaggctgacggcacctggtcctcacccaccccgaagtgccagccaggacgcagctacgcggtgctgttgggcatcatctttgggggcctcgcggtggtggcggcggttgcgctcgtctatgtgctgctgcgccgcaggaagggcaacacgcacgtctggggtgcacagccctgatgggagcagcttggctgtgagcaccaggccaagactcctgagaacaggcagcccagtcctgcgactcccgcatccccaggaccagacacctgggacctggatacttgatacctgggcatttaaccccctactctgtcatctcagaccccaggcaggaggcccagtgttccaacacccaagccccgtgctagcagcgctccgtgctcttccccaaatactcacggctctaattccccaaacctgaaacttcataccctgggattctaatacctatgtcctgagccctgacactcccacacctgagcctcagattccaatagctcactccctagagcctgacgccggggcccctgacccctgagcctcagattccaatacctcactccccagagcctgatgccggggcccctgacccctgatctacggaggcctgctcccggaccgtgcgggcaccagtgcagtgctgccttggttcctggacccctgggcccatcctgggaccccagatggggtaaggagaggccccagaaccccaaagcagacagcgagacccccagcggcagaggcctccctcggcactccaggcttataatttcgaactcttctggaaggtcactcaggaacaccctccctgcctgtgcaaagagaaaacaagcgccttgtttccttccctg

SEQ ID NO: 187746 - DNA, 1114 bp, Homo sapiens
  Payload ID: 16950
  Gene Symbol: SUSD3
  Gene Name: sushi domain containing 3
  Uniprot ID: Q96L08
  ENST ID: ENST00000375469
  CDS Start-End: 1-729
atgaaaaacataggccttgtgatggaatgggaaattccagagataatttgcacgtgcgctaagctgcggctacccccgcaagcaaccttccaagtccttcgtggcaatggtgcttccgtggggaccgtgctcatgttccgctgcccctccaaccaccagatggtggggtctgggctcctcacctgcacctggaaggggagcatcgctgagtggtcttcagggtccccagtgtgcaaactggtgccaccacacgagacctttggcttcaaggtggccgtgatcgcctccattgtgagctgtgccatcatcctgctcatgtccatggccttcctcacctgctgcctcctcaagtgcgtgaagaagagcaagcggcggcgctccaacaggtcagcccagctgtggtcccagctgaaagatgaggacttggagacggtgcaggccgcataccttggcctcaagcacttcaacaaacccgtgagcgggcccagccaggcgcacgacaaccacagcttcaccacagaccatggtgagagcaccagcaagctggccagtgtgacccgcagcgtggacaaggaccctgggatccccagagctctaagcctcagtggctcctccagctcaccccaagcccaggtgatggtgcacatggcaaaccccagacagcccctgcctgcctctgggctggccacaggaatgccacaacagcccgcagcatatgccctagggtgaccacgcagtgaggctggtgcccatgctccacactgggaggccaggctgaccccaccagccagtcagctacaactccacatcaactccacatgcgcccagctcgagactgatgagtggaatcagcttccaggtgtagggaccccttgaggggccgagctgacatccaaggctgaggaccccagtggggagtgttctgttccggcatatcctggccgtaacgatttttatagttatggactacttgaaaccactactgagggtaatttactagctgtggcctcccactaactagcattcctttaaagagactgggaaatgttttaagcaaatctagttttgtataataaaataagaaaatagcaataaacttcttttcagcaactac

SEQ ID NO: 187747 - DNA, 1195 bp, Homo sapiens
  Payload ID: 16950
  Gene Symbol: SUSD3
  Gene Name: sushi domain containing 3
  Uniprot ID: Q96L08
  ENST ID: ENST00000375472
  CDS Start-End: 37-804
ctggcagaccccgccaagcgcctcggagcgcgcaggatgcgctgggcggccgccaccctccgtggcaaggcgaggccccgggggcgggccggggtcaccacgcctgccccagggaaccgcacaggcacgtgcgctaagctgcggctacccccgcaagcaaccttccaagtccttcgtggcaatggtgcttccgtggggaccgtgctcatgttccgctgcccctccaaccaccagatggtggggtctgggctcctcacctgcacctggaaggggagcatcgctgagtggtcttcagggtccccagtgtgcaaactggtgccaccacacgagacctttggcttcaaggtggccgtgatcgcctccattgtgagctgtgccatcatcctgctcatgtccatggccttcctcacctgctgcctcctcaagtgcgtgaagaagagcaagcggcggcgctccaacaggtcagcccagctgtggtcccagctgaaagatgaggacttggagacggtgcaggccgcataccttggcctcaagcacttcaacaaacccgtgagcgggcccagccaggcgcacgacaaccacagcttcaccacagaccatggtgagagcaccagcaagctggccagtgtgacccgcagcgtggacaaggaccctgggatccccagagctctaagcctcagtggctcctccagctcaccccaagcccaggtgatggtgcacatggcaaaccccagacagcccctgcctgcctctgggctggccacaggaatgccacaacagcccgcagcatatgccctagggtgaccacgcagtgaggctggtgcccatgctccacactgggaggccaggctgaccccaccagccagtcagctacaactccacatcaactccacatgcgcccagctcgagactgatgagtggaatcagcttccaggtgtagggaccccttgaggggccgagctgacatccaaggctgaggaccccagtggggagtgttctgttccggcatatcctggccgtaacgatttttatagttatggactacttgaaaccactactgagggtaatttactagctgtggcctcccactaactagcattcctttaaagagactgggaaatgttttaagcaaatctagttttgtataataaaataagaaaatagcaataaacttcttttcagcaactacagaaaa

SEQ ID NO: 187748 - DNA, 745 bp, Homo sapiens
  Payload ID: 16950
  Gene Symbol: SUSD3
  Gene Name: sushi domain containing 3
  ENST ID: ENST00000471462
  CDS Start-End: 1-359
tggtgccaccacacgagacctttggcttcaaggtggccgtgatcgcctccattgtgagctgtgccatcatcctgctcatgtccatggccttcctcacctgctgcctcctcaagtgcgtgaagaagagcaagcggcggcgctccaacagagaccatggtgagagcaccagcaagctggccagtgtgacccgcagcgtggacaaggaccctgggatccccagagctctaagcctcagtggctcctccagctcaccccaagcccaggtgatggtgcacatggcaaaccccagacagcccctgcctgcctctgggctggccacaggaatgccacaacagcccgcagcatatgccctagggtgaccacgcagtgaggctggtgcccatgctccacactgggaggccaggctgaccccaccagccagtcagctacaactccacatcaactccacatgcgcccagctcgagactgatgagtggaatcagcttccaggtgtagggaccccttgaggggccgagctgacatccaaggctgaggaccccagtggggagtgttctgttccggcatatcctggccgtaacgatttttatagttatggactacttgaaaccactactgagggtaatttactagctgtggcctcccactaactagcattcctttaaagagactgggaaatgttttaagcaaatctagttttgtataataaaataagaaaatagcaataaacttcttttcagcaactaca

SEQ ID NO: 187749 - DNA, 463 bp, Homo sapiens
  Payload ID: 16950
  Gene Symbol: SUSD3
  Gene Name: sushi domain containing 3
  ENST ID: ENST00000465709
  CDS Start-End: 1-463
aggccccgggggcgggccggggtcaccacgcctgccccagggaaccgcacagtggtgccaccacacgagacctttggcttcaaggtggccgtgatcgcctccattgtgagctgtgccatcatcctgctcatgtccatggccttcctcacctgctgcctcctcaagtgcgtgaagaagagcaagcggcggcgctccaacaggtcagcccagctgtggtcccagctgaaagatgaggacttggagacggtgcaggccgcataccttggcctcaagcacttcaacaaacccgtgagcgggcccagccaggcgcacgacaaccacagcttcaccacagaccatggtgagagcaccagcaagctggccagtgtgacccgcagcgtggacaaggaccctgggatccccagagctctaagcctcagtggctcctccagctcaccccaagcccaggtgatggtgcacatgg

SEQ ID NO: 187750 - DNA, 1076 bp, Homo sapiens
  Payload ID: 16950
  Gene Symbol: SUSD3
  Gene Name: sushi domain containing 3
  ENST ID: ENST00000617293
  CDS Start-End: 56-691
acaagccgggctcactcccctggcagaccccgccaagcgcctcggagcgcgcaggatgcgctgggcggccgccaccctccgtggcaaggcgaggccccgggggcgggccggggtcaccacgcctgccccagggaaccgcacaggcacgtgcgctaagctgcggctacccccgcaagcaaccttccaagtccttcgtggcaatggtgcttccgtggggaccgtgctcatgttccgctgcccctccaaccaccagatggtggggtctgggctcctcacctgcacctggaaggggagcatcgctgagtggtcttcagggtccccagtgtgcaaactggtgccaccacacgagacctttggcttcaaggtggccgtgatcgcctccattgtgagctgtgccatcatcctgctcatgtccatggccttcctcacctgctgcctcctcaagtgcgtgaagaagagcaagcggcggcgctccaacagagaccatggtgagagcaccagcaagctggccagtgtgacccgcagcgtggacaaggaccctgggatccccagagctctaagcctcagtggctcctccagctcaccccaagcccaggtgatggtgcacatggcaaaccccagacagcccctgcctgcctctgggctggccacaggaatgccacaacagcccgcagcatatgccctagggtgaccacgcagtgaggctggtgcccatgctccacactgggaggccaggctgaccccaccagccagtcagctacaactccacatcaactccacatgcgcccagctcgagactgatgagtggaatcagcttccaggtgtagggaccccttgaggggccgagctgacatccaaggctgaggaccccagtggggagtgttctgttccggcatatcctggccgtaacgatttttatagttatggactacttgaaaccactactgagggtaatttactagctgtggcctcccactaactagcattcctttaaagagactgggaaatgttttaagcaaatctagttttgtataataaaataagaaaatagcaataaacttcttttcagcaactac

SEQ ID NO: 187751 - DNA, 1056 bp, Homo sapiens
  Payload ID: 16951
  Gene Symbol: SUSD4
  Gene Name: sushi domain containing 4
  Uniprot ID: Q5VX71
  ENST ID: ENST00000344029
  CDS Start-End: 147-1019
gtctcgctcgctcgcgcagcggcggcagcagaggtcgcgcacagatgcgggttagactggcggggggaggaggcggaggagggaaggaagctgcatgcatgagacccacagactcttgcaagctggatgccctctgtggatgaaagatgtatcatggaatgaacccgagcaatggagatggatttctagagcagcagcagcagcagcagcaacctcagtccccccagagactcttggccgtgatcctgtggtttcagctggcgctgtgcttcggccctgcacagctcacgggcgggttcgatgaccttcaagtgtgtgctgaccccggcattcccgagaatggcttcaggacccccagcggaggggttttctttgaaggctctgtagcccgatttcactgccaagacggattcaagctgaagggcgctacaaagagactgtgtttgaagcattttaatggaaccctaggctggatcccaagtgataattccatctgtgtgcaagaagattgccgtatccctcaaatcgaagatgctgagattcataacaagacatatagacatggagagaagctaatcatcacttgtcatgaaggattcaagatccggtaccccgacctacacaatatggtttcattatgtcgcgatgatggaacgtggaataatctgcccatctgtcaaggctgcctgagacctctagcctcttctaatggctatgtaaacatctctgagctccagacctccttcccggtggggactgtgatctcctatcgctgctttcccggatttaaacttgatgggtctgcgtatcttgagtgcttacaaaaccttatctggtcgtccagcccaccccggtgccttgctctggaaggaggaagacctgaacatcttttccctgtcctttatttcccacacatcaggttggcagctgctgtgctttatttttgccctgtgttaaagtcctctcccaccccagcacctacctgttcctcaactagcaccaccacatctctgttctaaatgttgttctcctgcaataaaggacgtttgaattaaa

SEQ ID NO: 187752 - DNA, 3480 bp, Homo sapiens
  Payload ID: 16951
  Gene Symbol: SUSD4
  Gene Name: sushi domain containing 4
  Uniprot ID: Q5VX71
  ENST ID: ENST00000343846
  CDS Start-End: 635-2107
caggtaagaccgacagtcccggaagggtcttccattccgaggaggcgcgcgcaggccggggagggggagttggtgcctggtgcagctccccaagggagaattttttttttttttttgacagcgcagagaaatctcactggggactggggcagtaggatcgatcccaatcccgaggaaaaccagagaagtagctgggggagacggtgccacattgtgagattcccagagtgaaatgtataggcccagggaaaagtgtcttcgcggccccgagacgcggggaggctctagactttcctgtggtgggcacagctgctgaatcccggggaccggcgcggagccaatgtgcgctaacccctgccctccctcctgtcctccatcccccagcacgcgcagcatcccacggcggctgttactcagtgcacccggctcgggggaaggcgggggacctcgccgtgggaaagggggcgggggccgcgcgggggaggaaccaggatggagcctgggaagccgaggcgccgggtcccagagcggaggagggggagcgtggcccccgagcccggacagactggcttattgtggtgttccgcttctggttgcagactcttgcaagctggatgccctctgtggatgaaagatgtatcatggaatgaacccgagcaatggagatggatttctagagcagcagcagcagcagcagcaacctcagtccccccagagactcttggccgtgatcctgtggtttcagctggcgctgtgcttcggccctgcacagctcacgggcgggttcgatgaccttcaagtgtgtgctgaccccggcattcccgagaatggcttcaggacccccagcggaggggttttctttgaaggctctgtagcccgatttcactgccaagacggattcaagctgaagggcgctacaaagagactgtgtttgaagcattttaatggaaccctaggctggatcccaagtgataattccatctgtgtgcaagaagattgccgtatccctcaaatcgaagatgctgagattcataacaagacatatagacatggagagaagctaatcatcacttgtcatgaaggattcaagatccggtaccccgacctacacaatatggtttcattatgtcgcgatgatggaacgtggaataatctgcccatctgtcaaggctgcctgagacctctagcctcttctaatggctatgtaaacatctctgagctccagacctccttcccggtggggactgtgatctcctatcgctgctttcccggatttaaacttgatgggtctgcgtatcttgagtgcttacaaaaccttatctggtcgtccagcccaccccggtgccttgctctggaagtctgtccactacctccaatggtgagtcacggagatttcgtctgccacccgcggccttgtgagcgctacaaccacggaactgtggtggagttttactgcgatcctggctacagcctcaccagcgactacaagtacatcacctgccagtatggagagtggtttccttcttatcaagtctactgcatcaaatcagagcaaacgtggcccagcacccatgagaccctcctgaccacgtggaagattgtggcgttcacggcaaccagtgtgctgctggtgctgctgctcgtcatcctggccaggatgttccagaccaagttcaaggcccactttccccccagggggcctccccggagttccagcagtgaccctgactttgtggtggtagacggcgtgcccgtcatgctcccgtcctatgacgaagctgtgagtggcggcttgagtgccttaggccccgggtacatggcctctgtgggccagggctgccccttacccgtggacgaccagagccccccagcataccccggctcaggggacacggacacaggcccaggggagtcagaaacctgtgacagcgtctcaggctcttctgagctgctccaaagtctgtattcacctcccaggtgccaagagagcacccaccctgcttcggacaaccctgacataattgccagcacggcagaggaggtggcatccaccagcccaggcatcgacattgcagatgagattcctctaatggaagaagatccctaatatgggtcaagatccagatgactctcctgctccttcggggaaaggaccttgtatcttggagtgaggtcacagaaggatagagcctgggggcaaaatgtctaacttgtctacatggggaccacagttcacattatgcatctcaggctccacagtgaggctgacaaactgcaatggcagtgcttttaaatgagatttgaggattcaccaagacccatggggaaccggggcagcagggaagccctcgcgtggtcttggatgaggggtgttaaatgtgtatcgtgctgtggaacatgggacaattccacgcacatcccaccgaatcatcacgcatcccattgactggcaagtactccccgccccctctgaaagcatgtcacatcatgtaaatttgcttctaacatctgcttcaaactgtctctggactccaaatttggatgggtcagcctctgcagaaagtttgtgttgagatgctggaagaacagcagagcctcctgcaccctcagcaagggaccagctcccaaaggaaaggtccttgtgtgacatttggagaatcttccttcatccagacaactctactcgaagcaagacgaaagcaggatgtggcagttgcagtgagaaaggaaaggaaagatgggcagactctgctttctggaaatttcttcacaaagtagagctcatgaactctgtgctgtcttctggtaacatatcatcagtgtttgtattcatggtgtggcacatggatccatggcattgggtaaatctggtggtttttacacatggtcagaatgtgttcaaatacatctcatgatggagacagtaaccaaggtaatgttttgtttcagcattttaaaaagactccacttaacatttatctcagaatcatgagcctctctctagttgacaattgtcattgttcccccagccccaaattgaaccatacatttattttccaaaacagaaattgtttctgtaaacatatccgaccttcaaaagaagtgtgaggttggatttttcccccttttatttgtcctaagattccaggaggctggcctcccagcccagatagctcagccacctcacctgcctatcattcctgcattcctactttgagggtctcatcatgcccactgggtgttgttcctaagaaactgattgattaaaaaatttcccaaagtgtcctgaagtgtctcttcaaatacatgttgatctgtggagttgattcctttccttctcttggttttagacaaatgtaaacaaagctctgatccttaaaattgctatgctgatagagtggtgagggctggaagcttgatcaagtcctgtttcttcttgacacagactgattaaaaattaaaagaaaatgacagtttgaa

SEQ ID NO: 187753 - DNA, 3025 bp, Homo sapiens
  Payload ID: 16951
  Gene Symbol: SUSD4
  Gene Name: sushi domain containing 4
  Uniprot ID: Q5VX71
  ENST ID: ENST00000366878
  CDS Start-End: 182-1654
gggagctggagccgagcgccgccgccgaagcttccgtctcgctcgctcgcgcagcggcggcagcagaggtcgcgcacagatgcgggttagactggcggggggaggaggcggaggagggaaggaagctgcatgcatgagacccacagactcttgcaagctggatgccctctgtggatgaaagatgtatcatggaatgaacccgagcaatggagatggatttctagagcagcagcagcagcagcagcaacctcagtccccccagagactcttggccgtgatcctgtggtttcagctggcgctgtgcttcggccctgcacagctcacgggcgggttcgatgaccttcaagtgtgtgctgaccccggcattcccgagaatggcttcaggacccccagcggaggggttttctttgaaggctctgtagcccgatttcactgccaagacggattcaagctgaagggcgctacaaagagactgtgtttgaagcattttaatggaaccctaggctggatcccaagtgataattccatctgtgtgcaagaagattgccgtatccctcaaatcgaagatgctgagattcataacaagacatatagacatggagagaagctaatcatcacttgtcatgaaggattcaagatccggtaccccgacctacacaatatggtttcattatgtcgcgatgatggaacgtggaataatctgcccatctgtcaaggctgcctgagacctctagcctcttctaatggctatgtaaacatctctgagctccagacctccttcccggtggggactgtgatctcctatcgctgctttcccggatttaaacttgatgggtctgcgtatcttgagtgcttacaaaaccttatctggtcgtccagcccaccccggtgccttgctctggaagtctgtccactacctccaatggtgagtcacggagatttcgtctgccacccgcggccttgtgagcgctacaaccacggaactgtggtggagttttactgcgatcctggctacagcctcaccagcgactacaagtacatcacctgccagtatggagagtggtttccttcttatcaagtctactgcatcaaatcagagcaaacgtggcccagcacccatgagaccctcctgaccacgtggaagattgtggcgttcacggcaaccagtgtgctgctggtgctgctgctcgtcatcctggccaggatgttccagaccaagttcaaggcccactttccccccagggggcctccccggagttccagcagtgaccctgactttgtggtggtagacggcgtgcccgtcatgctcccgtcctatgacgaagctgtgagtggcggcttgagtgccttaggccccgggtacatggcctctgtgggccagggctgccccttacccgtggacgaccagagccccccagcataccccggctcaggggacacggacacaggcccaggggagtcagaaacctgtgacagcgtctcaggctcttctgagctgctccaaagtctgtattcacctcccaggtgccaagagagcacccaccctgcttcggacaaccctgacataattgccagcacggcagaggaggtggcatccaccagcccaggcatcgacattgcagatgagattcctctaatggaagaagatccctaatatgggtcaagatccagatgactctcctgctccttcggggaaaggaccttgtatcttggagtgaggtcacagaaggatagagcctgggggcaaaatgtctaacttgtctacatggggaccacagttcacattatgcatctcaggctccacagtgaggctgacaaactgcaatggcagtgcttttaaatgagatttgaggattcaccaagacccatggggaaccggggcagcagggaagccctcgcgtggtcttggatgaggggtgttaaatgtgtatcgtgctgtggaacatgggacaattccacgcacatcccaccgaatcatcacgcatcccattgactggcaagtactccccgccccctctgaaagcatgtcacatcatgtaaatttgcttctaacatctgcttcaaactgtctctggactccaaatttggatgggtcagcctctgcagaaagtttgtgttgagatgctggaagaacagcagagcctcctgcaccctcagcaagggaccagctcccaaaggaaaggtccttgtgtgacatttggagaatcttccttcatccagacaactctactcgaagcaagacgaaagcaggatgtggcagttgcagtgagaaaggaaaggaaagatgggcagactctgctttctggaaatttcttcacaaagtagagctcatgaactctgtgctgtcttctggtaacatatcatcagtgtttgtattcatggtgtggcacatggatccatggcattgggtaaatctggtggtttttacacatggtcagaatgtgttcaaatacatctcatgatggagacagtaaccaaggtaatgttttgtttcagcattttaaaaagactccacttaacatttatctcagaatcatgagcctctctctagttgacaattgtcattgttcccccagccccaaattgaaccatacatttattttccaaaacagaaattgtttctgtaaacatatccgaccttcaaaagaagtgtgaggttggatttttcccccttttatttgtcctaagattccaggaggctggcctcccagcccagatagctcagccacctcacctgcctatcattcctgcattcctactttgagggtctcatcatgcccactgggtgttgttcctaagaaactgattgattaaaaaatttcccaaagtgtcctgaagtgtctcttcaaatacatgttgatctgtggagttgattcctttccttctcttggttttagacaaatgtaaacaaagctctgatccttaaaattgctatgctgatagagtggtgagggctggaagcttgatcaagtcctgtttcttcttgacacagactgattaaaaattaaaagaaaatgacagtttg

SEQ ID NO: 187754 - DNA, 1833 bp, Homo sapiens
  Payload ID: 16951
  Gene Symbol: SUSD4
  Gene Name: sushi domain containing 4
  ENST ID: ENST00000494793
  CDS Start-End: 158-1624
ccgaagcttccgtctcgctcgctcgcgcagcggcggcagcagaggtcgcgcacagatgcgggttagactggcggggggaggaggcggaggagggaaggaagctgcatgcatgagacccacagactcttgcaagctggatgccctctgtggatgaaagatgtatcatggaatgaacccgagcaatggagatggatttctagagcagcagcagcagcagcagcaacctcagtccccccagagactcttggccgtgatcctgtggtttcagctggcgctgtgcttcggccctgcacagctcacgggcgggttcgatgaccttcaagtgtgtgctgaccccggcattcccgagaatggcttcaggacccccagcggaggggttttctttgaaggctctgtagcccgatttcactgccaagacggattcaagctgaagggcgctacaaagagactgtgtttgaagcattttaatggaaccctaggctggatcccaagtgataattccatctgtgtgcaagaagattgccgtatccctcaaatcgaagatgctgagattcataacaagacatatagacatggagagaagctaatcatcacttgtcatgaaggattcaagatccggtaccccgacctacacaatatggtttcattatgtcgcgatgatggaacgtggaataatctgcccatctgtcaaggctgcctgagacctctagcctcttctaatggctatgtaaacatctctgagctccagacctccttcccggtggggactgtgatctcctatcgctgctttcccggatttaaacttgatgggtctgcgtatcttgagtgcttacaaaaccttatctggtcgtccagcccaccccggtgccttgctctggaagtctgtccactacctccaatggtgagtcacggagatttcgtctgccacccgcggccttgtgagcgctacaaccacggaactgtggtggagttttactgcgatcctggctacagcctcaccagcgactacaagtacatcacctgccagtatggagagtggtttccttcttatcaagtctactgcatcaaatcagagcaaacgtggcccagcacccatgagaccctcctgaccacgtggaagattgtggcgttcacggcaaccagtgtgctgctggtgctgctgctcgtcatcctggccaggatgttccagaccaagttcaaggcccactttccccccagggggcctccccggagttccagcagtgaccctgactttgtggtggtagacggcgtgcccgtcatgctcccgtcctatgacgaagctgtgagtggcggcttgagtgccttaggccccgggtacatggcctctgtgggccagggctgccccttacccgtggacgaccagagccccccagcataccccggctcaggggacacggacacaggcccaggggagtcagaaacctgtgacagcgtctcaggctcttctgagctgctccaaagtctgtattcacctcccaggtgccaagagagcacccaccctgcttcggacaaccctgacataattgccagcacggcagaggaggtggcatccaccagcccagggtctcatcatgcccactgggtgttgttcctaagaaactgattgattaaaaaatttcccaaagtgtcctgaagtgtctcttcaaatacatgttgatctgtggagttgattcctttccttctcttggttttagacaaatgtaaacaaagctctgatccttaaaattgctatgctgatagagtggtgagggctggaagcttgatcaagtcctgtttcttcttgacacagactgattaaaaattaaaagaaaa

SEQ ID NO: 187755 - DNA, 2736 bp, Homo sapiens
  Payload ID: 16951
  Gene Symbol: SUSD4
  Gene Name: sushi domain containing 4
  ENST ID: ENST00000484758
  CDS Start-End: 110-1375
cgcacagatgcgggttagactggcggggggaggaggcggaggagggaaggaagctgcatgcatgagacccacagactcttgcaagctggatgccctctgtggatgaaagatgtatcatggaatgaacccgagcaatggagatggatttctagagcagcagcagcagcagcagcaacctcagtccccccagagactcttggccgtgatcctgtggtttcagctggcgctgtgcttcggccctgcacagctcacgggcgattgccgtatccctcaaatcgaagatgctgagattcataacaagacatatagacatggagagaagctaatcatcacttgtcatgaaggattcaagatccggtaccccgacctacacaatatggtttcattatgtcgcgatgatggaacgtggaataatctgcccatctgtcaaggctgcctgagacctctagcctcttctaatggctatgtaaacatctctgagctccagacctccttcccggtggggactgtgatctcctatcgctgctttcccggatttaaacttgatgggtctgcgtatcttgagtgcttacaaaaccttatctggtcgtccagcccaccccggtgccttgctctggaagcccaagtctgtccactacctccaatggtgagtcacggagatttcgtctgccacccgcggccttgtgagcgctacaaccacggaactgtggtggagttttactgcgatcctggctacagcctcaccagcgactacaagtacatcacctgccagtatggagagtggtttccttcttatcaagtctactgcatcaaatcagagcaaacgtggcccagcacccatgagaccctcctgaccacgtggaagattgtggcgttcacggcaaccagtgtgctgctggtgctgctgctcgtcatcctggccaggatgttccagaccaagttcaaggcccactttccccccagggggcctccccggagttccagcagtgaccctgactttgtggtggtagacggcgtgcccgtcatgctcccgtcctatgacgaagctgtgagtggcggcttgagtgccttaggccccgggtacatggcctctgtgggccagggctgccccttacccgtggacgaccagagccccccagcataccccggctcaggggacacggacacaggcccaggggagtcagaaacctgtgacagcgtctcaggctcttctgagctgctccaaagtctgtattcacctcccaggtgccaagagagcacccaccctgcttcggacaaccctgacataattgccagcacggcagaggaggtggcatccaccagcccaggcatcgacattgcagatgagattcctctaatggaagaagatccctaatatgggtcaagatccagatgactctcctgctccttcggggaaaggaccttgtatcttggagtgaggtcacagaaggatagagcctgggggcaaaatgtctaacttgtctacatggggaccacagttcacattatgcatctcaggctccacagtgaggctgacaaactgcaatggcagtgcttttaaatgagatttgaggattcaccaagacccatggggaaccggggcagcagggaagccctcgcgtggtcttggatgaggggtgttaaatgtgtatcgtgctgtggaacatgggacaattccacgcacatcccaccgaatcatcacgcatcccattgactggcaagtactccccgccccctctgaaagcatgtcacatcatgtaaatttgcttctaacatctgcttcaaactgtctctggactccaaatttggatgggtcagcctctgcagaaagtttgtgttgagatgctggaagaacagcagagcctcctgcaccctcagcaagggaccagctcccaaaggaaaggtccttgtgtgacatttggagaatcttccttcatccagacaactctactcgaagcaagacgaaagcaggatgtggcagttgcagtgagaaaggaaaggaaagatgggcagactctgctttctggaaatttcttcacaaagtagagctcatgaactctgtgctgtcttctggtaacatatcatcagtgtttgtattcatggtgtggcacatggatccatggcattgggtaaatctggtggtttttacacatggtcagaatgtgttcaaatacatctcatgatggagacagtaaccaaggtaatgttttgtttcagcattttaaaaagactccacttaacatttatctcagaatcatgagcctctctctagttgacaattgtcattgttcccccagccccaaattgaaccatacatttattttccaaaacagaaattgtttctgtaaacatatccgaccttcaaaagaagtgtgaggttggatttttcccccttttatttgtcctaagattccaggaggctggcctcccagcccagatagctcagccacctcacctgcctatcattcctgcattcctactttgagggtctcatcatgcccactgggtgttgttcctaagaaactgattgattaaaaaatttcccaaagtgtcctgaagtgtctcttcaaatacatgttgatctgtggagttgattcctttccttctcttggttttagacaaatgtaaacaaagctctgatccttaaaattgctatgctgatagagtggtgagggctggaagcttgatcaagtcctgtttcttcttgacacagactgattaaaaattaaaagaaaa

SEQ ID NO: 187756 - DNA, 2566 bp, Homo sapiens
  Payload ID: 16951
  Gene Symbol: SUSD4
  Gene Name: sushi domain containing 4
  ENST ID: ENST00000608996
  CDS Start-End: 1-1391
tggccgtgatcctgtggtttcagctggcgctgtgcttcggccctgcacagctcacgggcgggttcgatgaccttcaagtgtgtgctgaccccggcattcccgagaatggcttcaggacccccagcggaggggttttctttgaaggctctgtagcccgatttcactgccaagacggattcaagctgaagggcgctacaaagagactgtgtttgaagcattttaatggaaccctaggctggatcccaagtgataattccatctgtgtgcaagaagattgccgtatccctcaaatcgaagatgctgagattcataacaagacatatagacatggagagaagctaatcatcacttgtcatgaaggattcaagatccggtaccccgacctacacaatatggtttcattatgtcgcgatgatggaacgtggaataatctgcccatctgtcaaggctgcctgagacctctagcctcttctaatggctatgtaaacatctctgagctccagacctccttcccggtggggactgtgatctcctatcgctgctttcccggatttaaacttgatgggtctgcgtatcttgagtgcttacaaaaccttatctggtcgtccagcccaccccggtgccttgctctggaagcccaagtctgtccactacctccaatggtgagtcacggagatttcgtctgccacccgcggccttgtgagcgctacaaccacggaactgtggtggagttttactgcgatcctggctacagcctcaccagcgactacaagtacatcacctgccagtatggagagtggtttccttcttatcaagtctactgcatcaaatcagagcaaacgtggcccagcacccatgagaccctcctgaccacgtggaagattgtggcgttcacggcaaccagtgtgctgctggtgctgctgctcgtcatcctggccaggatgttccagaccaagttcaaggcccactttccccccagggggcctccccggagttccagcagtgaccctgactttgtggtggtagacggcgtgcccgtcatgctcccgtcctatgacgaagctgtgagtggcggcttgagtgccttaggccccgggtacatggcctctgtgggccagggctgccccttacccgtggacgaccagagccccccagcataccccggctcaggggacacggacacaggcccaggggagtcagaaacctgtgacagcgtctcaggctcttctgagctgctccaaagtctgtattcacctcccaggtgccaagagagcacccaccctgcttcggacaaccctgacataattgccagcacggcagaggaggtggcatccaccagcccaggcatcgacattgcagatgagattcctctaatggaagaagatccctaatatgggtcaagatccagatgactctcctgctccttcggggaaaggaccttgtatcttggagtgaggtcacagaaggatagagcctgggggcaaaatgtctaacttgtctacatggggaccacagttcacattatgcatctcaggctccacagtgaggctgacaaactgcaatggcagtgcttttaaatgagatttgaggattcaccaagacccatggggaaccggggcagcagggaagccctcgcgtggtcttggatgaggggtgttaaatgtgtatcgtgctgtggaacatgggacaattccacgcacatcccaccgaatcatcacgcatcccattgactggcaagtactccccgccccctctgaaagcatgtcacatcatgtaaatttgcttctaacatctgcttcaaactgtctctggactccaaatttggatgggtcagcctctgcagaaagtttgtgttgagatgctggaagaacagcagagcctcctgcaccctcagcaagggaccagctcccaaaggaaaggtccttgtgtgacatttggagaatcttccttcatccagacaactctactcgaagcaagacgaaagcaggatgtggcagttgcagtgagaaaggaaaggaaagatgggcagactctgctttctggaaatttcttcacaaagtagagctcatgaactctgtgctgtcttctggtaacatatcatcagtgtttgtattcatggtgtggcacatggatccatggcattgggtaaatctggtggtttttacacatggtcagaatgtgttcaaatacatctcatgatggagacagtaaccaaggtaatgttttgtttcagcattttaaaaagactccacttaacatttatctcagaatcatgagcctctctctagttgacaattgtcattgttcccccagccccaaattgaaccatacatttattttccaaaacagaaattgtttctgtaaacatatccgaccttcaaaagaagtgtgaggttggatttttcccccttttatttgtcctaagattccaggaggctggcctcccagcccagatagctcagccacctcacctgcctatcattcctgcattcctactttgagggtctcatcatgcccactgggtgttgttcctaagaaactgattgattaaaaaatttcccaaagt

SEQ ID NO: 187757 - DNA, 5008 bp, Homo sapiens
  Payload ID: 16952
  Gene Symbol: SUSD5
  Gene Name: sushi domain containing 5
  Uniprot ID: O60279
  ENST ID: ENST00000309558
  CDS Start-End: 419-2308
gccaagggtcccccagacgggcgggggctccttgcggccggctagctactctccccgcctccctgcgccctcgccctccgccccgctgtacccgcagagcgcgcggcccagcgcagccccttttggcaccgaggtttccaggtgcccagcgcgaaggcggagccgggttacagccgcctcctcggcgccacagagaagacccccgggagttcggcggcccaggcgctccggctctgcgtcccgagcctcccccggctctccgcgctcctccctctcggcgcgcccggcgcgaagcctgcgattcgtgagccgagcgcagagcgcagagccgagtggcgcacgctgggcagtggcctgggcaaccccaaacgcagccagagccctcacccgagtccgctggcccgcgcactcccggaccatgactgccgagggacccagcccgcctgcccgttggcacagacgcctccccgggctctgggcggcggcgctgctcctgctcggtctgccgcgcctttcggtgcgggcggatggaaagttctttgtgctggagtctcagaatggctctcagggcctacaactggaggctgctcggctttcctgcaagagcaggggcgctcacctggcatctgcagacgagctgcggagagtggtacaggattgctcctttgcggtgtgcaccactggctggctagcagatggtactcttggaacaactgtgtgtagcaaaggaagtggagaacagcaaatcatgagagctgtcgatgtgagaattgagagcaacccagttcctggtggcacatacagtgccctttgtattaaggatgaagagaagccgtgtggagacccgccttcgttcccacacaccatcctgcagggccgcaccggcttggaaatgggggatgaactgctgtacgtgtgtgccccaggccacatcatgggccaccgggagaccgccttcaccttgctatgtaacagctgtggggagtggtacggcctggtgcaggcctgtgggaaagatgaggctgaggcacacattgactatgaagataacttccctgatgacagatctgtgtcattcagagagctcatggaggattcccggacagaggcagatgaggacaggggtcagggagactcctctgaggaggctccaaaacaggaccgtctggtctccatttctgtggggagagaaaacatagcccgggataaagtctttgtgccaaccacaggcttgcctggtgctgggagcagtgtccccgcagattcaccaggatcacggctgctccagaagcacttgttctggtttcctgctgaggctttccacaagcctgggttggaaaaggaggtggatgatgacaccaaaaagcagttttctgctggagacaaccacagtggtgtaaaattggtcccaggtgaacctgaaaccaaggtgatctacggcaacactgatggtccctcggggccatttgtgggcaagaatgacagcaaggcaggagatccagtggtgagcagcagtgatgagtcctggttagatggctaccctgtgacagagggggcttggaggaagacagaggcagaagaggaagaagatggggacagaggggatgggtcagtagggctggatgaaaacgtcctagttactcctgatcagcccattcttgtggaagttaagaagcccaagagtagcaccctcacaccaagcgagggcatgacccatagttcagttcttccatctcaaatgctagatgtggaagctttggcgctcagacccgtgaatgcttccgagactgagggcattggggatggtgacttgacgaagtaccagtcaactctaccctggagattcatcacagaggaatctcccatggccaccctgtcctatgagctcaccagctccaccctggagatattaacagtgaacactgtcaagcagacacctaaccacatcccctcaacgatcatggcaaccacccagcctccagtagaaaccactgttcctgagatccaggatagcttcccatacctgctgtctgaagacttctttggacaggaaggccccgggccaggtgcaagtgaggagcttcatcccaccttggagtcgtgtgtgggggacggatgtcctggcctcagcagaggccctgtgatcgccaccattgtcaccgtcctgtgcctactgctgctcctggcaggtgtggggatggtgtggggctaccgcaagtgccagcacaagagctctgtgtacaagctgaatgttggccagcggcaggctcggcactaccaccagcagatcgagatggagaaggtctaggcacctttggagtgggttctcccaaagccacttgggaggaaaataactgtgacacatcacacgataattcactagagcatgacgcaggtggactgaggctcatcattttttcctcagccctttgttttataggctgagaagtgtctctggagcacctgggagggcagggaggctttggtgacatcatcactcatgtcaatgtctcctccaccatctgccctggaattgactacactaatcccagacctgtgcttgggccctgtttccagtgtgaggtcaaaaatcgcctcttccttcatcacagtattatctttttttttttgagacagagtctcatgctgttgcccaggctggagtgcagtgtcccgatctgagctcactgcaacctctgcctcccaagttcaagcaattctcctgcctcagcctcccaagtaggtgggattacaggcatgcaccaccatgcccagctaatttttttatatttttagtagagatggagtttcaccatgttggccaggctggtcaagaactcctgacctcaagtgatctgccctccttagcctcccaaagtgctaggattccaggtgtgagccacatcacagtattacctttttgaagaaagaaaatcaccagcttcatgccctgaaattttataaatagtcatgataaaccaagtgtatgagagcagtattatctaggacatggatattgaattattgggagaggaatatggaagaataatgggttgtttccttttaatgttgtgatgttgctgagggcagatgaaccaagagccaggacacagtctagaagctttgaggtttcttttttcattgtttcttgaaattagaatttaagactgacattttgttgggggagttgaggagtgaagaaacacacatccccctctgttccctccattctgtgggacagtctgtcatttattttattttattttcaatatttcatggttaaggatttgccattattttttaaaaacaaagttagctttgtaccagtaagtaccatttcctctcagaagcagtggcctagttgtccttgaccagtctgtgcctaggaatgtcttggaatttttgccaggactaacaaaactcagtccttggtttcctctctcaggattaaccatttctctgaactccagtaagagagaatgacacgggagaaaaaaaaaagaaatgttttcagagggccgaacaccaggttatcaagtatgggcacatacttgatggagaagcagaagaatctgtgaaagaatatgaaatgatctgtgctgatctgttctctagtgtggaaactgggagctctgtggaaacagaatccatcctgtctgttgggtaacccatttcgtagcatctaaatcatcttagggtggctcagcgaggatggtttatggcagtggttctcaaagtgtggtcctcagaccagtagcatcagcgtcacctgggaatttgttggagatgcaaattctctagtcccaccctggactcaggaaacaggaaccctgggagtagggcccagttctgtttttaacaagccctccaggtgattttgatatgcactcaagtttgagagcctgttggtttataataatctcaaatgtgaacttcgaggccagctgaagccctaaaggcacagatgagtatgtggtgtgtgttgtgtggaagtcaggcatggctgtgtgcagctgaggtggcatttgaagctgcctaaatgccacctgcaatagtctcctgtatgttggcacagaaatgaaacatgttatatttttctaatatgaatcaccttcttagaaatagttatcagtggtaaaaagtgatgaatgcaacacatttattttgagacaccatagcagtctaagtgtttttgtgtggtagagggaaatcctgatcttttttatgattgaaaaattgttggtggtgttttacctaaggaaaaaaaacattcgcaacatgttttctaccctgccacctcttttcagcaagctttggaaaagtaataggcgaagtagctgtaaagagaggcagcataatcaaagatcttattccccatagttgggtaaaataaagcctgaaggtaccaactagaatacctgtgcatcagacgaagtcaagaacaataggaataaaatgctttctgcatgtagccaaagcaaaacataatagaataaaagccagagactgtatatatttataaattagatcctaatctactgcaagataacttttctatttttaactatataaaataacctctgtctcagcattgggactgtgttagcaactattattgtggaataacccagaacattggatttataccaacaaataggcaatattaatacagtgtattaataaatttattacaaattattaatacagtgtattaataaatttattacaaattattaatacaggtaaatgttttatttgtagacatggactgtgaaataaacccaacacatcagtttttaagttcttattggtgtggtatcctctaaattaatgttatagaatctaaaaattcatgttgaaagggaatgattaaaacaatgtaaatctaaattgtatgtcatgcatgttttgagaatggtgaatgtttaatgctcatgaaaattgggggagggggttctattaacacaaagcttctgagatatttaaaataaataattattgccccaac

SEQ ID NO: 187758 - DNA, 729 bp, Homo sapiens
  Payload ID: 16952
  Gene Symbol: SUSD5
  Gene Name: sushi domain containing 5
  ENST ID: ENST00000412539
  CDS Start-End: 1-729
ctgccgagggacccagcccgcctgcccgttggcacagacgcctccccgggctctgggcggcggcgctgctcctgctcggtctgccgcgcctttcggtgcgggcggatggaaagttctttgtgctggagtctcagaatggctctcagggcctacaactggaggctgctcggctttcctgcaagagcaggggcgctcacctggcatctgcagacgagctgcggagagtggtacaggattgctcctttgcggtgtgcaccactggctggctagcagatggtactcttggaacaactgtgtgtagcaaaggaagtggagaacagcaaatcatgagagctgtcgatgtgagaattgagagcaacccagttcctggtggcacatacagtgccctttgtattaaggatgaagatgaggctgaggcacacattgactatgaagataacttccctgatgacagatctgtgtcattcagagagctcatggaggattcccggacagaggcagatgaggacaggggtcagggagactcctctgaggaggctccaaaacaggaccgtctggtctccatttctgtggggagagaaaacatagcccgggataaagtctttgtgccaaccacaggcttgcctggtgctgggagcagtgtccccgcagattcaccaggatcacggctgctccagaagcacttgttctggtttcctgctgaggctttccacaagcctgggttggaaa

SEQ ID NO: 187759 - DNA, 5388 bp, Homo sapiens
  Payload ID: 16953
  Gene Symbol: SUSD6
  Gene Name: sushi domain containing 6
  Uniprot ID: Q92537
  ENST ID: ENST00000342745
  CDS Start-End: 314-1225
agtgacgcgggcgctgcagccgtcgctaccgccgcgttctattctccgaagccggcgaccgccccacctcctccctccctcccgcccgcttcctctgcccacagcgccggccagagcgagctagacaagggcacgcggggcctcgcctagacccgagaagactgcgggcgcgcgcaagcggcggcgtggaagctgtgagcgcccccatcccggaggtctccgccggctcccgggtgaatcagctcccggccgactttaggattcttctggattttaaattttttctttttaaaaaaacttggacggataaaagatgtgccatggcaggatagcaccaaagagcacctcagtgtttgccgtggcctccgtgggacatggagtgttccttccgctagtgatcctttgcaccctgcttggagacggacttgcttccgtgtgccccctaccaccggagccagagaatggtggctacatctgccacccccggccctgcagagaccccctgacagcaggcagtgtcatcgaatacctgtgtgctgaaggctacatgttgaagggcgattacaaatacctgacgtgtaagaatggcgagtggaaaccagccatggagattagctgccgtctcaacgaggataaagacacccacacatcacttggggtccccacgctgtctatagtggcttctactgccagctccgtggcgctcattctcctcctcgtggtgctgtttgtgctgctgcagccaaagctgaagtctttccatcatagcaggcgtgaccagggggtatctggggaccaggtctccatcatggtggatggagtccaggttgcactaccatcatacgaggaggctgtatatggcagttctggtcactgtgtgccacctgctgaccccagagtacagattgtgctgtcagaagggtctgggcccagtgggaggagcgtgccaagggagcaacagctgccggaccaaggggcctgctcctctgcaggtggagaagatgaggccccaggccagtctggactatgtgaagcctggggctctcgggcctcagagactgtgatggtgcatcaggcaaccacctcttcctgggtggccggctcagggaaccgccaactggcacacaaagaaactgcagattcagagaacagtgacatacaaagccttttatccctcacgtcagaggagtacacagatgatattccactgttgaaagaagcatgagggcagcggccagcctttcctctctgcgaggttctctcagcccttcctccctctccctgtgggattgagcaccctgtactctccagccaccttacctggatacctgagctgccacctgtgtatctgtgtatctctgagggccctataggcccaccttgctggaaactcaaggaagattctcgccatctgcctgttggacagctggaggagctggctctttgcctggccccgccttcccatctgtcagagacatatttgaatgtgctggatcaaaccctcccttttcctaagcctctgggtcccctccagccagctctttggcggcagcccccaccagctcctgtgggcctgagtgctgctgtgtttacttgtgcctttcccccaccctgtccagtttccctgtcatgcagacttgttgctgtccacaagccttagtggctgcactgctgccccctgccacacagggggccgggcctgggtctgtcctgtttcctttgagggttgcccctactgccctttgcaggaacagatccaggtgtgagagctcttgagtcaagagtggcagaagtggctctaattggggtgagagtgtagtccctgggcttgccctgggttgaccctggtggcatatttccttggctgaggatggaagatttggagaatcatgtccatgctggcccaggacccagccatctggcccaaaggcacaagctcctggccctgttgagttgagagtttccaagaagcatccagaagatcccaagggagagaaggaaaatggctgataatgattgtcttcctaatatgcaagttctcacttcctacttccagcatcggccttcctggccttgtcttttttttgtttccctggagtataatgggaagttgcatgctgcctcctgggttttatcccagatagctctggctttcttgctgcccacaggggcctggggcaggaaggagacttgctgagatgccatggagtgcccatctggtcactggcagtctgggcaggttgcccctttctgggtttgtggtgacggaggggaggccgagaggcacagaccaagtccccgggtggctgcaggcagctccagcccggtcctgaggatcctcctcaccatggtcacgtgccttagtaactgtgcccaggaagtggcctgctgcttgctgtgctgctgcttttcctacttctgcccttccctgccacccctcgcatgtcacagctgacaagcaattccttgtcttccctggccccctgggggaagggctgagaaacagtccgtgtgcaccccaaccttaatggcctgaggtgggcagaggggtgtggagcagcctggagtacagggccctgggggaggagcccactgatgaggggcgctctcccatagccatgtgttgaatgctaactaggctggggtggacgaactctgccaactgctgtcatcttagaagatagatgcagcagtaaggaatgtttgttttgcttttttctgaaattttctgaagcactgtggctgggaaacttcgaagcggaccctgtgctgcatgtctgctcctcccctgagcctgtctgcttgggggtggtaaaaataaaaatcccagtttattttcagtaccttacctaacagggttggctccaggcgtgggtggcctagaagatgaggggagtggtcttctcccagccttttaccctcttgcctcctgcctccgcgcttacacacgcactttaccacccggtcattccctggcctcttgctgccacttgtagtcttccttccttcctctcagggtaagggcagtgcctgctgtgcctgttggccactcccacacttcccctcccccaggagccctcatctgctgtgctgagtccaggaaagcatagttaggtagggagctggttggagaaggtgctagaactagaaggcagatgagactagcatgggcccacctggagggctgtccctaatggccccagtcgccttacctcacccacagcagtgcccttgtcttcctccaaaacagaaagcagtgacaaaagggggaggggtggtaatctgaagtctcactgctgagccttcagcttttatttttcactgtttcaaaacccgcattctattctagaatggtttttaaaatggaagatcttacctttttctatcttgttactctggggttttgtccccctaagagattgcactttttgtttggggtttattcagctgcatagatgaccagcttgatccctggtgaaatgaaaagccttccttctcctgaagcctctttccgccctgccctccactaacaacactgaggagcacaagcccaggcttgcccacctggtaggaaaggaagaaattagaacaatgggagccttggctcccctctcgtctcctcccctccttcttgtcactggctttgatgaggcccacttcccagaggctcctgggcctgtgagtgcaggagctcattctcccctcactgctgaagtctgtgacagcttcttcctccagttatgtctttcttccaaagcaatttcttaaccatcagccatgtgctgctatttctagggcttctgggctttgtcccttactgagagattagggactccacagctgccttgaggtagggcctggctgagagacaagggtagcagcaggtggcaggctgttaaaagacaggctgcctgaggagcctggagcaggtggaaacaggtggaagaaaccggccacagccctgctttaccgggctcacctctagggcattccagcaagaggctgatgcaggagaatggccagcaccaaaggacatttaaaagagtttttgggtttttttgtttgtttgttgttggtgtttgtttttttttttttttttttggcacacttgagctgactcagtgcaggtttaatatcctggtgacttgcagtcacattctaatgactttcaagggccagaatatggtgaaaatcacttaaaatatccgtcccttccatgccttagtttagcaggtaggctctatcttttgccatttctgtattttatgtgctgtgttcccgtttcactgggtatgaactgtgaaatcgactgaatcctggccactttatgagtttgtttggttttataaggcatttcaatgtacattctataaatacaagcactccatttgcaaacagatcttaagctaatattttctttcccattcatcttgccctccccctcctcccgccagctttaaagttcagtggagaagccagatggcaattcagacaaaggtatactcttcctgcttcatgggtggtggcacgggaatagatagcccttagccctttccctcccagtcccagctgagccctcagaccacttgcttcccacataacaatgtcgcctccatttccgaggaacatccttgcgtagagaatgaaatatgctgcaatcatttctgcatccttactcctcacccccaaagaaaaaaaaaaggcctagcagggaagcagcatgcaggcttcacagcttaatgccaaggacagcgagtgaggctgggagcttctcttgggcctgctgggtctgtcagctctcggaatagggacagtccttactggtgccccaaggtgggacttggagaatattttgcttggcatatgtttggtctgaatggtgtagttgctggttccctagagaggaaaaggtggcaggcccagctttgctgggaaatggctcttaatttccagttgaaaccctagtagaattgtgaatgaaaacctcaaggttgagcccctctgccaagcagcagagctagtagaaggggatgcaggggcaaagcactcagttgccaagcaaggaggagagatgtacgtgggctgtgtggcagtccccacaccctgccctggcttcttcaggttatcgcaccactatggaatcctttgcagaatggtactcatataatggtttaaaacaacacattcataattgactctgtgcaggatgtcactcaatcagtttgggtttgctttattttattttatatatatattttttggtatcctgtacattgcagtgggtgtgaagatagtattttaatatttgtacaaagtttaatttaattttaattgttctatgtatataactgcatttctaaataattaaaaaaaagttcttatgaaggc

SEQ ID NO: 187760 - DNA, 8174 bp, Homo sapiens
  Payload ID: 16954
  Gene Symbol: SNED1
  Gene Name: sushi, nidogen and EGF-like domains 1
  Uniprot ID: Q8TER0
  ENST ID: ENST00000310397
  CDS Start-End: 1-4242
atgcggcacggcgtcgcctgggcgctgctggtggccgcggccctggggcttggggcgcgcggggtgcgcggcgcggtggcccttgccgacttctacccgttcggcgccgagcgcggcgacgccgtcacccccaagcaggacgacggcggctcggggctgcggccgctctcggtgcccttcccgttcttcggtgccgagcactccggactctacgtgaacaacaacgggatcatctccttcctgaaggaggtttctcagttcaccccagtggccttccccattgccaaggaccgctgcgtggtggcagccttctgggcagatgtggacaaccggcgtgcaggcgacgtgtactaccgggaggccaccgacccagccatgctgcgccgagccacggaggacgtcaggcactacttccccgagctcctggacttcaatgccacctgggtttttgttgccacctggtaccgagtgaccttctttggaggcagttcctcatcccctgtcaacacattccagactgtgctcatcacagacggcaagctctccttcaccatcttcaactatgagtccatcgtgtggaccacaggcacacacgccagcagcgggggcaacgccactggcctcgggggcatcgcagcccaggctggcttcaacgcaggcgatgggcagcgttacttcagtatccccggctcgcgcacagcagacatggccgaggtggagaccaccaccaacgtgggtgtgcccgggcgctgggcgttcagaatcgatgatgcccaggtgcgcgtggggggctgcggccatacaacgtccgtgtgcctggccctgcgcccctgcctcaacggcggcaagtgcatcgacgactgcgtcacgggcaacccctcctacacctgctcctgcctctcgggcttcacggggcggaggtgccacctggacgtgaacgaatgtgcctcccagccctgtcagaatggtgggacctgtactcacggcatcaacagtttccgctgccagtgcccggctggctttgggggacccacctgtgagacagcccaatccccctgtgacaccaaagagtgtcaacatggtggccagtgccaggtggagaatggctctgcggtgtgtgtgtgccaggccggatacaccggagcagcctgcgagatggatgtggacgactgcagccctgacccctgcctgaatggaggctcttgtgttgacctagtggggaattacacctgcttgtgtgccgagcccttcaagggacttcgctgtgagacaggagaccatccagtgccagacgcctgcctctcggccccttgccacaatgggggcacctgtgtggatgcggaccagggctacgtgtgcgagtgccccgaaggcttcatgggcctggactgcagggagagagtccccgatgactgtgagtgccgcaacggaggcagatgcctgggcgccaacaccaccctctgccagtgccccctgggattctttgggcttctctgtgaatttgaaatcacagccatgccctgcaacatgaacacacagtgcccagatgggggctactgcatggagcacggcgggagctacctctgcgtctgccacaccgaccacaatgccagccactccctgccatcaccctgcgactcggacccctgcttcaacggaggctcctgcgatgcccatgacgactcctacacctgcgagtgcccgcgcgggttccacggcaagcactgcgagaaagcccggccacacctgtgcagctcagggccctgccggaacgggggcacgtgcaaggaggcgggcggcgagtaccactgcagctgcccctaccgcttcactgggaggcactgtgagatcgggaagccagactcgtgtgcctctggcccctgtcacaacggcggcacctgcttccactacattggcaaatacaagtgtgactgtcccccaggcttctccgggcggcactgcgagatagccccctccccctgcttccggagcccgtgtgtgaatgggggcacctgcgaggaccgggacacggatttcttctgccactgccaagcagggtacatgggacgccggtgccaggcagaggtggactgcggccccccggaggaggtgaagcacgccacactgcgcttcaacggcacgcggctgggcgcggtggccctgtatgcatgtgaccgtggctacagcctgagcgcccccagccgcatccgggtctgccagccacacggtgtctggagtgagcctccccagtgccttgaaatcgatgagtgccggtctcagccgtgcctgcatgggggctcttgtcaggaccgcgttgctgggtacctgtgcctctgcagcacaggctatgagggcgcccactgtgagctggagagggatgagtgccgagctcacccgtgcagaaatggagggtcctgcaggaacctcccaggggcctatgtctgccggtgccctgcaggcttcgttggagtccactgtgagacagaggtggacgcctgcgactccagcccctgccagcatggaggccggtgtgagagcggcggcggggcctacctgtgcgtctgcccagagagcttcttcggctaccactgcgagacagtgagtgacccctgcttctccagcccctgtgggggccgtggctattgcctggccagcaacggctcccacagctgcacctgcaaagtgggctacacgggcgaggactgcgccaaagagctcttcccaccgacggccctcaagatggagagagtggaggagagtggggtctctatctcctggaacccgcccaatggtccagccgccaggcagatgcttgatggctacgcggtcacctacgtctcctccgacggctcctaccgccgcacagactttgtggacaggacccgctcctcgcaccagctccaggccctggcggccggcagggcctacaacatctccgtcttctcagtgaagcgaaacagtaacaacaagaatgacatcagcaggcctgccgtgctgctggcccgcacgcgaccccgccctgtggaaggcttcgaggtcaccaatgtgacggctagcaccatctcagtgcagtgggccctgcacaggatccgccatgccaccgtcagtggggtccgtgtgtccatccgccaccctgaggccctcagggaccaggccaccgatgtggacaggagtgtggacaggttcacctttagggccctgctgcctgggaagaggtacaccatccagctgaccaccctcagtgggctcaggggagaggagcaccccacagagagcctggccaccgcgccgacgcacgtgtggacccggcccctgcctccagcaaacctgaccgccgcccgagtcactgccacctctgcccacgtggtctgggatgccccgactccaggcagcttgctggaggcttatgtcatcaatgtgaccaccagccagagcaccaagagccgctatgtccccaacgggaagctggcgtcctacacggtgcgcgacctgctgccgggacggcggtaccagctctctgtgatagcagtgcagagcacggagctcgggccgcagcacagcgagcccgcccacctctacatcatcacctcccccagggatggcgctgacagacgctggcaccagggaggacaccaccctcgggtgctcaagaacagaccgcccccggcgcgcctgccggagctgcgcctgctcaatgaccacagcgcccccgagacccccacccagccccccaggttctcggagcttgtggacggcagaggaagagtgagcgccaggttcggtggctcacccagcaaagcagccaccgtgagatcacaacccacagcctcggcgcagctcgagaacatggaggaagcccccaagcgggtcagcctggccctccagctccctgaacacggcagcaaggacatcggaaacgtccctggcaactgttcagaaaacccctgtcagaacggaggcacttgtgtgccgggcgcagacgcccacagctgtgactgcgggccagggttcaaaggcagacgctgcgagctcgcctgtataaaggtgtcccgcccctgcacaaggctgttctccgagacaaaggcctttccagtctgggagggaggcgtctgtcaccacgtgtataaaagagtctaccgagttcaccaagacatctgcttcaaagagagctgtgaaagcacaagcctcaagaagaccccaaacaggaaacaaagtaagagtcagacactggagaaatcttaaggatttaagacgttcttgttacactccaccaacctcacgagtttctaacacccaggaagatgaggtctaaaaactggatgaaaaaggacaccctgagaaaaggtcctagctggagtcagtcccctctgtgacctctctcctcaggcctctagaggacagatggccaggcctgtgcacacaccagcccaccctgagagacccctctgggaccaaccacctgtgagtcctgcgatgcgtttaagcagcctgtgccctcacccaagctgcagttcctgaaggtgtagtctgtgtctctgcggatgagatgacagctcgccattccccggaatcagtgaggctgtcagtcagccacgcttctgcagtatgcagaaacctgttcttagactccaaagccagagaaagaattctcccttcgaggcccaacaaattgagaaggaactgtgatggaccacttccaaaacagagacgggggcaggggctgaagggcagagaccaggtgatgtcagaaggaaagccgggttgcagacacagccgcccctgctctggtcctccagcgtgtttatgacgctcgtgcaggtcgacgagccatcctatggactagttaacactaaggtggagttcagacttttttagacaacggcgcgactggcagcctttctctatcaagggtcagacggtaaacgttttcagctttgcagaccagaggtccctgtggctacagtagcgcagacacagccacaggcatgtcattgaatggctgcggctatgttccaataaaaacttatttacaataacaggtggtggccaaattggcccatgggccttatttggtgaaccctgttctatgagatcacctaggcttcagccttaaacagtggaagccatcccctgaatgacaagtcacaagggtatcaaagaaagacccctgaattttcatggaaaaagctattcagacccctgcttggaaagctaaggcacactgccacgaagcagcaaggacgccttacaagtctcagtgcaacagagatggacacctgggctgggctggacaatgtttaaggttccttttagtccatgactcaagtgatactgttttaggctatcaggtagtaaacacgatcttagacatccccatctttgtaagcagaacagtacggcacttcaccacatctgcttcccaccatgcttctaagcagctgtcttccccctgctaatgttacaaccaaagcagccaccccacctcctctcgtgttgagcctcacgaccgctgacccagctggaaagccagcgccctgccgcgtcaccctgactctgctcagagccagcattccagccacaaagagggcctccttcctttcctctttcataaaaatgttttttgaagagttagagtatattttaggctttttatctttattaaaatttcatgtgcatgtgtctgtgtattctgcaatttgtcattttcagaaagaaggaacaggcaattcgcgaagtttcacctgtactcccgagctgttccccaggctccagacccacttgagagcagaaggtggagctcaatgaagggtctcgagctcagcgaagggtcactgggtgaactgagagaaaccacgttcacaaacgcgtactgcggacttcctgccgccctgggacctgtcactgtttgtccatgtaagctacagcattactagcagatgctaagatcgagtgatatcactggaaaagtaggtgaatcctactaggaaactttctactccctactaggacctcaagcccctcagccacacagcaaatgctaatatgctccagtgttagcttagaagccttgtgtcaacaagaactggctcctgagtcccaagcttggtgccacacagcaaatgctaatatgctccagtgttagcttagaagccttgtgtcaacaagaactggctcctgagtcccaagcttggtgccacacagcaaatgctaatatgctccagtgttagcttagaagccttgtgtcaacaagaactggctcctgagtcccaagtgctgtcacaggacttgcccattgggatgttttccacattaaatatcaagtaaaaagacttcctggtgctcaggaattacagttcgttcttgaaacattccaaagaggccaccacagcttttcccatgtggcttcttttaaaaactcaaatggcttccttgaaaatactcaaagtccacccaaggaaattagtaataatagaatcagaaaactgtcaggagcataaagatttctgtatcaaaatgaaagaagcaatcctgagttgctgaattacccatctgctaatgaaaccgggatggactgatcatctaaccaagtgcagactgaggattctacttagtcctccgactgggtacaacaacagcctaggttctagggagggtggcagtgaccgggatgccacaatggaagagaaaatgaaaacactggcacagtgaaatgtctcatttccaaacagttttgcctatggccaagcaaggcaataaagacaaactctcccttttccccattgcgtgtgggctgccaggtacaagtaagggaatctttgctgtgcccactgtcctccagtagagaacccaacaggcaagggccccactcaggtatcagctcacctcctgcacctccccttagcaggaactccttccactggcaaaggactgccactgccatctgactcaactgtggcgatgtggacggagtcaccgagctgcttttcttttgcaaaacaaaagtctttttctttgcagtcacgctgtaagacgaggctgctggagaaaacaaaagcacctagatttcagtgctgaatccccacaattgcatgcagctcacacctaccaggggtattccagtgcataggggaaaggaacccggctgaaaaaccagctccttatttttcttttaaataaaataatacgatcctaagtccatttaccatctgaagttgtcacgagtgaacagtcacattactgttgtggaccaggccttagatgagtttctcaggctcagcactgacattctgggccggatcatcctctcttgtgggaccatcctgtgcactgcaggatgtttcacagcacccctggcctctacccactagaatcctacaatctaccagatcctaggatctagttgatcctagaatgctaccaaggagacttgaattttggtcccatcatcaaaaatgccttctgcatcaatcctatgccagtttcccctaaaagagggctaactggaatgttctaggatgtaccaatcctccaggaccctcttagagctcatgccatcagagacaggcctctatctcagggatcaccccggctgacatcaaattcctcttctcttttcccaacatttcaaattgttcttcggactcattgagttccctaaggtgacacgcccccccccccccccacacccaccttggggggtcacggattgctccctgtggccctggcttcagcccacctgctccatgaccctatgctcttctcctctggttctcgaagctgtctgtaaccagggcaggggagataactgtatgggaccattccctggcctccacctgccccagcactctccaggccagcacagtctggcactacagactacagggccggagacaccaggcttggaagtgaccactggccaagagctgacataaaagccaacttccccaaacaggaagggcctgttcttcacaaagataaagaaaactgccagcattttgctggccttaagaagccatgcaaaattaaccagtacatcatgaattaacttcttttactctgctgtgcactgaataccattatgaagcaatatacttttggattaaaaataagcatttttgtggaaaatctgctacatgttttcataaaataaagtgctatgatgtactaaaacctca

SEQ ID NO: 187761 - DNA, 1930 bp, Homo sapiens
  Payload ID: 16954
  Gene Symbol: SNED1
  Gene Name: sushi, nidogen and EGF-like domains 1
  ENST ID: ENST00000342631
  CDS Start-End: 134-1930
gtggggctttgccagcaggcagtggaggtggcacgcctcccgaggaggggtgggtttggggctgatggaagaaaaagcacatgtcctgagtagttgctcccagctgggaaaggggtaactgaagccccaggaaatgcacggaatcctgggggcatgtgggcgcctcagacttgagccagcaacacccttgacaccccttctctgtgcagagagggatgagtgccgagctcacccgtgcagaaatggagggtcctgcaggaacctcccaggggcctatgtctgccggtgccctgcaggcttcgttggagtccactgtgagacagaggtggacgcctgcgactccagcccctgccagcatggaggccggtgtgagagcggcggcggggcctacctgtgcgtctgcccagagagcttcttcggctaccactgcgagacagtgagtgacccctgcttctccagcccctgtgggggccgtggctattgcctggccagcaacggctcccacagctgcacctgcaaagtgggctacacgggcgaggactgcgccaaagagctcttcccaccgacggccctcaagatggagagagtggaggagagtggggtctctatctcctggaacccgcccaatggtccagccgccaggcagatgcttgatggctacgcggtcacctacgtctcctccgacggctcctaccgccgcacagactttgtggacaggacccgctcctcgcaccagctccaggccctggcggccggcagggcctacaacatctccgtcttctcagtgaagcgaaacagtaacaacaagaatgacatcagcaggcctgccgtgctgctggcccgcacgcgaccccgccctgtggaaggcttcgaggtcaccaatgtgacggctagcaccatctcagtgcagtgggccctgcacaggatccgccatgccaccgtcagtggggtccgtgtgtccatccgccaccctgaggccctcagggaccaggccaccgatgtggacaggagtgtggacaggttcacctttagggccctgctgcctgggaagaggtacaccatccagctgaccaccctcagtgggctcaggggagaggagcaccccacagagagcctggccaccgcgccgacgcacgtgtggacccggcccctgcctccagcaaacctgaccgccgcccgagtcactgccacctctgcccacgtggtctgggatgccccgactccaggcagcttgctggaggcttatgtcatcaatgtgaccaccagccagagcaccaagagccgctatgtccccaacgggaagctggcgtcctacacggtgcgcgacctgctgccgggacggcggtaccagctctctgtgatagcagtgcagagcacggagctcgggccgcagcacagcgagcccgcccacctctacatcatcacctcccccagggatggcgctgacagacgctggcaccagggaggacaccaccctcgggtgctcaagaacagaccgcccccggcgcgcctgccggagctgcgcctgctcaatgaccacagcgcccccgagacccccacccagccccccaggttctcggagcttgtggacggcagaggaagagtgagcgccaggttcggtggctcacccagcaaagcagccaccgtgagatcacacgtccctggcaactgttcagaaaacccctgtcagaacggaggcacttgtgtgccgggcgcagacgcccacagctgtgactgcgggccagggttcaaaggcagacgctgcgagctcgcctgtataaaggtgtcccgcccctgcacaaggctgttctccgagacaaaggcctttccagtctgggagggaggcgtctgtcaccacgtgtataaaagagtctaccgagttcaccaagacatctgcttcaaagagagctgtgaaagcacaagcctcaag

SEQ ID NO: 187762 - DNA, 900 bp, Homo sapiens
  Payload ID: 16954
  Gene Symbol: SNED1
  Gene Name: sushi, nidogen and EGF-like domains 1
  ENST ID: ENST00000401644
  CDS Start-End: 1-900
cagcctgccccatgtttcagacgtgaacgaatgtgcctcccagccctgtcagaatggtgggacctgtactcacggcatcaacagtttccgctgccagtgcccggctggctttgggggacccacctgtgagacagcccaatccccctgtgacaccaaagagtgtcaacatggtggccagtgccaggtggagaatggctctgcggtgtgtgtgtgccaggccggatacaccggagcagcctgcgagatggatgtggacgactgcagccctgacccctgcctgaatggaggctcttgtgttgacctagtggggaattacacctgcttgtgtgccgagcccttcaagggacttcgctgtgagacaggagaccatccagtgccagacgcctgcctctcggccccttgccacaatgggggcacctgtgtggatgcggaccagggctacgtgtgcgagtgccccgaaggcttcatgggcctggactgcagggagagagtccccgatgactgtgagtgccgcaacggaggcagatgcctgggcgccaacaccaccctctgccagtgccccctgggattctttgggcttctctgtgaatttgaaatcacagccatgccctgcaacatgaacacacagtgcccagatgggggctactgcatggagcacggcgggagctacctctgcgtctgccacaccgaccacaatgccagccactccctgccatcaccctgcgactcggacccctgcttcaacggaggctcctgcgatgcccatgacgactcctacacctgcgagtgcccgcgcgggttccacggcaagcactgcgagaaagcccggccacacctgtgcagctcagggccctgccggaacgggggcacgtgcaaggaggcgggcggcgagtaccactg

SEQ ID NO: 187763 - DNA, 4538 bp, Homo sapiens
  Payload ID: 16954
  Gene Symbol: SNED1
  Gene Name: sushi, nidogen and EGF-like domains 1
  Uniprot ID: Q8TER0
  ENST ID: ENST00000401884
  CDS Start-End: 1-3975
atgcggcacggcgtcgcctgggcgctgctggtggccgcggccctggggcttggggcgcgcggggtgcgcggcgcggtggcccttgccgacttctacccgttcggcgccgagcgcggcgacgccgtcacccccaagcaggacgacggcggctcggggctgcggccgctctcggtgcccttcccgttcttcggtgccgagcactccggactctacgtgaacaacaacgggatcatctccttcctgaaggaggtttctcagttcaccccagtggccttccccattgccaaggaccgctgcgtggtggcagccttctgggcagatgtggacaaccggcgtgcaggcgacgtgtactaccgggaggccaccgacccagccatgctgcgccgagccacggaggacgtcaggcactacttccccgagctcctggacttcaatgccacctgggtttttgttgccacctggtaccgagtgaccttctttggaggcagttcctcatcccctgtcaacacattccagactgtgctcatcacagacggcaagctctccttcaccatcttcaactatgagtccatcgtgtggaccacaggcacacacgccagcagcgggggcaacgccactggcctcgggggcatcgcagcccaggctggcttcaacgcaggcgatgggcagcgttacttcagtatccccggctcgcgcacagcagacatggccgaggtggagaccaccaccaacgtgggtgtgcccgggcgctgggcgttcagaatcgatgatgcccaggtgcgcgtggggggctgcggccatacaacgtccgtgtgcctggccctgcgcccctgcctcaacggcggcaagtgcatcgacgactgcgtcacgggcaacccctcctacacctgctcctgcctctcgggcttcacggggcggaggtgccacctggacgtgaacgaatgtgcctcccagccctgtcagaatggtgggacctgtactcacggcatcaacagtttccgctgccagtgcccggctggctttgggggacccacctgtgagacagcccaatccccctgtgacaccaaagagtgtcaacatggtggccagtgccaggtggagaatggctctgcggtgtgtgtgtgccaggccggatacaccggagcagcctgcgagatggatgtggacgactgcagccctgacccctgcctgaatggaggctcttgtgttgacctagtggggaattacacctgcttgtgtgccgagcccttcaagggacttcgctgtgagacaggagaccatccagtgccagacgcctgcctctcggccccttgccacaatgggggcacctgtgtggatgcggaccagggctacgtgtgcgagtgccccgaaggcttcatgggcctggactgcagggagagagtccccgatgactgtgagtgccgcaacggaggcagatgcctgggcgccaacaccaccctctgccagtgccccctgggattctttgggcttctctgtgaatttgaaatcacagccatgccctgcaacatgaacacacagtgcccagatgggggctactgcatggagcacggcgggagctacctctgcgtctgccacaccgaccacaatgccagccactccctgccatcaccctgcgactcggacccctgcttcaacggaggctcctgcgatgcccatgacgactcctacacctgcgagtgcccgcgcgggttccacggcaagcactgcgagaaagcccggccacacctgtgcagctcagggccctgccggaacgggggcacgtgcaaggaggcgggcggcgagtaccactgcagctgcccctaccgcttcactgggaggcactgtgagatcgggaagccagactcgtgtgcctctggcccctgtcacaacggcggcacctgcttccactacattggcaaatacaagtgtgactgtcccccaggcttctccgggcggcactgcgagatagccccctccccctgcttccggagcccgtgtgtgaatgggggcacctgcgaggaccgggacacggatttcttctgccactgccaagcagggtacatgggacgccggtgccaggcagaggtggactgcggccccccggaggaggtgaagcacgccacactgcgcttcaacggcacgcggctgggcgcggtggccctgtatgcatgtgaccgtggctacagcctgagcgcccccagccgcatccgggtctgccagccacacggtgtctggagtgagcctccccagtgccttgaaatcgatgagtgccggtctcagccgtgcctgcatgggggctcttgtcaggaccgcgttgctgggtacctgtgcctctgcagcacaggctatgagggcgcccactgtgagctggagagggatgagtgccgagctcacccgtgcagaaatggagggtcctgcaggaacctcccaggggcctatgtctgccggtgccctgcaggcttcgttggagtccactgtgagacagaggtggacgcctgcgactccagcccctgccagcatggaggccggtgtgagagcggcggcggggcctacctgtgcgtctgcccagagagcttcttcggctaccactgcgagacagtgagtgacccctgcttctccagcccctgtgggggccgtggctattgcctggccagcaacggctcccacagctgcacctgcaaagtgggctacacgggcgaggactgcgccaaagagctcttcccaccgacggccctcaagatggagagagtggaggagagtggggtctctatctcctggaacccgcccaatggtccagccgccaggcagatgcttgatggctacgcggtcacctacgtctcctccgacggctcctaccgccgcacagactttgtggacaggacccgctcctcgcaccagctccaggccctggcggccggcagggcctacaacatctccgtcttctcagtgaagcgaaacagtaacaacaagaatgacatcagcaggcctgccgtgctgctggcccgcacgcgaccccgccctgtggaaggcttcgaggtcaccaatgtgacggctagcaccatctcagtgcagtgggccctgcacaggatccgccatgccaccgtcagtggggtccgtgtgtccatccgccaccctgaggccctcagggaccaggccaccgatgtggacaggagtgtggacaggttcacctttagggccctgctgcctgggaagaggtacaccatccagctgaccaccctcagtgggctcaggggagaggagcaccccacagagagcctggccaccgcgccgacgcacgtgtggacccggcccctgcctccagcaaacctgaccgccgcccgagtcactgccacctctgcccacgtggtctgggatgccccgactccaggcagcttgctggaggcttatgtcatcaatgtgaccaccagccagagcaccaagagccgctatgtccccaacgggaagctggcgtcctacacggtgcgcgacctgctgccgggacggcggtaccagctctctgtgatagcagtgcagagcacggagctcgggccgcagcacagcgagcccgcccacctctacatcatcacctcccccagggatggcgctgacagacgctggcaccagggaggacaccaccctcgggtgctcaagaacagaccgcccccggcgcgcctgccggagctgcgcctgctcaatgaccacagcgcccccgagacccccacccagccccccaggttctcggagcttgtggacggcagaggaagagtgagcgccaggttcggtggctcacccagcaaagcagccaccgtgagatcacaacccacagcctcggcgcagctcgagaacatggaggaagcccccaagcgggtcagcctggccctccagctccctgaacacggcagcaaggacatcggaagtgagtcagcagcgctggtggggactttgggactgactgactgctctcaggggccttagaggctgcaggcaggagggaccacccacggtgaggaatcaggaggcacagagcctacctgaggggaggctgagcaccaggcaccccggtgtgggaagatggggtgaagctacaccacccaagcagtgggaccccacagacgggaacaggccagggggcaggacccacccaaaccacccagagtctgagctagagagactggctttgatgctgcctcccctcccctctcctccttcgcctccacatgcagcagagcccaccccagcccctgcctctgggcccctcacccctcacttctccaaagaggagcaggcggagtcaggatgggagaagcagagggagcagccactgggcgagccccagcttgaggactagctgggccctgtggacactcaggttatgcaggacctgaactgtctcctagtccggggctctgcctcgtgaggatcgaggccagcacgtccctgcagggcaccaagcatctgctgagcacctgcagtaagagttcccagacgctcacgaggcagttccccttcgggcagcaccaatacatgtgtgttcctca

SEQ ID NO: 187764 - DNA, 7986 bp, Homo sapiens
  Payload ID: 16954
  Gene Symbol: SNED1
  Gene Name: sushi, nidogen and EGF-like domains 1
  Uniprot ID: Q8TER0
  ENST ID: ENST00000405547
  CDS Start-End: 1-4059
atgcggcacggcgtcgcctgggcgctgctggtggccgcggccctggggcttggggcgcgcggggtgcgcggcgcggtggcccttgccgacttctacccgttcggcgccgagcgcggcgacgccgtcacccccaagcaggacgacggcggctcggggctgcggccgctctcggtgcccttcccgttcttcggtgccgagcactccggactctacgtgaacaacaacgggatcatctccttcctgaaggaggtttctcagttcaccccagtggccttccccattgccaaggaccgctgcgtggtggcagccttctgggcagatgtggacaaccggcgtgcaggcgacgtgtactaccgggaggccaccgacccagccatgctgcgccgagccacggaggacgtcaggcactacttccccgagctcctggacttcaatgccacctgggtttttgttgccacctggtaccgagtgaccttctttggaggcagttcctcatcccctgtcaacacattccagactgtgctcatcacagacggcaagctctccttcaccatcttcaactatgagtccatcgtgtggaccacaggcacacacgccagcagcgggggcaacgccactggcctcgggggcatcgcagcccaggctggcttcaacgcaggcgatgggcagcgttacttcagtatccccggctcgcgcacagcagacatggccgaggtggagaccaccaccaacgtgggtgtgcccgggcgctgggcgttcagaatcgatgatgcccaggtgcgcgtggggggctgcggccatacaacgtccgtgtgcctggccctgcgcccctgcctcaacggcggcaagtgcatcgacgactgcgtcacgggcaacccctcctacacctgctcctgcctctcgggcttcacggggcggaggtgccacctggacgtgaacgaatgtgcctcccagccctgtcagaatggtgggacctgtactcacggcatcaacagtttccgctgccagtgcccggctggctttgggggacccacctgtgagacagcccaatccccctgtgacaccaaagagtgtcaacatggtggccagtgccaggtggagaatggctctgcggtgtgtgtgtgccaggccggatacaccggagcagcctgcgagatggatgtggacgactgcagccctgacccctgcctgaatggaggctcttgtgttgacctagtggggaattacacctgcttgtgtgccgagcccttcaagggacttcgctgtgagacaggagaccatccagtgccagacgcctgcctctcggccccttgccacaatgggggcacctgtgtggatgcggaccagggctacgtgtgcgagtgccccgaaggcttcatgggcctggactgcagggagagagtccccgatgactgtgagtgccgcaacggaggcagatgcctgggcgccaacaccaccctctgccagtgccccctgggattctttgggcttctctgtgaatttgaaatcacagccatgccctgcaacatgaacacacagtgcccagatgggggctactgcatggagcacggcgggagctacctctgcgtctgccacaccgaccacaatgccagccactccctgccatcaccctgcgactcggacccctgcttcaacggaggctcctgcgatgcccatgacgactcctacacctgcgagtgcccgcgcgggttccacggcaagcactgcgagaaagcccggccacacctgtgcagctcagggccctgccggaacgggggcacgtgcaaggaggcgggcggcgagtaccactgcagctgcccctaccgcttcactgggaggcactgtgagatcgggaagccagactcgtgtgcctctggcccctgtcacaacggcggcacctgcttccactacattggcaaatacaagtgtgactgtcccccaggcttctccgggcggcactgcgagatagccccctccccctgcttccggagcccgtgtgtgaatgggggcacctgcgaggaccgggacacggatttcttctgccactgccaagcagggtacatgggacgccggtgccaggcagaggtggactgcggccccccggaggaggtgaagcacgccacactgcgcttcaacggcacgcggctgggcgcggtggccctgtatgcatgtgaccgtggctacagcctgagcgcccccagccgcatccgggtctgccagccacacggtgtctggagtgagcctccccagtgccttgaaatcgatgagtgccggtctcagccgtgcctgcatgggggctcttgtcaggaccgcgttgctgggtacctgtgcctctgcagcacaggctatgagggcgcccactgtgagctggagagggatgagtgccgagctcacccgtgcagaaatggagggtcctgcaggaacctcccaggggcctatgtctgccggtgccctgcaggcttcgttggagtccactgtgagacagaggtggacgcctgcgactccagcccctgccagcatggaggccggtgtgagagcggcggcggggcctacctgtgcgtctgcccagagagcttcttcggctaccactgcgagacagtgagtgacccctgcttctccagcccctgtgggggccgtggctattgcctggccagcaacggctcccacagctgcacctgcaaagtgggctacacgggcgaggactgcgccaaagagctcttcccaccgacggccctcaagatggagagagtggaggagagtggggtctctatctcctggaacccgcccaatggtccagccgccaggcagatgcttgatggctacgcggtcacctacgtctcctccgacggctcctaccgccgcacagactttgtggacaggacccgctcctcgcaccagctccaggccctggcggccggcagggcctacaacatctccgtcttctcagtgaagcgaaacagtaacaacaagaatgacatcagcaggcctgccgtgctgctggcccgcacgcgaccccgccctgtggaaggcttcgaggtcaccaatgtgacggctagcaccatctcagtgcagtgggccctgcacaggatccgccatgccaccgtcagtggggtccgtgtgtccatccgccaccctgaggccctcagggaccaggccaccgatgtggacaggagtgtggacaggttcacctttagggccctgctgcctgggaagaggtacaccatccagctgaccaccctcagtgggctcaggggagaggagcaccccacagagagcctggccaccgcgccgacgcacgtgtggacccggcccctgcctccagcaaacctgaccgccgcccgagtcactgccacctctgcccacgtggtctgggatgccccgactccaggcagcttgctggaggcttatgtcatcaatgtgaccaccagccagagcaccaagagccgctatgtccccaacgggaagctggcgtcctacacggtgcgcgacctgctgccgggacggcggtaccagctctctgtgatagcagtgcagagcacggagctcgggccgcagcacagcgagcccgcccacctctacatcatcacctcccccagggatggcgctgacagacgctggcaccagggaggacaccaccctcgggtgctcaagaacagaccgcccccggcgcgcctgccggagctgcgcctgctcaatgaccacagcgcccccgagacccccacccagccccccaggttctcggagcttgtggacggcagaggaagagtgagcgccaggttcggtggctcacccagcaaagcagccaccgtgagatcacacgtccctggcaactgttcagaaaacccctgtcagaacggaggcacttgtgtgccgggcgcagacgcccacagctgtgactgcgggccagggttcaaaggcagacgctgcgagctcgcctgtataaaggtgtcccgcccctgcacaaggctgttctccgagacaaaggcctttccagtctgggagggaggcgtctgtcaccacgtgaaacaaagtaagagtcagacactggagaaatcttaaggatttaagacgttcttgttacactccaccaacctcacgagtttctaacacccaggaagatgaggtctaaaaactggatgaaaaaggacaccctgagaaaaggtcctagctggagtcagtcccctctgtgacctctctcctcaggcctctagaggacagatggccaggcctgtgcacacaccagcccaccctgagagacccctctgggaccaaccacctgtgagtcctgcgatgcgtttaagcagcctgtgccctcacccaagctgcagttcctgaaggtgtagtctgtgtctctgcggatgagatgacagctcgccattccccggaatcagtgaggctgtcagtcagccacgcttctgcagtatgcagaaacctgttcttagactccaaagccagagaaagaattctcccttcgaggcccaacaaattgagaaggaactgtgatggaccacttccaaaacagagacgggggcaggggctgaagggcagagaccaggtgatgtcagaaggaaagccgggttgcagacacagccgcccctgctctggtcctccagcgtgtttatgacgctcgtgcaggtcgacgagccatcctatggactagttaacactaaggtggagttcagacttttttagacaacggcgcgactggcagcctttctctatcaagggtcagacggtaaacgttttcagctttgcagaccagaggtccctgtggctacagtagcgcagacacagccacaggcatgtcattgaatggctgcggctatgttccaataaaaacttatttacaataacaggtggtggccaaattggcccatgggccttatttggtgaaccctgttctatgagatcacctaggcttcagccttaaacagtggaagccatcccctgaatgacaagtcacaagggtatcaaagaaagacccctgaattttcatggaaaaagctattcagacccctgcttggaaagctaaggcacactgccacgaagcagcaaggacgccttacaagtctcagtgcaacagagatggacacctgggctgggctggacaatgtttaaggttccttttagtccatgactcaagtgatactgttttaggctatcaggtagtaaacacgatcttagacatccccatctttgtaagcagaacagtacggcacttcaccacatctgcttcccaccatgcttctaagcagctgtcttccccctgctaatgttacaaccaaagcagccaccccacctcctctcgtgttgagcctcacgaccgctgacccagctggaaagccagcgccctgccgcgtcaccctgactctgctcagagccagcattccagccacaaagagggcctccttcctttcctctttcataaaaatgttttttgaagagttagagtatattttaggctttttatctttattaaaatttcatgtgcatgtgtctgtgtattctgcaatttgtcattttcagaaagaaggaacaggcaattcgcgaagtttcacctgtactcccgagctgttccccaggctccagacccacttgagagcagaaggtggagctcaatgaagggtctcgagctcagcgaagggtcactgggtgaactgagagaaaccacgttcacaaacgcgtactgcggacttcctgccgccctgggacctgtcactgtttgtccatgtaagctacagcattactagcagatgctaagatcgagtgatatcactggaaaagtaggtgaatcctactaggaaactttctactccctactaggacctcaagcccctcagccacacagcaaatgctaatatgctccagtgttagcttagaagccttgtgtcaacaagaactggctcctgagtcccaagcttggtgccacacagcaaatgctaatatgctccagtgttagcttagaagccttgtgtcaacaagaactggctcctgagtcccaagcttggtgccacacagcaaatgctaatatgctccagtgttagcttagaagccttgtgtcaacaagaactggctcctgagtcccaagtgctgtcacaggacttgcccattgggatgttttccacattaaatatcaagtaaaaagacttcctggtgctcaggaattacagttcgttcttgaaacattccaaagaggccaccacagcttttcccatgtggcttcttttaaaaactcaaatggcttccttgaaaatactcaaagtccacccaaggaaattagtaataatagaatcagaaaactgtcaggagcataaagatttctgtatcaaaatgaaagaagcaatcctgagttgctgaattacccatctgctaatgaaaccgggatggactgatcatctaaccaagtgcagactgaggattctacttagtcctccgactgggtacaacaacagcctaggttctagggagggtggcagtgaccgggatgccacaatggaagagaaaatgaaaacactggcacagtgaaatgtctcatttccaaacagttttgcctatggccaagcaaggcaataaagacaaactctcccttttccccattgcgtgtgggctgccaggtacaagtaagggaatctttgctgtgcccactgtcctccagtagagaacccaacaggcaagggccccactcaggtatcagctcacctcctgcacctccccttagcaggaactccttccactggcaaaggactgccactgccatctgactcaactgtggcgatgtggacggagtcaccgagctgcttttcttttgcaaaacaaaagtctttttctttgcagtcacgctgtaagacgaggctgctggagaaaacaaaagcacctagatttcagtgctgaatccccacaattgcatgcagctcacacctaccaggggtattccagtgcataggggaaaggaacccggctgaaaaaccagctccttatttttcttttaaataaaataatacgatcctaagtccatttaccatctgaagttgtcacgagtgaacagtcacattactgttgtggaccaggccttagatgagtttctcaggctcagcactgacattctgggccggatcatcctctcttgtgggaccatcctgtgcactgcaggatgtttcacagcacccctggcctctacccactagaatcctacaatctaccagatcctaggatctagttgatcctagaatgctaccaaggagacttgaattttggtcccatcatcaaaaatgccttctgcatcaatcctatgccagtttcccctaaaagagggctaactggaatgttctaggatgtaccaatcctccaggaccctcttagagctcatgccatcagagacaggcctctatctcagggatcaccccggctgacatcaaattcctcttctcttttcccaacatttcaaattgttcttcggactcattgagttccctaaggtgacacgcccccccccccccccacacccaccttggggggtcacggattgctccctgtggccctggcttcagcccacctgctccatgaccctatgctcttctcctctggttctcgaagctgtctgtaaccagggcaggggagataactgtatgggaccattccctggcctccacctgccccagcactctccaggccagcacagtctggcactacagactacagggccggagacaccaggcttggaagtgaccactggccaagagctgacataaaagccaacttccccaaacaggaagggcctgttcttcacaaagataaagaaaactgccagcattttgctggccttaagaagccatgcaaaattaaccagtacatcatgaattaacttcttttactctgctgtgcactgaataccattatgaagcaatatacttttggattaaaaataagcatttttgtggaaaatctgctacatgttttcataaaataaagtgctatgatgtactaaaa

SEQ ID NO: 187765 - DNA, 664 bp, Homo sapiens
  Payload ID: 16954
  Gene Symbol: SNED1
  Gene Name: sushi, nidogen and EGF-like domains 1
  ENST ID: ENST00000420591
  CDS Start-End: 1-201
cagtgccaggtggagaatggctctgcggtgtgtgtgtgccaggccggatacaccggagcagcctgcgagatggatgtggacgactgcagccctgacccctgcctgaatggaggctcttgtgttgacctagtggggaattacacctgcttgtgtgccgagcccttcaagggacttcgctgtgagacagttgtgacttgttagaggaattaaaaggccaactggagattgcagcctacagtataaaaatggctttcgtgtctgattgttgcacctgcctccagaggctcacccactgtgccgacttctgtggacgcaccaggtgctgcttctctccagggagatgctaaagacaaactattcaggttatttttagtttaaaaaattcaggaggaaattctgttttacccgtaagacacagagggtcatgggccctccatcagtctttgccgagtgcatgggaggccagggtgtgtcctgaggggagggtggggcaggagcgggaggaggcagcctcacctatttggctgctttaaagtcactgttccgtgtcacagctcactttgcccagattgttatctaaatatcaatgtatttcactaaattcatgtcaggaaacggataagtggtttcaaaaattttttgcaaataaaccgtgttttctaca

SEQ ID NO: 187766 - DNA, 816 bp, Homo sapiens
  Payload ID: 16954
  Gene Symbol: SNED1
  Gene Name: sushi, nidogen and EGF-like domains 1
  ENST ID: ENST00000431690
  CDS Start-End: 1-816
gacccacctgtgagacagcccaatccccctgtgacaccaaagagtgtcaacatggtggccagtgccaggtggagaatggctctgcggtgtgtgtgtgccaggccggatacaccggagcagcctgcgagatggatgtggacgactgcagccctgacccctgcctgaatggaggctcttgtgttgacctagtggggaattacacctgcttgtgtgccgagcccttcaagggacttcgctgtgagacaggagaccatccagtgccagacgcctgcctctcggccccttgccacaatgggggcacctgtgtggatgcggaccagggctacgtgtgcgagtgccccgaaggcttcatgggcctggactgcagggagagagtccccgatgactgtgagtgccgcaacggaggcagatgcctgggcgccaacaccaccctctgccagtgccccctgggattctttgggcttctctgtgaatttgaaatcacagccatgccctgcaacatgaacacacagtgcccagatgggggctactgcatggagcacggcgggagctacctctgcgtctgccacaccgaccacaatgccagccactccctgccatcaccctgcgactcggacccctgcttcaacggaggctcctgcgatgcccatgacgactcctacacctgcgagtgcccgcgcgggttccacggcaagcactgcgagaaaggtatggcgggcaggggcgtccgggccggcgtcagcaccctggagagcgcccgcggtccgccgtcctgcttctctgctgtctctctccttgtttcgcgaattgctgacc

SEQ ID NO: 187767 - DNA, 3257 bp, Homo sapiens
  Payload ID: 16955
  Gene Symbol: SVEP1
  Gene Name: sushi, von Willebrand factor type A, EGF and pentraxin domain containing 1
  Uniprot ID: Q4LDE5
  ENST ID: ENST00000374461
  CDS Start-End: 338-2944
agggagagaaggagggaagcgggagatttttcttgactgccccctttccttcaaacattttataggcttcagggagagagaggaggaggagagagggaagaaaaaaagaggagagcgagaggggtagagagcgcgcgccgttccctccggagttcccgagctgctgaggagtctggattgtgtctgtccccagtgtcagatgaaagggcgctgaggctcttggccgctgccccgcgcccagctccgcgcacgcccctctgcgagtccggccgcccagcgcctcttcccgcccgagccgccgcctgcgctccggggcagccgctctgtctccagcgcgatgtggcctcgcctggccttttgttgctggggtctggcgctcgtttcgggctgggcgacctttcagcagatgtccccgtcgcgcaatttcagcttccgcctcttccccgagaccgcgcccggggcccccgggagtatccccgcgccgcccgctcctggcgacgaagcggcggggagcagagtggagcggctgggccaggcgttccggcgacgcgtgcggctgctgcgggagctcagcgagcgcctggagcttgtcttcctggtggatgattcgtccagcgtgggcgaagtcaacttccgcagcgagctcatgttcgtccgcaagctgctgtccgacttccccgtggtgcccacggccacgcgcgtggccatcgtgaccttctcgtccaagaactacgtggtgccgcgcgtcgattacatctccacccgccgcgcgcgccagcacaagtgcgcgctgctcctccaagagatccctgccatctcctaccgaggtggcggcacctacaccaagggcgccttccagcaagccgcgcaaattcttcttcatgctagagaaaactcaacaaaagttgtatttctcatcactgatggatattccaatgggggagaccctagaccaattgcagcgtcactgcgagattcaggagtggagatcttcacttttggcatatggcaagggaacattcgagagctgaatgacatggcttccaccccaaaggaggagcactgttacctgctacacagttttgaagaatttgaggctttagctcgccgggcattgcatgaagatctaccttctgggagttttattcaagatgatatggtccactgctcatatctttgtgatgaaggcaaggactgctgtgaccgaatgggaagctgcaaatgtgggacacacacaggccattttgagtgcatctgtgaaaaggggtattacgggaaaggtctgcagtatgaatgcacagcttgcccatcggggacatacaaacctgaaggctcaccaggaggaatcagcagttgcattccatgtcctgatgaaaatcacacctctccacctggaagcacatcccctgaagactgtgtctgcagagagggatacagggcatctggccagacctgtgaacttgtccactgccctgccctgaagcctcccgaaaatggttactttatccaaaacacttgcaacaaccacttcaatgcagcctgtggggtccgatgtcaccctggatttgatcttgtgggaagcagcatcatcttatgtctacccaatggtttgtggtccggttcagagagctactgcagagtaagaacatgtcctcatctccgccagccgaaacatggccacatcagctgttctacaagggaaatgttatataagacaacatgtttggttgcctgtgatgaagggtacagactagaaggcagtgataagcttacttgtcaaggaaacagccagtgggatgggccagaaccccggtgtgtggagcgccactgttccacctttcagatgcccaaagatgtcatcatatccccccacaactgtggcaagcagccagccaaatttgggacgatctgctatgtaagttgccgccaagggttcattttatctggagtcaaagaaatgctgagatgtaccacttctggaaaatggaatgtcggagttcaggcagctgtgtgtaaagacgtggaggctcctcaaatcaactgtcctaaggacatagaggctaagactctggaacagcaagattctgccaatgttacctggcagattccaacagctaaagacaactctggtgaaaaggtgtcagtccacgttcatccagctttcaccccaccttaccttttcccaattggagatgttgctatcgtatacacggcaactgacctatccggcaaccaggccagctgcattttccatatcaaggttattgatgcagaaccacctgtcatagactggtgcagatctccacctcccgtccaggtctcggagaaggtacatgccgcaagctgggatgagcctcagttctcagacaactcaggggctgaattggtcattaccagaagtcatacacaaggagaccttttccctcaaggggagactatagtacagtatacagccactgacccctcaggcaataacaggacatgtgatatccatattgtcataaaaggttctccctgtgaaattccattcacacctgtaaatggggattttatatgcactccagataatactggagtcaactgtacattaacttgcttggagggctatgatttcacagaagggtctactgacaagtattattgtgcttatgaagatggcgtctggaaaccaacatataccactgaatggccagactgtgccaaaaaacgttttgcaaaccacgggttcaagtcctttgagatgttctacaaagcagctcgttgtgatgacacagatctgatgaagaagttttctgaagcatttgagacgaccctgggaaaaatggtcccatcattttgtagtgatgcagaggacattgactgcagactggaggagaacctgaccaaaaaatattgcctagaatataattatgactatgaaaatggctttgcaattggtaattaaattctgtggcatcggtagttggcaagactaatctgcaaaataagaataattccagaaaagtgaggcaaactagaaacattaacttctattaatttattcatcaagtattttaggatggctaaataatttgataatgtgctgaaagatcattaaggttatatcaaattttagtaacaaataaattatttaaaattatttgccaggattcttaaaaatgacaaaaactaagaaaactaagtcacatatgctggtaaaattcaaatgttgatgtatcctaaaagagaatagtaataaagtcctaacagcaactttt

SEQ ID NO: 187768 - DNA, 12194 bp, Homo sapiens
  Payload ID: 16955
  Gene Symbol: SVEP1
  Gene Name: sushi, von Willebrand factor type A, EGF and pentraxin domain containing 1
  Uniprot ID: Q4LDE5
  ENST ID: ENST00000374469
  CDS Start-End: 196-10911
ccctccggagttcccgagctgctgaggagtctggattgtgtctgtccccagtgtcagatgaaagggcgctgaggctcttggccgctgccccgcgcccagctccgcgcacgcccctctgcgagtccggccgcccagcgcctcttcccgcccgagccgccgcctgcgctccggggcagccgctctgtctccagcgcgatgtggcctcgcctggccttttgttgctggggtctggcgctcgtttcgggctgggcgacctttcagcagatgtccccgtcgcgcaatttcagcttccgcctcttccccgagaccgcgcccggggcccccgggagtatccccgcgccgcccgctcctggcgacgaagcggcggggagcagagtggagcggctgggccaggcgttccggcgacgcgtgcggctgctgcgggagctcagcgagcgcctggagcttgtcttcctggtggatgattcgtccagcgtgggcgaagtcaacttccgcagcgagctcatgttcgtccgcaagctgctgtccgacttccccgtggtgcccacggccacgcgcgtggccatcgtgaccttctcgtccaagaactacgtggtgccgcgcgtcgattacatctccacccgccgcgcgcgccagcacaagtgcgcgctgctcctccaagagatccctgccatctcctaccgaggtggcggcacctacaccaagggcgccttccagcaagccgcgcaaattcttcttcatgctagagaaaactcaacaaaagttgtatttctcatcactgatggatattccaatgggggagaccctagaccaattgcagcgtcactgcgagattcaggagtggagatcttcacttttggcatatggcaagggaacattcgagagctgaatgacatggcttccaccccaaaggaggagcactgttacctgctacacagttttgaagaatttgaggctttagctcgccgggcattgcatgaagatctaccttctgggagttttattcaagatgatatggtccactgctcatatctttgtgatgaaggcaaggactgctgtgaccgaatgggaagctgcaaatgtgggacacacacaggccattttgagtgcatctgtgaaaaggggtattacgggaaaggtctgcagtatgaatgcacagcttgcccatcggggacatacaaacctgaaggctcaccaggaggaatcagcagttgcattccatgtcctgatgaaaatcacacctctccacctggaagcacatcccctgaagactgtgtctgcagagagggatacagggcatctggccagacctgtgaacttgtccactgccctgccctgaagcctcccgaaaatggttactttatccaaaacacttgcaacaaccacttcaatgcagcctgtggggtccgatgtcaccctggatttgatcttgtgggaagcagcatcatcttatgtctacccaatggtttgtggtccggttcagagagctactgcagagtaagaacatgtcctcatctccgccagccgaaacatggccacatcagctgttctacaagggaaatgttatataagacaacatgtttggttgcctgtgatgaagggtacagactagaaggcagtgataagcttacttgtcaaggaaacagccagtgggatgggccagaaccccggtgtgtggagcgccactgttccacctttcagatgcccaaagatgtcatcatatccccccacaactgtggcaagcagccagccaaatttgggacgatctgctatgtaagttgccgccaagggttcattttatctggagtcaaagaaatgctgagatgtaccacttctggaaaatggaatgtcggagttcaggcagctgtgtgtaaagacgtggaggctcctcaaatcaactgtcctaaggacatagaggctaagactctggaacagcaagattctgccaatgttacctggcagattccaacagctaaagacaactctggtgaaaaggtgtcagtccacgttcatccagctttcaccccaccttaccttttcccaattggagatgttgctatcgtatacacggcaactgacctatccggcaaccaggccagctgcattttccatatcaaggttattgatgcagaaccacctgtcatagactggtgcagatctccacctcccgtccaggtctcggagaaggtacatgccgcaagctgggatgagcctcagttctcagacaactcaggggctgaattggtcattaccagaagtcatacacaaggagaccttttccctcaaggggagactatagtacagtatacagccactgacccctcaggcaataacaggacatgtgatatccatattgtcataaaaggttctccctgtgaaattccattcacacctgtaaatggggattttatatgcactccagataatactggagtcaactgtacattaacttgcttggagggctatgatttcacagaagggtctactgacaagtattattgtgcttatgaagatggcgtctggaaaccaacatataccactgaatggccagactgtgccaaaaaacgttttgcaaaccacgggttcaagtcctttgagatgttctacaaagcagctcgttgtgatgacacagatctgatgaagaagttttctgaagcatttgagacgaccctgggaaaaatggtcccatcattttgtagtgatgcagaggacattgactgcagactggaggagaacctgaccaaaaaatattgcctagaatataattatgactatgaaaatggctttgcaattggaccaggtggctggggtgcagctaataggctggattactcttacgatgacttcctggacactgtgcaagaaacagccacaagcatcggcaatgccaagtcctcacggattaaaagaagtgccccattatctgactataaaattaagttaatttttaacatcacagctagtgtgccattacccgatgaaagaaatgatacccttgaatgggaaaatcagcaacgactccttcagacattggaaactatcacaaataaactgaaaaggactctcaacaaagaccccatgtattcctttcagcttgcatcagaaatacttatagccgacagcaattcattagaaacaaaaaaggcttcccccttctgcagaccaggctcagtgctgagagggcgtatgtgtgtcaattgccctttgggaacctattataatctggaacatttcacctgtgaaagctgccggatcggatcctatcaagatgaagaagggcaacttgagtgcaagctttgcccctctgggatgtacacggaatatatccattcaagaaacatctctgattgtaaagctcagtgtaaacaaggcacctactcatacagtggacttgagacttgtgaatcgtgtccactgggcacttatcagccaaaatttggttcccggagctgcctctcgtgtccagaaaacacctcaactgtgaaaagaggagccgtgaacatttctgcatgtggagttccttgtccagaaggaaaattctcgcgttctgggttaatgccctgtcacccatgtcctcgtgactattaccaacctaatgcagggaaggccttctgcctggcctgtcccttttatggaactaccccattcgctggttccagatccatcacagaatgttcaagttttagttcaactttctcagcggcagaggaaagtgtggtgccccctgcctctcttggacatattaaaaagaggcatgaaatcagcagtcaggttttccatgaatgcttctttaacccttgccacaatagtggaacctgccagcaacttgggcgtggttatgtttgtctctgtccacttggatatacaggcttaaagtgtgaaacagacatcgatgagtgcagcccactgccttgcctcaacaatggagtttgtaaagacctagttggggaattcatttgtgagtgcccatcaggttacacaggtcagcggtgtgaagaaaatataaatgagtgtagctccagtccttgtttaaataaaggaatctgtgttgatggtgtggctggctatcgttgcacatgtgtgaaaggatttgtaggcctgcattgtgaaacagaagtcaatgaatgccagtcaaacccatgcttaaataatgcagtctgtgaagaccaggttgggggattcttgtgcaaatgcccacctggatttttgggtacccgatgtggaaagaacgtcgatgagtgtctcagtcagccatgcaaaaatggagctacctgtaaagacggtgccaatagcttcagatgcctgtgtgcagctggcttcacaggatcacactgtgaattgaacatcaatgaatgtcagtctaatccatgtagaaatcaggccacctgtgtggatgaattaaattcatacagttgtaaatgtcagccaggattttcaggcaaaaggtgtgaaacagaacagtctacaggctttaacctggattttgaagtttctggcatctatggatatgtcatgctagatggcatgctcccatctctccatgctctaacctgtaccttctggatgaaatcctctgacgacatgaactatggaacaccaatctcctatgcagttgataacggcagcgacaataccttgctcctgactgattataacggctgggttctttatgtgaatggcagggaaaagataacaaactgtccctcggtgaatgatggcagatggcatcatattgcaatcacttggacaagtgccaatggcatctggaaagtctatatcgatgggaaattatctgacggtggtgctggcctctctgttggtttgcccatacctggtggtggtgcgttagttctggggcaagagcaagacaaaaaaggagagggattcagcccagctgagtcttttgtgggctccataagccagctcaacctctgggactatgtcctgtctccacagcaggtgaagtcactggctacctcctgcccagaggaactcagtaaaggaaacgtgttagcatggcctgatttcttgtcaggaattgtggggaaagtgaagatcgattctaagagcatattttgttctgattgcccacgcttaggagggtcagtgcctcatctgagaactgcatctgaagatttaaagccaggttccaaagtcaatctgttctgtgatccaggcttccagctggtcgggaaccctgtgcagtactgtctgaatcaaggacagtggacacaaccacttcctcactgtgaacgcattagctgtggggtgccacctcctttggagaatggcttccattcagccgatgacttctatgctggcagcacagtaacctaccagtgcaacaatggctactatctattgggtgactcaaggatgttctgtacagataatgggagctggaacggcgtttcaccatcctgccttgatgtcgatgagtgtgcagttggatcagattgtagtgagcatgcttcttgcctgaacgtagatggatcctacatatgttcatgtgtcccaccgtacacaggagatgggaaaaactgtgcagaacctataaaatgtaaggctccaggaaatccggaaaatggccactcctcaggtgagatttatacagtaggtgccgaagtcacattttcgtgtcaggaaggataccagttgatgggagtaaccaaaatcacatgtttggagtctggagaatggaatcatctaataccatattgtaaagctgtttcatgtggtaaaccggctattccagaaaatggttgcattgaggagttagcatttacttttggcagcaaagtgacatataggtgtaataaaggatatactctggccggtgataaagaatcatcctgtcttgctaacagttcttggagtcattcccctcctgtgtgtgaaccagtgaagtgttctagtccggaaaatataaataatggaaaatatattttgagtgggcttacctacctttctactgcatcatattcatgcgatacaggatacagcttacagggcccttccattattgaatgcacggcttctggcatctgggacagagcgccacctgcctgtcacctcgtcttctgtggagaaccacctgccatcaaagatgctgtcattacggggaataacttcactttcaggaacaccgtcacttacacttgcaaagaaggctatactcttgctggtcttgacaccattgaatgcctggccgacggcaagtggagtagaagtgaccagcagtgcctggctgtctcctgtgatgagccacccattgtggaccacgcctctccagagactgcccatcggctctttggagacattgcattctactactgctctgatggttacagcctagcagacaattcccagcttctctgcaatgcccagggcaagtgggtacccccagaaggtcaagacatgccccgttgtatagctcatttctgtgaaaaacctccatcggtttcctatagcatcttggaatctgtgagcaaagcaaaatttgcagctggctcagttgtgagctttaaatgcatggaaggctttgtactgaacacctcagcaaagattgaatgtatgagaggtgggcagtggaacccttcccccatgtccatccagtgcatccctgtgcggtgtggagagccaccaagcatcatgaatggctatgcaagtggatcaaactacagttttggagccatggtggcttacagctgcaacaaggggttctacatcaaaggggaaaagaagagcacctgcgaagccacagggcagtggagtagtcctataccgacgtgccacccggtatcttgtggtgaaccacctaaggttgagaatggctttctggagcatacaactggcaggatctttgagagtgaagtgaggtatcagtgtaacccgggctataagtcagtcggaagtcctgtatttgtctgccaagccaatcgccactggcacagtgaatcccctctgatgtgtgttcctctcgactgtggaaaacctcccccgatccagaatggcttcatgaaaggagaaaactttgaagtagggtccaaggttcagtttttctgtaatgagggttatgagcttgttggtgacagttcttggacatgtcagaaatctggcaaatggaataagaagtcaaatccaaagtgcatgcctgccaagtgcccagagccgcccctcttggaaaaccagctagtattaaaggagttgaccaccgaggtaggagttgtgacattttcctgtaaagaagggcatgtcctgcaaggcccctctgtcctgaaatgcttgccatcccagcaatggaatgactctttccctgtttgtaagattgttctttgtaccccacctcccctaatttcctttggtgtccccattccttcttctgctcttcattttggaagtactgtcaagtattcttgtgtaggtgggtttttcctaagaggaaattctaccaccctctgccaacctgatggcacctggagctctccactgccagaatgtgttccagtagaatgtccccaacctgaggaaatccccaatggaatcattgatgtgcaaggccttgcctatctcagcacagctctctatacctgcaagccaggctttgaattggtgggaaatactaccaccctttgtggagaaaatggtcactggcttggaggaaaaccaacatgtaaagccattgagtgcctgaaacccaaggagattttgaatggcaaattctcttacacggacctacactatggacagaccgttacctactcttgcaaccgaggctttcggctcgaaggtcccagtgccttgacctgtttagagacaggtgattgggatgtagatgccccatcttgcaatgccatccactgtgattccccacaacccattgaaaatggttttgtagaaggtgcagattacagctatggtgccataatcatctacagttgcttccctgggtttcaggtggctggtcatgccatgcagacctgtgaagagtcaggatggtcaagttccatcccaacatgtatgccaatagactgtggcctccctcctcatatagattttggagactgtactaaactcaaagatgaccagggatattttgagcaagaagacgacatgatggaagttccatatgtgactcctcaccctccttatcatttgggagcagtggctaaaacctgggaaaatacaaaggagtctcctgctacacattcatcaaactttctgtatggtaccatggtttcatacacctgtaatccaggatatgaacttctggggaaccctgtgctgatctgccaggaagatggaacttggaatggcagtgcaccatcctgcatttcaattgaatgtgacttgcctactgctcctgaaaatggctttttgcgttttacagagactagcatgggaagtgctgtgcagtatagctgtaaacctggacacattctagcaggctctgacttaaggctttgtctagagaatagaaagtggagtggtgcctccccacgctgtgaagccatttcatgcaaaaagccaaatccagtcatgaatggatccatcaaaggaagcaactacacatacctgagcacgttgtactatgagtgtgaccccggatatgtgctgaatggcactgagaggagaacatgccaggatgacaaaaactgggatgaggatgagcccatttgcattcctgtggactgcagttcacccccagtctcagccaatggccaggtgagaggagacgagtacacattccaaaaagagattgaatacacttgcaatgaagggttcttgcttgagggagccaggagtcgggtttgtcttgccaatggaagttggagtggagccactcccgactgtgtgcctgtcagatgtgccaccccgccacaactggccaatggggtgacggaaggcctggactatggcttcatgaaggaagtaacattccactgtcacgagggctacatcttgcacggtgctccaaaactcacctgtcagtcagatggcaactgggatgcagagattcctctctgtaaaccagtcaactgtggacctcctgaagatcttgcccatggtttccctaatggtttttcctttattcatgggggccatatacagtatcagtgctttcctggttataagctccatggaaattcatcaagaaggtgcctctccaatggctcctggagtggcagctcaccttcctgcctgccttgcagatgttccacaccagtaattgaatatggaactgtcaatgggacagattttgactgtggaaaggcagcccggattcagtgcttcaaaggcttcaagctcctaggactttctgaaatcacctgtgaagccgatggccagtggagctctgggttcccccactgtgaacacacttcttgtggttctcttccaatgataccaaatgcgttcatcagtgagaccagctcttggaaggaaaatgtgataacttacagctgcaggtctggatatgtcatacaaggcagttcagatctgatttgtacagagaaaggggtatggagccagccttatccagtctgtgagcccttgtcctgtgggtccccaccgtctgtcgccaatgcagtggcaactggagaggcacacacctatgaaagtgaagtgaaactcagatgtctggaaggttatacgatggatacagatacagatacattcacctgtcagaaagatggtcgctggttccctgagagaatctcctgcagtcctaaaaaatgtcctctcccggaaaacataacacatatacttgtacatggggacgatttcagtgtgaataggcaagtttctgtgtcatgtgcagaagggtatacctttgagggagttaacatatcagtatgtcagcttgatggaacctgggagccaccattctccgatgaatcttgcagtccagtttcttgtgggaaacctgaaagtccagaacatggatttgtggttggcagtaaatacacctttgaaagcacaattatttatcagtgtgagcctggctatgaactagaggggaacagggaacgtgtctgccaggagaacagacagtggagtggaggggtggcaatatgcaaagagaccaggtgtgaaactccacttgaatttctcaatgggaaagctgacattgaaaacaggacgactggacccaacgtggtatattcctgcaacagaggctacagtcttgaagggccatctgaggcacactgcacagaaaatggaacctggagccacccagtccctctctgcaaaccaaatccatgccctgttccttttgtgattcccgagaatgctctgctgtctgaaaaggagttttatgttgatcagaatgtgtccatcaaatgtagggaaggttttctgctgcagggccacggcatcattacctgcaaccccgacgagacgtggacacagacaagcgccaaatgtgaaaaaatctcatgtggtccaccagctcacgtagaaaatgcaattgctcgaggcgtacattatcaatatggagacatgatcacctactcatgttacagtggatacatgttggagggtttcctgaggagtgtttgtttagaaaatggaacatggacatcacctcctatttgcagagctgtctgtcgatttccatgtcagaatgggggcatctgccaacgcccaaatgcttgttcctgtccagagggctggatggggcgcctctgtgaagaaccaatctgcattcttccctgtctgaacggaggtcgctgtgtggccccttaccagtgtgactgcccgcctggctggacggggtctcgctgtcatacagctgtttgccagtctccctgcttaaatggtggaaaatgtgtaagaccaaaccgatgtcactgtctttcttcttggacgggacataactgttccaggaaaaggaggactgggttttaaccactgcacgaccatctggctctcccaaaagcaggatcatctctcctcggtagtgcctgggcatcctggaacttatgcaaagaaagtccaacatggtgctgggtcttgtttagtaaacttgttacttggggttactttttttattttgtgatatattttgttattccttgtgacatactttcttacatgtttccatttttaaatatgcctgtattttctatataaaaattatattaaatagatgctgctctaccctcacaaaatgtacatattctgctgtctattgggaaagttcctggtacacatttttattcagttacttaaaatgatttttccattaaagtatattttgctactaaataatattttgctggatagtaccattttatgaggtggccaagggattcatagagaggactcatgatctttcatctgtgccactggcaccacataggagaccccttacaataaaggagacccctttgttctggttccatcttctatacaatatgtgtaataataaaagctttttctttcatttaatcaatcagagagtaactgttggacctggtactctccaccacataattatgtcctggtacttagggtagcctggctaattcttttcacaacatttgaaaagccgtaggcattaacttcatggatgtggagaaacagcataatgaccttggttcacaatgaaagtgctagccttctttctcgtggctggaataagaaatgcaagaactggaagattaacaaagagctgatacccggactggtaatcccacaactcactattttgggaggaaggggaagacagggaaagagaaggaaaaaggcaaatgggaaacattccccagagctgtgctcctggtctcacctgcaaaaaagaattgcagccacctaagagaaagctgagctgcccctcagtcctcactgtcacctacctctatcacaacaattgtaccaagatgaagccttccccagacttcagaaaataaagtcaaaccctagattttgttttaaaataggaaactcagaatcaacttgcctccatcctctgggaaaactgctcccacacaggccttggagtgtgttgtagcactgtggaggaatgcagaaaggatgaaagagatcttgattctcctagtggttctcttcactaccgtaggcatccctcagccattgactcctccttctttctcttgacattcactttcttggccagtcttacatgcttatgagtctactttccaataaatttactcatagtccattaa

SEQ ID NO: 187769 - DNA, 12350 bp, Homo sapiens
  Payload ID: 16955
  Gene Symbol: SVEP1
  Gene Name: sushi, von Willebrand factor type A, EGF and pentraxin domain containing 1
  ENST ID: ENST00000401783
  CDS Start-End: 338-11062
agggagagaaggagggaagcgggagatttttcttgactgccccctttccttcaaacattttataggcttcagggagagagaggaggaggagagagggaagaaaaaaagaggagagcgagaggggtagagagcgcgcgccgttccctccggagttcccgagctgctgaggagtctggattgtgtctgtccccagtgtcagatgaaagggcgctgaggctcttggccgctgccccgcgcccagctccgcgcacgcccctctgcgagtccggccgcccagcgcctcttcccgcccgagccgccgcctgcgctccggggcagccgctctgtctccagcgcgatgtggcctcgcctggccttttgttgctggggtctggcgctcgtttcgggctgggcgacctttcagcagatgtccccgtcgcgcaatttcagcttccgcctcttccccgagaccgcgcccggggcccccgggagtatccccgcgccgcccgctcctggcgacgaagcggcggggagcagagtggagcggctgggccaggcgttccggcgacgcgtgcggctgctgcgggagctcagcgagcgcctggagcttgtcttcctggtggatgattcgtccagcgtgggcgaagtcaacttccgcagcgagctcatgttcgtccgcaagctgctgtccgacttccccgtggtgcccacggccacgcgcgtggccatcgtgaccttctcgtccaagaactacgtggtgccgcgcgtcgattacatctccacccgccgcgcgcgccagcacaagtgcgcgctgctcctccaagagatccctgccatctcctaccgaggtggcggcacctacaccaagggcgccttccagcaagccgcgcaaattcttcttcatgctagagaaaactcaacaaaagttgtatttctcatcactgatggatattccaatgggggagaccctagaccaattgcagcgtcactgcgagattcaggagtggagatcttcacttttggcatatggcaagggaacattcgagagctgaatgacatggcttccaccccaaaggaggagcactgttacctgctacacagttttgaagaatttgaggctttagctcgccgggcattgcatgaagatctaccttctgggagttttattcaagatgatatggtccactgctcatatctttgtgatgaaggcaaggactgctgtgaccgaatgggaagctgcaaatgtgggacacacacaggccattttgagtgcatctgtgaaaaggggtattacgggaaaggtctgcagtatgaatgcacagcttgcccatcggggacatacaaacctgaaggctcaccaggaggaatcagcagttgcattccatgtcctgatgaaaatcacacctctccacctggaagcacatcccctgaagactgtgtctgcagagagggatacagggcatctggccagacctgtgaacttgtccactgccctgccctgaagcctcccgaaaatggttactttatccaaaacacttgcaacaaccacttcaatgcagcctgtggggtccgatgtcaccctggatttgatcttgtgggaagcagcatcatcttatgtctacccaatggtttgtggtccggttcagagagctactgcagagtaagaacatgtcctcatctccgccagccgaaacatggccacatcagctgttctacaagggaaatgttatataagacaacatgtttggttgcctgtgatgaagggtacagactagaaggcagtgataagcttacttgtcaaggaaacagccagtgggatgggccagaaccccggtgtgtggagcgccactgttccacctttcagatgcccaaagatgtcatcatatccccccacaactgtggcaagcagccagccaaatttgggacgatctgctatgtaagttgccgccaagggttcattttatctggagtcaaagaaatgctgagatgtaccacttctggaaaatggaatgtcggagttcaggcagctgtgtgtaaagacgtggaggctcctcaaatcaactgtcctaaggacatagaggctaagactctggaacagcaagattctgccaatgttacctggcagattccaacagctaaagacaactctggtgaaaaggtgtcagtccacgttcatccagctttcaccccaccttaccttttcccaattggagatgttgctatcgtatacacggcaactgacctatccggcaaccaggccagctgcattttccatatcaaggttattgatgcagaaccacctgtcatagactggtgcagatctccacctcccgtccaggtctcggagaaggtacatgccgcaagctgggatgagcctcagttctcagacaactcaggggctgaattggtcattaccagaagtcatacacaaggagaccttttccctcaaggggagactatagtacagtatacagccactgacccctcaggcaataacaggacatgtgatatccatattgtcataaaaggttctccctgtgaaattccattcacacctgtaaatggggattttatatgcactccagataatactggagtcaactgtacattaacttgcttggagggctatgatttcacagaagggtctactgacaagtattattgtgcttatgaagatggcgtctggaaaccaacatataccactgaatggccagactgtgccaaaaaacgttttgcaaaccacgggttcaagtcctttgagatgttctacaaagcagctcgttgtgatgacacagatctgatgaagaagttttctgaagcatttgagacgaccctgggaaaaatggtcccatcattttgtagtgatgcagaggacattgactgcagactggaggagaacctgaccaaaaaatattgcctagaatataattatgactatgaaaatggctttgcaattggaccaggtggctggggtgcagctaataggctggattactcttacgatgacttcctggacactgtgcaagaaacagccacaagcatcggcaatgccaagtcctcacggattaaaagaagtgccccattatctgactataaaattaagttaatttttaacatcacagctagtgtgccattacccgatgaaagaaatgatacccttgaatgggaaaatcagcaacgactccttcagacattggaaactatcacaaataaactgaaaaggactctcaacaaagaccccatgtattcctttcagcttgcatcagaaatacttatagccgacagcaattcattagaaacaaaaaaggcttcccccttctgcagaccaggctcagtgctgagagggcgtatgtgtgtcaattgccctttgggaacctattataatctggaacatttcacctgtgaaagctgccggatcggatcctatcaagatgaagaagggcaacttgagtgcaagctttgcccctctgggatgtacacggaatatatccattcaagaaacatctctgattgtaaagctcagtgtaaacaaggcacctactcatacagtggacttgagacttgtgaatcgtgtccactgggcacttatcagccaaaatttggttcccggagctgcctctcgtgtccagaaaacacctcaactgtgaaaagaggagccgtgaacatttctgcatgtggagttccttgtccagaaggaaaattctcgcgttctgggttaatgccctgtcacccatgtcctcgtgactattaccaacctaatgcagggaaggccttctgcctggcctgtcccttttatggaactaccccattcgctggttccagatccatcacagaatgttcaagttttagttcaactttctcagcggcagaggaaagtgtggtgccccctgcctctcttggacatattaaaaagaggcatgaaatcagcagtcaggttttccatgaatgcttctttaacccttgccacaatagtggaacctgccagcaacttgggcgtggttatgtttgtctctgtccacttggatatacaggcttaaagtgtgaaacagacatcgatgagtgcagcccactgccttgcctcaacaatggagtttgtaaagacctagttggggaattcatttgtgagtgcccatcaggttacacaggtcagcggtgtgaagaaaatataaatgagtgtagctccagtccttgtttaaataaaggaatctgtgttgatggtgtggctggctatcgttgcacatgtgtgaaaggatttgtaggcctgcattgtgaaacagaagtcaatgaatgccagtcaaacccatgcttaaataatgcagtctgtgaagaccaggttgggggattcttgtgcaaatgcccacctggatttttgggtacccgatgtggaaagaacgtcgatgagtgtctcagtcagccatgcaaaaatggagctacctgtaaagacggtgccaatagcttcagatgcctgtgtgcagctggcttcacaggatcacactgtgaattgaacatcaatgaatgtcagtctaatccatgtagaaatcaggccacctgtgtggatgaattaaattcatacagttgtaaatgtcagccaggattttcaggcaaaaggtgtgaaacagaacagtctacaggctttaacctggattttgaagtttctggcatctatggatatgtcatgctagatggcatgctcccatctctccatgctctaacctgtaccttctggatgaaatcctctgacgacatgaactatggaacaccaatctcctatgcagttgataacggcagcgacaataccttgctcctgactgattataacggctgggttctttatgtgaatggcagggaaaagataacaaactgtccctcggtgaatgatggcagatggcatcatattgcaatcacttggacaagtgccaatggcatctggaaagtctatatcgatgggaaattatctgacggtggtgctggcctctctgttggtttgcccatacctggtatgttaggtggtggtgcgttagttctggggcaagagcaagacaaaaaaggagagggattcagcccagctgagtcttttgtgggctccataagccagctcaacctctgggactatgtcctgtctccacagcaggtgaagtcactggctacctcctgcccagaggaactcagtaaaggaaacgtgttagcatggcctgatttcttgtcaggaattgtggggaaagtgaagatcgattctaagagcatattttgttctgattgcccacgcttaggagggtcagtgcctcatctgagaactgcatctgaagatttaaagccaggttccaaagtcaatctgttctgtgatccaggcttccagctggtcgggaaccctgtgcagtactgtctgaatcaaggacagtggacacaaccacttcctcactgtgaacgcattagctgtggggtgccacctcctttggagaatggcttccattcagccgatgacttctatgctggcagcacagtaacctaccagtgcaacaatggctactatctattgggtgactcaaggatgttctgtacagataatgggagctggaacggcgtttcaccatcctgccttgatgtcgatgagtgtgcagttggatcagattgtagtgagcatgcttcttgcctgaacgtagatggatcctacatatgttcatgtgtcccaccgtacacaggagatgggaaaaactgtgcagaacctataaaatgtaaggctccaggaaatccggaaaatggccactcctcaggtgagatttatacagtaggtgccgaagtcacattttcgtgtcaggaaggataccagttgatgggagtaaccaaaatcacatgtttggagtctggagaatggaatcatctaataccatattgtaaagctgtttcatgtggtaaaccggctattccagaaaatggttgcattgaggagttagcatttacttttggcagcaaagtgacatataggtgtaataaaggatatactctggccggtgataaagaatcatcctgtcttgctaacagttcttggagtcattcccctcctgtgtgtgaaccagtgaagtgttctagtccggaaaatataaataatggaaaatatattttgagtgggcttacctacctttctactgcatcatattcatgcgatacaggatacagcttacagggcccttccattattgaatgcacggcttctggcatctgggacagagcgccacctgcctgtcacctcgtcttctgtggagaaccacctgccatcaaagatgctgtcattacggggaataacttcactttcaggaacaccgtcacttacacttgcaaagaaggctatactcttgctggtcttgacaccattgaatgcctggccgacggcaagtggagtagaagtgaccagcagtgcctggctgtctcctgtgatgagccacccattgtggaccacgcctctccagagactgcccatcggctctttggagacattgcattctactactgctctgatggttacagcctagcagacaattcccagcttctctgcaatgcccagggcaagtgggtacccccagaaggtcaagacatgccccgttgtatagctcatttctgtgaaaaacctccatcggtttcctatagcatcttggaatctgtgagcaaagcaaaatttgcagctggctcagttgtgagctttaaatgcatggaaggctttgtactgaacacctcagcaaagattgaatgtatgagaggtgggcagtggaacccttcccccatgtccatccagtgcatccctgtgcggtgtggagagccaccaagcatcatgaatggctatgcaagtggatcaaactacagttttggagccatggtggcttacagctgcaacaaggggttctacatcaaaggggaaaagaagagcacctgcgaagccacagggcagtggagtagtcctataccgacgtgccacccggtatcttgtggtgaaccacctaaggttgagaatggctttctggagcatacaactggcaggatctttgagagtgaagtgaggtatcagtgtaacccgggctataagtcagtcggaagtcctgtatttgtctgccaagccaatcgccactggcacagtgaatcccctctgatgtgtgttcctctcgactgtggaaaacctcccccgatccagaatggcttcatgaaaggagaaaactttgaagtagggtccaaggttcagtttttctgtaatgagggttatgagcttgttggtgacagttcttggacatgtcagaaatctggcaaatggaataagaagtcaaatccaaagtgcatgcctgccaagtgcccagagccgcccctcttggaaaaccagctagtattaaaggagttgaccaccgaggtaggagttgtgacattttcctgtaaagaagggcatgtcctgcaaggcccctctgtcctgaaatgcttgccatcccagcaatggaatgactctttccctgtttgtaagattgttctttgtaccccacctcccctaatttcctttggtgtccccattccttcttctgctcttcattttggaagtactgtcaagtattcttgtgtaggtgggtttttcctaagaggaaattctaccaccctctgccaacctgatggcacctggagctctccactgccagaatgtgttccagtagaatgtccccaacctgaggaaatccccaatggaatcattgatgtgcaaggccttgcctatctcagcacagctctctatacctgcaagccaggctttgaattggtgggaaatactaccaccctttgtggagaaaatggtcactggcttggaggaaaaccaacatgtaaagccattgagtgcctgaaacccaaggagattttgaatggcaaattctcttacacggacctacactatggacagaccgttacctactcttgcaaccgaggctttcggctcgaaggtcccagtgccttgacctgtttagagacaggtgattgggatgtagatgccccatcttgcaatgccatccactgtgattccccacaacccattgaaaatggttttgtagaaggtgcagattacagctatggtgccataatcatctacagttgcttccctgggtttcaggtggctggtcatgccatgcagacctgtgaagagtcaggatggtcaagttccatcccaacatgtatgccaatagactgtggcctccctcctcatatagattttggagactgtactaaactcaaagatgaccagggatattttgagcaagaagacgacatgatggaagttccatatgtgactcctcaccctccttatcatttgggagcagtggctaaaacctgggaaaatacaaaggagtctcctgctacacattcatcaaactttctgtatggtaccatggtttcatacacctgtaatccaggatatgaacttctggggaaccctgtgctgatctgccaggaagatggaacttggaatggcagtgcaccatcctgcatttcaattgaatgtgacttgcctactgctcctgaaaatggctttttgcgttttacagagactagcatgggaagtgctgtgcagtatagctgtaaacctggacacattctagcaggctctgacttaaggctttgtctagagaatagaaagtggagtggtgcctccccacgctgtgaagccatttcatgcaaaaagccaaatccagtcatgaatggatccatcaaaggaagcaactacacatacctgagcacgttgtactatgagtgtgaccccggatatgtgctgaatggcactgagaggagaacatgccaggatgacaaaaactgggatgaggatgagcccatttgcattcctgtggactgcagttcacccccagtctcagccaatggccaggtgagaggagacgagtacacattccaaaaagagattgaatacacttgcaatgaagggttcttgcttgagggagccaggagtcgggtttgtcttgccaatggaagttggagtggagccactcccgactgtgtgcctgtcagatgtgccaccccgccacaactggccaatggggtgacggaaggcctggactatggcttcatgaaggaagtaacattccactgtcacgagggctacatcttgcacggtgctccaaaactcacctgtcagtcagatggcaactgggatgcagagattcctctctgtaaaccagtcaactgtggacctcctgaagatcttgcccatggtttccctaatggtttttcctttattcatgggggccatatacagtatcagtgctttcctggttataagctccatggaaattcatcaagaaggtgcctctccaatggctcctggagtggcagctcaccttcctgcctgccttgcagatgttccacaccagtaattgaatatggaactgtcaatgggacagattttgactgtggaaaggcagcccggattcagtgcttcaaaggcttcaagctcctaggactttctgaaatcacctgtgaagccgatggccagtggagctctgggttcccccactgtgaacacacttcttgtggttctcttccaatgataccaaatgcgttcatcagtgagaccagctcttggaaggaaaatgtgataacttacagctgcaggtctggatatgtcatacaaggcagttcagatctgatttgtacagagaaaggggtatggagccagccttatccagtctgtgagcccttgtcctgtgggtccccaccgtctgtcgccaatgcagtggcaactggagaggcacacacctatgaaagtgaagtgaaactcagatgtctggaaggttatacgatggatacagatacagatacattcacctgtcagaaagatggtcgctggttccctgagagaatctcctgcagtcctaaaaaatgtcctctcccggaaaacataacacatatacttgtacatggggacgatttcagtgtgaataggcaagtttctgtgtcatgtgcagaagggtatacctttgagggagttaacatatcagtatgtcagcttgatggaacctgggagccaccattctccgatgaatcttgcagtccagtttcttgtgggaaacctgaaagtccagaacatggatttgtggttggcagtaaatacacctttgaaagcacaattatttatcagtgtgagcctggctatgaactagaggggaacagggaacgtgtctgccaggagaacagacagtggagtggaggggtggcaatatgcaaagagaccaggtgtgaaactccacttgaatttctcaatgggaaagctgacattgaaaacaggacgactggacccaacgtggtatattcctgcaacagaggctacagtcttgaagggccatctgaggcacactgcacagaaaatggaacctggagccacccagtccctctctgcaaaccaaatccatgccctgttccttttgtgattcccgagaatgctctgctgtctgaaaaggagttttatgttgatcagaatgtgtccatcaaatgtagggaaggttttctgctgcagggccacggcatcattacctgcaaccccgacgagacgtggacacagacaagcgccaaatgtgaaaaaatctcatgtggtccaccagctcacgtagaaaatgcaattgctcgaggcgtacattatcaatatggagacatgatcacctactcatgttacagtggatacatgttggagggtttcctgaggagtgtttgtttagaaaatggaacatggacatcacctcctatttgcagagctgtctgtcgatttccatgtcagaatgggggcatctgccaacgcccaaatgcttgttcctgtccagagggctggatggggcgcctctgtgaagaaccaatctgcattcttccctgtctgaacggaggtcgctgtgtggccccttaccagtgtgactgcccgcctggctggacggggtctcgctgtcatacagctgtttgccagtctccctgcttaaatggtggaaaatgtgtaagaccaaaccgatgtcactgtctttcttcttggacgggacataactgttccaggaaaaggaggactgggttttaaccactgcacgaccatctggctctcccaaaagcaggatcatctctcctcggtagtgcctgggcatcctggaacttatgcaaagaaagtccaacatggtgctgggtcttgtttagtaaacttgttacttggggttactttttttattttgtgatatattttgttattccttgtgacatactttcttacatgtttccatttttaaatatgcctgtattttctatataaaaattatattaaatagatgctgctctaccctcacaaaatgtacatattctgctgtctattgggaaagttcctggtacacatttttattcagttacttaaaatgatttttccattaaagtatattttgctactaaataatattttgctggatagtaccattttatgaggtggccaagggattcatagagaggactcatgatctttcatctgtgccactggcaccacataggagaccccttacaataaaggagacccctttgttctggttccatcttctatacaatatgtgtaataataaaagctttttctttcatttaatcaatcagagagtaactgttggacctggtactctccaccacataattatgtcctggtacttagggtagcctggctaattcttttcacaacatttgaaaagccgtaggcattaacttcatggatgtggagaaacagcataatgaccttggttcacaatgaaagtgctagccttctttctcgtggctggaataagaaatgcaagaactggaagattaacaaagagctgatacccggactggtaatcccacaactcactattttgggaggaaggggaagacagggaaagagaaggaaaaaggcaaatgggaaacattccccagagctgtgctcctggtctcacctgcaaaaaagaattgcagccacctaagagaaagctgagctgcccctcagtcctcactgtcacctacctctatcacaacaattgtaccaagatgaagccttccccagacttcagaaaataaagtcaaaccctagattttgttttaaaataggaaactcagaatcaacttgcctccatcctctgggaaaactgctcccacacaggccttggagtgtgttgtagcactgtggaggaatgcagaaaggatgaaagagatcttgattctcctagtggttctcttcactaccgtaggcatccctcagccattgactcctccttctttctcttgacattcactttcttggccagtcttacatgcttatgagtctactttccaataaatttactcatagtccattaacttcc

SEQ ID NO: 187770 - DNA, 1874 bp, Homo sapiens
  Payload ID: 16956
  Gene Symbol: SRPX
  Gene Name: sushi-repeat containing protein, X-linked
  Uniprot ID: P78539
  ENST ID: ENST00000378533
  CDS Start-End: 108-1502
cccggccttcgcccgcccgctagcacgcagtcccttggtctcttcggtctcctgccgcccccgggaagcgcgctgcgctgccgaggcgagctaagcgcccgctcgccatggggagccccgcacatcggcccgcgctgctgctgctgctgccgcctctgctgctgctgctgctgctgcgcgtcccgcccagccgcagcttcccaggatcgggagactcaccactagaagacgatgaagtcgggtattcacaccctagatataaagataccccgtggtgctcccccatcaaggtgaagtatggggatgtgtactgcagggcccctcaaggaggatactacaaaacagccctgggaaccaggtgcgacattcgctgccagaagggctacgagctgcatggctcttccctactgatctgccagtcaaacaaacgatggtctgacaaggtcatctgcaaacaaaagcgatgtcctacccttgccatgccagcaaatggagggtttaagtgtgtagatggtgcctactttaactcccggtgtgagtattattgttcaccaggatacacgttgaaaggggagcggaccgtcacatgtatggacaacaaggcctggagcggccggccagcctcctgtgtggatatggaacctcctagaatcaagtgcccaagtgtgaaggaacgcattgcagaacccaacaaactgacagtccgggtgtcctgggagacacccgaaggaagagacacagcagatggaattcttactgatgtcattctaaaaggcctccccccaggctccaactttccagaaggagaccacaagatccagtacacagtctatgacagagctgagaataagggcacttgcaaatttcgagttaaagtaagagtcaaacgctgtggcaaactcaatgccccagagaatggttacatgaagtgctccagcgacggtgataattatggagccacctgtgagttctcctgcatcggcggctatgagctccagggtagccctgcccgagtatgtcaatccaacctggcttggtctggcacggagcccacctgtgcagccatgaacgtcaatgtgggtgtcagaacggcagctgcacttctggatcagttttatgagaaaaggagactcctcattgtgtccacacccacagcccgaaacctcctttaccggctccagctaggaatgctgcagcaagcacagtgtggccttgatcttcgacacatcaccgtggtggagctggtgggtgtgttcccgactctcattggcaggataggagcaaagattatgcctccagccctagcgctgcagctcaggctgttgctgcgaatcccactctactccttcagtatggtgctagtggataagcatggcatggacaaagagcgctatgtctccctggtgatgcctgtggccctgttcaacctgattgacacttttcccttgagaaaagaagagatggtcctacaagccgaaatgagccagacctgtaacacctgacatgatggttcctctcttggcaattcctcttcattgtctacatagtgacatgcacacgggaaagccttaaaaatatccttgatgtacagattttatttgtaattttaaaagtctattttattatgagctttctttgcacttaaaaattagcatgctgctttttgtacttggaagtgtttcaaaaaattatatgaccatatttactctttctaactttctttactccatcatggctgcttgattttgtagagaaattagaacccataaccatacacaggctatcaacatgttattcaatgtgacacctaactcttttctattttgttttttaagtaagacttttattaataaaacaaaatgttttggagcaaa

SEQ ID NO: 187771 - DNA, 1725 bp, Homo sapiens
  Payload ID: 16956
  Gene Symbol: SRPX
  Gene Name: sushi-repeat containing protein, X-linked
  Uniprot ID: P78539
  ENST ID: ENST00000432886
  CDS Start-End: 133-1350
agaggcgagaggaggagttttccagcccggccttcgcccgcccgctagcacgcagtcccttggtctcttcggtctcctgccgcccccgggaagcgcgctgcgctgccgaggcgagctaagcgcccgctcgccatggggagccccgcacatcggcccgcgctgctgctgctgctgccgcctctgctgctgctgctgctgctgcgcgtcccgcccagccgcagcttcccaggatcgggagactcaccactagaagacgatgaagtcgggtattcacaccctagatataaagataccccgtggtgctcccccatcaaggtgaagtatggggatgtgtactgcagggcccctcaaggaggatactacaaaacagccctgggaaccaggtgcgacattcgctgccagaagggctacgagctgcatggctcttccctactgatctgccagtcaaacaaacgatggtctgacaaggtcatctgcaaacatatggaacctcctagaatcaagtgcccaagtgtgaaggaacgcattgcagaacccaacaaactgacagtccgggtgtcctgggagacacccgaaggaagagacacagcagatggaattcttactgatgtcattctaaaaggcctccccccaggctccaactttccagaaggagaccacaagatccagtacacagtctatgacagagctgagaataagggcacttgcaaatttcgagttaaagtaagagtcaaacgctgtggcaaactcaatgccccagagaatggttacatgaagtgctccagcgacggtgataattatggagccacctgtgagttctcctgcatcggcggctatgagctccagggtagccctgcccgagtatgtcaatccaacctggcttggtctggcacggagcccacctgtgcagccatgaacgtcaatgtgggtgtcagaacggcagctgcacttctggatcagttttatgagaaaaggagactcctcattgtgtccacacccacagcccgaaacctcctttaccggctccagctaggaatgctgcagcaagcacagtgtggccttgatcttcgacacatcaccgtggtggagctggtgggtgtgttcccgactctcattggcaggataggagcaaagattatgcctccagccctagcgctgcagctcaggctgttgctgcgaatcccactctactccttcagtatggtgctagtggataagcatggcatggacaaagagcgctatgtctccctggtgatgcctgtggccctgttcaacctgattgacacttttcccttgagaaaagaagagatggtcctacaagccgaaatgagccagacctgtaacacctgacatgatggttcctctcttggcaattcctcttcattgtctacatagtgacatgcacacgggaaagccttaaaaatatccttgatgtacagattttatttgtaattttaaaagtctattttattatgagctttctttgcacttaaaaattagcatgctgctttttgtacttggaagtgtttcaaaaaattatatgaccatatttactctttctaactttctttactccatcatggctgcttgattttgtagagaaattagaacccataaccatacacaggctatcaacatgttattcaatgtgacacctaactcttttctattttgttttttaagtaagacttttattaataaaacaaaatgttttggagcaaattt

SEQ ID NO: 187772 - DNA, 1842 bp, Homo sapiens
  Payload ID: 16956
  Gene Symbol: SRPX
  Gene Name: sushi-repeat containing protein, X-linked
  Uniprot ID: P78539
  ENST ID: ENST00000544439
  CDS Start-End: 133-1467
agaggcgagaggaggagttttccagcccggccttcgcccgcccgctagcacgcagtcccttggtctcttcggtctcctgccgcccccgggaagcgcgctgcgctgccgaggcgagctaagcgcccgctcgccatggggagccccgcacatcggcccgcgctgctgctgctgctgccgcctctgctgctgctgctgctgctgcgcgtcccgcccagccgcagcttcccagataccccgtggtgctcccccatcaaggtgaagtatggggatgtgtactgcagggcccctcaaggaggatactacaaaacagccctgggaaccaggtgcgacattcgctgccagaagggctacgagctgcatggctcttccctactgatctgccagtcaaacaaacgatggtctgacaaggtcatctgcaaacaaaagcgatgtcctacccttgccatgccagcaaatggagggtttaagtgtgtagatggtgcctactttaactcccggtgtgagtattattgttcaccaggatacacgttgaaaggggagcggaccgtcacatgtatggacaacaaggcctggagcggccggccagcctcctgtgtggatatggaacctcctagaatcaagtgcccaagtgtgaaggaacgcattgcagaacccaacaaactgacagtccgggtgtcctgggagacacccgaaggaagagacacagcagatggaattcttactgatgtcattctaaaaggcctccccccaggctccaactttccagaaggagaccacaagatccagtacacagtctatgacagagctgagaataagggcacttgcaaatttcgagttaaagtaagagtcaaacgctgtggcaaactcaatgccccagagaatggttacatgaagtgctccagcgacggtgataattatggagccacctgtgagttctcctgcatcggcggctatgagctccagggtagccctgcccgagtatgtcaatccaacctggcttggtctggcacggagcccacctgtgcagccatgaacgtcaatgtgggtgtcagaacggcagctgcacttctggatcagttttatgagaaaaggagactcctcattgtgtccacacccacagcccgaaacctcctttaccggctccagctaggaatgctgcagcaagcacagtgtggccttgatcttcgacacatcaccgtggtggagctggtgggtgtgttcccgactctcattggcaggataggagcaaagattatgcctccagccctagcgctgcagctcaggctgttgctgcgaatcccactctactccttcagtatggtgctagtggataagcatggcatggacaaagagcgctatgtctccctggtgatgcctgtggccctgttcaacctgattgacacttttcccttgagaaaagaagagatggtcctacaagccgaaatgagccagacctgtaacacctgacatgatggttcctctcttggcaattcctcttcattgtctacatagtgacatgcacacgggaaagccttaaaaatatccttgatgtacagattttatttgtaattttaaaagtctattttattatgagctttctttgcacttaaaaattagcatgctgctttttgtacttggaagtgtttcaaaaaattatatgaccatatttactctttctaactttctttactccatcatggctgcttgattttgtagagaaattagaacccataaccatacacaggctatcaacatgttattcaatgtgacacctaactcttttctattttgttttttaagtaagacttttattaataaaacaaaatgttttggagcaaattt

SEQ ID NO: 187773 - DNA, 1780 bp, Homo sapiens
  Payload ID: 16956
  Gene Symbol: SRPX
  Gene Name: sushi-repeat containing protein, X-linked
  Uniprot ID: P78539
  ENST ID: ENST00000538295
  CDS Start-End: 133-1272
agaggcgagaggaggagttttccagcccggccttcgcccgcccgctagcacgcagtcccttggtctcttcggtctcctgccgcccccgggaagcgcgctgcgctgccgaggcgagctaagcgcccgctcgccatggggagccccgcacatcggcccgcgctgctgctgctgctgccgcctctgctgctgctgctgctgctgcgcgtcccgcccagccgcagcttcccaggatcgggagactcaccactagaagacgatgaagtcgggtattcacaccctagatataaagataccccgtggtgctcccccatcaaggtgaagtatggggatgtgtactgcagggcccctcaaggaggatactacaaaacagccctgggaaccaggtgcgacattcgctgccagaagggctacgagctgcatggctcttccctactgatctgccagtcaaacaaacgatggtctgacaaggtcatctgcaaacaaaagcgatgtcctacccttgccatgccagcaaatggagggtttaagtgtgtagatggtgcctactttaactcccggtgtgagtattattgttcaccaggatacacgttgaaaggggagcggaccgtcacatgtatggacaacaaggcctggagcggccggccagcctcctgtgtggatatggaacctcctagaatcaagtgcccaagtgtgaaggaacgcattgcagaacccaacaaactgacagtccgggtgtcctgggagacacccgaaggaagagacacagcagatggaattcttactgatgtcattctaaaaggcctccccccaggctccaactttccagaaggagaccacaagatccagtacacagtctatgacagagctgagaataagggcacttgcaaatttcgagttaaagtaagagtcaaacgctgtggcaaactcaatgccccagagaatggttacatgaagtgctccagcgacggtgataattatggagccacctgtgagttctcctgcatcggcggctatgagctccagggtagccctgcccgagtatgtcaatccaacctggcttggtctggcacggagcccacctgtgcagccatgaacgtcaatgtgggtgtcagaacggcagctgcacttctggatcagttttatgagaaaaggagactcctcattgtgtccacacccacagcccgaaacctcctttaccggctccagctaggaatgctgcaggctgttgctgcgaatcccactctactccttcagtatggtgctagtggataagcatggcatggacaaagagcgctatgtctccctggtgatgcctgtggccctgttcaacctgattgacacttttcccttgagaaaagaagagatggtcctacaagccgaaatgagccagacctgtaacacctgacatgatggttcctctcttggcaattcctcttcattgtctacatagtgacatgcacacgggaaagccttaaaaatatccttgatgtacagattttatttgtaattttaaaagtctattttattatgagctttctttgcacttaaaaattagcatgctgctttttgtacttggaagtgtttcaaaaaattatatgaccatatttactctttctaactttctttactccatcatggctgcttgattttgtagagaaattagaacccataaccatacacaggctatcaacatgttattcaatgtgacacctaactcttttctattttgttttttaagtaagacttttattaataaaacaaaatgttttggagcaaattt

SEQ ID NO: 187774 - DNA, 2138 bp, Homo sapiens
  Payload ID: 16957
  Gene Symbol: SRPX2
  Gene Name: sushi-repeat containing protein, X-linked 2
  Uniprot ID: O60687
  ENST ID: ENST00000373004
  CDS Start-End: 429-1826
agcagacggactgagttcctctaatccctgtgttccttctcccccatctttctaaaacccttctctgagagaggaataactatagcttcagggataatatagctttaaggaaacttttggcagatgtggacgtcgtaacatctgggcagtgttaacagaatcccggaggccgggacagaccaggagccactcgttctaggaatgttaaagtagaaggttttttccaattgatgagaggagcagagaggaaggagaaagaggaggagagagaaaaagggcacaaaataccataaaacagatcccatatttctgcttcccctcacttttagaagttaattgatggctgacttctgaaagtcactttcctttgccctggtacttcaggccatatacatcttttcttgtctccataatcctccctttcaaggatggccagtcagctaactcaaagaggagctctctttctgctgttcttcctaactccggcagtgacaccaacatggtatgcaggttctggctactatccggatgaaagctacaatgaagtatatgcagaggaggtcccacaggctcctgccctggactaccgagtcccccgatggtgttatacattaaatatccaggatggagaagccacatgctactcaccgaagggaggaaattatcacagcagcctgggcacgcgttgtgagctctcctgtgaccggggctttcgattgattggaaggaggtcggtgcaatgcctgccaagccgtcgttggtctggaactgcctactgcaggcagatgagatgccacgcactaccattcatcactagtggcacttacacctgcacaaatggagtgcttcttgactctcgctgtgactacagctgttccagtggctaccacctggaaggtgatcgcagccgaatctgcatggaagatgggagatggagtggaggcgagcctgtatgtgtagacatagatccccccaagatccgctgtccccactcacgtgagaagatggcagagccagagaaattgactgctcgagtatactgggacccaccgttggtgaaagattctgctgatggtaccatcaccagggtgacacttcggggccctgagcctggctctcactttcccgaaggagagcatgtgattcgttacactgcctatgaccgagcctacaaccgggccagctgcaagttcattgtgaaagtacaagtgagacgctgcccaactctgaaacctccgcagcacggctacctcacctgcacctcagcgggggacaactatggtgccacctgtgaataccactgtgatggcggttatgatcgccaggggacaccctcccgggtctgtcagtccagccgccagtggtcaggttcaccaccaatctgtgctcctatgaagattaacgtcaacgtcaactcagctgctggtctcttggatcaattctatgagaaacagcgactcctcatcatctcagctcctgatccttccaaccgatattataaaatgcagatctctatgctacagcaatccacctgtggactggatttgcggcatgtgaccatcattgaactggtgggacagccacctcaggaggtggggcgcatccgggagcaacagctgtcagccaacatcatcgaggagctcaggcaatttcagcgcctcactcgctcctacttcaacatggtgttgattgacaagcagggtattgaccgagaccgctacatggaacctgtcacccccgaggaaatcttcacattcattgatgactacctactgagcaatcaggagttgacccagcgtcgggagcaaagggacatatgcgagtgaacttgagccagggcatggttaaagtcaagggaaaagctcctctagttagctgaaactgggacctaataaaaggaggaaatgttttcccacagttctagggacaggactctgaggtgggtgagtttgacaaatcctgcggtgtttccaggcatccttttaggactgtgtaatagtttccctagaagctaggtagggactgaggacaggccttgggcagtgggttgggggtagaagttcttcctttcctaacccgggcccctgcccagctctccaaagtctttcagaaaagtaaatcctaaattcagtgatgaa

SEQ ID NO: 187775 - DNA, 2484 bp, Homo sapiens
  Payload ID: 16958
  Gene Symbol: SUPV3L1
  Gene Name: SUV3-like helicase
  Uniprot ID: Q8IYB8
  ENST ID: ENST00000359655
  CDS Start-End: 61-2421
gcgtcactgtccgccgccgtgtccgcggctgcgccagacagtgtagaacctgcggcctcgatgtccttctcccgtgccctattgtgggctcggctcccggcggggcgccaggctggccaccgggcagccatctgctctgcccttcgtccccactttgggccctttcccggggttctggggcaagtttctgtccttgccaccgcctcctcctctgcctccggtggctccaaaataccaaacacgtccttgttcgtgcccctgactgtgaaacctcagggccccagcgccgacggcgacgtcggggccgagctaacccggcctctggacaagaatgaagtaaagaaggtcttagacaaattttacaagaggaaagaaattcagaaactgggtgctgattatggacttgatgctcgtctcttccaccaagctttcataagctttagaaattatattatgcagtctcattccctggatgtggacattcacattgttttgaatgatatttgcttcggtgcagctcatgcggatgatttattcccatttttcttgagacatgccaaacaaatatttcctgtgttggactgtaaggatgatctacgtaaaatcagtgacttaagaataccacctaactggtacccagatgctagagccatgcagcggaagataatatttcattcaggccccacaaacagtggaaagacttatcacgcaatccagaaatacttctcagcaaagtctggagtgtattgtggccctctaaaattactggcacatgagatcttcgaaaagagtaatgctgctggtgtgccatgtgacttggtgacaggtgaagagcgtgtgacagttcagccaaatgggaaacaggcttcacatgtttcttgtacagttgagatgtgcagtgttacaactccttatgaagtggctgtaattgatgaaattcaaatgattagagatccagccagaggatgggcctggaccagagcacttctaggactgtgtgctgaagaggttcatttgtgtggagaacctgctgctattgacctggtgatggagcttatgtacacaacgggggaggaagtggaggttcgagactataagaggcttacccccatttctgtgctggaccatgcactagaatctttagataaccttcggcctggggactgcattgtctgttttagcaagaatgatatttattctgtgagtcggcagattgaaattcggggattagaatcagctgttatatatggcagtctcccacctgggaccaaacttgctcaagcaaaaaagtttaatgatcccaatgacccatgcaaaatcttggttgctacagatgcaattggcatgggacttaatttgagcataaggagaattattttttactcccttataaagcccagtatcaatgaaaagggagagagagaactagaaccaatcacaacctctcaagccctgcagattgctggcagagctggcagattcagctcacggtttaaagaaggagaggttacaacaatgaatcatgaagatctcagtttattaaaggaaattttgaagaggcctgtggatcctataagggcagctggtcttcatccaactgctgagcagattgaaatgtttgcctaccatctccctgatgcaacactgtccaatctcattgatatttttgtagacttttcacaagttgatgggcagtattttgtctgcaatatggatgattttaaattttctgcagagttgatccagcatattccactaagtctgcgagtgaggtatgttttctgcacagctcctatcaacaagaagcagccttttgtgtgttcttcactgttacagtttgccaggcagtatagcaggaatgagcccctgacctttgcatggttacgccgatacatcaaatggcctttacttccacctaagaatattaaagacctcatggatcttgaagctgtccacgatgtcttggatctttacttgtggctaagctaccgatttatggatatgtttccagatgccagccttattcgagatctccagaaagaactagatggtattatccaagatggtgtgcacaatatcactaaattgattaaaatgtctgagacgcataagctgttgaatttggagggctttccatcagggagccagtcacgattgtcaggaaccttaaagagccaagctagaaggacacgcggcaccaaagctctagggagtaaagctactgagccacccagccccgatgcaggagagctgtcccttgcttccagattggtgcagcaaggactcctcactccagacatgctgaaacagctagaaaaagagtggatgacacaacaaactgaacacaacaaagaaaaaacagagtctgggactcatccaaaagggacgagaagaaagaagaaggaacctgattcggactagttttctgttcctgtttttttttttttatttaattttgcaaataaaaatttattttgaatcctt

SEQ ID NO: 187776 - DNA, 794 bp, Homo sapiens
  Payload ID: 16958
  Gene Symbol: SUPV3L1
  Gene Name: SUV3-like helicase
  ENST ID: ENST00000422378
  CDS Start-End: 5-794
ctcgatgtccttctcccgtgccctattgtgggctcggctcccggcggggcgccaggctggccaccgggcagccatctgctctgcccttcgtccccactttgggccctttcccggggttctggggcaagtttctgtccttgccaccgcctcctcctctgcctccggtggctccaaaataccaaacacgtccttgttcgtgcccctgactgtgaaacctcagggccccagcgccgacggcgacgtcggggccgagctaacccggcctctggacaagaatgaagtggctgtaattgatgaaattcaaatgattagagatccagccagaggatgggcctggaccagagcacttctaggactgtgtgctgaagaggttcatttgtgtggagaacctgctgctattgacctggtgatggagcttatgtacacaacgggggaggaagtggaggttcgagactataagaggcttacccccatttctgtgctggaccatgcactagaatctttagataaccttcggcctggggactgcattgtctgttttagcaagaatgatatttattctgtgagtcggcagattgaaattcggggattagaatcagctgttatatatggcagtctcccacctgggaccaaacttgctcaagcaaaaaagtttaatgatcccaatgacccatgcaaaatcttggttgctacagatgcaattggcatgggacttaatttgagcataaggagaattattttttactcccttataaagcccagtatcaatgaaaagggagagagagaactagaac

SEQ ID NO: 187777 - DNA, 3636 bp, Homo sapiens
  Payload ID: 16959
  Gene Symbol: SZRD1
  Gene Name: SUZ RNA binding domain containing 1
  Uniprot ID: Q7Z422
  ENST ID: ENST00000401088
  CDS Start-End: 176-634
cttccaagatggctgccctaatgtacacttgggaccttgcctggcgcctcttccgggcttggcagcgggcggggtccattgagtaaagccttgcgtgcctgcgcccgcgacggaggcgcgcttcaaagcgcaggcgcggggagggggtgggggaggagggaaagcggcgagtaagatggaagatgaggaggtcgctgagagctgggaagaggcggcagacagcggggaaatagacagacggttggaaaaaaaactgaagatcacacaaaaagagagcaggaaatccaaatctcctcccaaagtgcccattgtgattcaggacgatagccttcccgcggggccccctccacagatccgcatcctcaagaggcccaccagcaacggtgtggtcagcagccccaactccaccagcaggcccacccttccagtcaagtccctagcacagcgagaggccgagtacgccgaggcccggaagcggatcctgggcagcgccagccccgaggaggagcaggagaaacccatcctcgacaggccaaccaggatctcccaacccgaagacagcaggcagcccaataatgtgatcagacagcctttgggtcctgatgggtctcaaggcttcaaacagcgcagataaatgcaggcaagaaaagatgccgccgttgctgccgtcaccgcctcctgggtcgtccgccacgggttgcactgccgtggcagacagctggacttgagcagagggaacgacctgacttacttgcactgtgatcccccttgctccgcccactgtgaccttgaaccccatgcactgtgacctccccccttctcccccttcccactgtgattggcacatcgacaagggctgtcccaagtcaatggaaagggaaagggtgggggttaggggaaggttggggggacccagcaaggactcagagagtcagacagtgccacttggccacttggggtaaagccagtgccagcaataacagtttatcatgctcattaatttgggatttcaaaacacaaatgaaaactcacacccacccacccccaagtgcatgtctccatcacttaaaaagtaagttccatttgaaaatatcctttcttttttttttcttcctatttttgtttgtttatacaaatatctgatttgcaagaaaaagtgcatgggaggggttttagtggtttaatgaatttttaattaagaaagggtagtttggtagtctacttaaaaatgtttctgggaaattcactagaaacattaaccaataggattttggtgagcttagcttctgtattcctactgccgcccagaaaaggggcagggctctgcagccgccaggacagacgagcaccccatgcctatacctccctccccgagctaagtcccagggcatctgggccttgcctggagactgggctagctctgtaggctcggagagcctggggagggtgccaaccccacctctagtattttgggagatagggaaagtgaaccgacttccccttcccatacccctcagggtggttccctaccagccaggcttactacttctagaagaaagcagagtgccagggagtgagattgcatccctgggcttagaagtgacggagagaagacttgtttagtattttgccatcagcacaaggaaaaccaggagagagtctgcctccaggactctgagccttctgcctcgtatgttcagaaggtggataggtcttcccactccagcatggcttgaactcttaggggtctgcagtgctccatctccattggtggccccagctcagtaactatacctggtacatttcctgtgtgcaatcagtaccttgaaggcagaacattctgaataaagttggaaaaagaacagctttgctttgcaaagattgatgacagactggttcctcagaggcctaggctacccgtcacccctttttccagagcgagggcctggaatgaaggcagtttatcctctgtccctggagcctggggtttgctttggctccttgaggtggaagagactaagagggcagctgcccagagcagctgtgtgtacctggctcctctcaggcttcctgatcccttccgttgcactgcgccttatccctcagccagccagacagcctccctgctcctgaccagcagatacgtttcggagtggttggtgtggtttttgtgatgagggcagcacgtggtggccaaggtggcaagctgagtctcacaggctcactccctcgttggttccctgtgggaatggtaggccaggcccagtaagccatgccccaacacgtcctctcctccggaggaagggccagctgccagctgagtcagcagctagtccatagcacagccttataactgtaaagccaggcattgcccatgagcagagctggaaccagagcttcagtcagtaagagggaggattaccttcaggagaaggcaaggaagaaaactggctgctatctttatagttccactgccctaaccaagtgtccacattctaaatgtgtagtgtccatcccttatgtaatagtggtttcccgcccaaagtgagactttccttttaattggagaagggtatagaggtagtccaggtgggaacgccagaagtgctgattgcccagccattgggaccacctgttcttgccccactaccctctagtgggaggccaaagtaaaggctggctggtgggtgtctgtggattgaggatgtggcagggactggtcctcccacctccctctggccaaagatgggctttgcccgctgtgtgcctgtcaccacccaccagcagtcatgccctgggcttcccaaatggagaggtagcaggcaacgtttttaaaaagaaagaaaacaggaaactgtattgtgtcgggggaggcgggagggagatgaggaaacggtttggattttgtgtgtgggagggtattttttgggggtagttgtctgtaactttcctaagtgctttttttccttttcttttttaaagtaagttgcaggctttggcttggaaaaccccagggggatggggggcagaaacctgaggctgctgcccctttatctgccttcacggtactgtccccttcccccagctcctccctgaccccatgggccaggcctcagaccttccagctaaccgcttcccatgagccactactctgatgtcagcctataaccaaaggagctggggggtccaggcctggtgaccaacctttctcagcccactcaatcagggtgctccccacctgcaggcaggaggcaacaccctatctgctaccatcagccccttccagagcccatctgccccgcccagccctgccctgcccagccataccctgctctgccccatctgggggtgccctgctcagggatgggctggcagggctgtacccagcctccctggtaagcagagactcaagaaacctctggggtcctgttttctggtcgtgtgatcccaggggtgcacatgggccccttgggtgtctgaacagaagggcatgggagggagggctgcacccctgcagtcttactctgctggtgtagcgggcagctgcccactcccaccccaccctgcaccgcgggctcctgagtcggcagattaagcattttataaattgtattttaaatacatgttttaaacttg

SEQ ID NO: 187778 - DNA, 3447 bp, Homo sapiens
  Payload ID: 16959
  Gene Symbol: SZRD1
  Gene Name: SUZ RNA binding domain containing 1
  Uniprot ID: Q7Z422
  ENST ID: ENST00000401089
  CDS Start-End: 41-442
gggggtgggggaggagggaaagcggcgagtaagatggaagatgaggaggtcgctgagagctgggaagaggcggcagacagcgggcaggaaatccaaatctcctcccaaagtgcccattgtgattcaggacgatagccttcccgcggggccccctccacagatccgcatcctcaagaggcccaccagcaacggtgtggtcagcagccccaactccaccagcaggcccacccttccagtcaagtccctagcacagcgagaggccgagtacgccgaggcccggaagcggatcctgggcagcgccagccccgaggaggagcaggagaaacccatcctcgacaggccaaccaggatctcccaacccgaagacagcaggcagcccaataatgtgatcagacagcctttgggtcctgatgggtctcaaggcttcaaacagcgcagataaatgcaggcaagaaaagatgccgccgttgctgccgtcaccgcctcctgggtcgtccgccacgggttgcactgccgtggcagacagctggacttgagcagagggaacgacctgacttacttgcactgtgatcccccttgctccgcccactgtgaccttgaaccccatgcactgtgacctccccccttctcccccttcccactgtgattggcacatcgacaagggctgtcccaagtcaatggaaagggaaagggtgggggttaggggaaggttggggggacccagcaaggactcagagagtcagacagtgccacttggccacttggggtaaagccagtgccagcaataacagtttatcatgctcattaatttgggatttcaaaacacaaatgaaaactcacacccacccacccccaagtgcatgtctccatcacttaaaaagtaagttccatttgaaaatatcctttcttttttttttcttcctatttttgtttgtttatacaaatatctgatttgcaagaaaaagtgcatgggaggggttttagtggtttaatgaatttttaattaagaaagggtagtttggtagtctacttaaaaatgtttctgggaaattcactagaaacattaaccaataggattttggtgagcttagcttctgtattcctactgccgcccagaaaaggggcagggctctgcagccgccaggacagacgagcaccccatgcctatacctccctccccgagctaagtcccagggcatctgggccttgcctggagactgggctagctctgtaggctcggagagcctggggagggtgccaaccccacctctagtattttgggagatagggaaagtgaaccgacttccccttcccatacccctcagggtggttccctaccagccaggcttactacttctagaagaaagcagagtgccagggagtgagattgcatccctgggcttagaagtgacggagagaagacttgtttagtattttgccatcagcacaaggaaaaccaggagagagtctgcctccaggactctgagccttctgcctcgtatgttcagaaggtggataggtcttcccactccagcatggcttgaactcttaggggtctgcagtgctccatctccattggtggccccagctcagtaactatacctggtacatttcctgtgtgcaatcagtaccttgaaggcagaacattctgaataaagttggaaaaagaacagctttgctttgcaaagattgatgacagactggttcctcagaggcctaggctacccgtcacccctttttccagagcgagggcctggaatgaaggcagtttatcctctgtccctggagcctggggtttgctttggctccttgaggtggaagagactaagagggcagctgcccagagcagctgtgtgtacctggctcctctcaggcttcctgatcccttccgttgcactgcgccttatccctcagccagccagacagcctccctgctcctgaccagcagatacgtttcggagtggttggtgtggtttttgtgatgagggcagcacgtggtggccaaggtggcaagctgagtctcacaggctcactccctcgttggttccctgtgggaatggtaggccaggcccagtaagccatgccccaacacgtcctctcctccggaggaagggccagctgccagctgagtcagcagctagtccatagcacagccttataactgtaaagccaggcattgcccatgagcagagctggaaccagagcttcagtcagtaagagggaggattaccttcaggagaaggcaaggaagaaaactggctgctatctttatagttccactgccctaaccaagtgtccacattctaaatgtgtagtgtccatcccttatgtaatagtggtttcccgcccaaagtgagactttccttttaattggagaagggtatagaggtagtccaggtgggaacgccagaagtgctgattgcccagccattgggaccacctgttcttgccccactaccctctagtgggaggccaaagtaaaggctggctggtgggtgtctgtggattgaggatgtggcagggactggtcctcccacctccctctggccaaagatgggctttgcccgctgtgtgcctgtcaccacccaccagcagtcatgccctgggcttcccaaatggagaggtagcaggcaacgtttttaaaaagaaagaaaacaggaaactgtattgtgtcgggggaggcgggagggagatgaggaaacggtttggattttgtgtgtgggagggtattttttgggggtagttgtctgtaactttcctaagtgctttttttccttttcttttttaaagtaagttgcaggctttggcttggaaaaccccagggggatggggggcagaaacctgaggctgctgcccctttatctgccttcacggtactgtccccttcccccagctcctccctgaccccatgggccaggcctcagaccttccagctaaccgcttcccatgagccactactctgatgtcagcctataaccaaaggagctggggggtccaggcctggtgaccaacctttctcagcccactcaatcagggtgctccccacctgcaggcaggaggcaacaccctatctgctaccatcagccccttccagagcccatctgccccgcccagccctgccctgcccagccataccctgctctgccccatctgggggtgccctgctcagggatgggctggcagggctgtacccagcctccctggtaagcagagactcaagaaacctctggggtcctgttttctggtcgtgtgatcccaggggtgcacatgggccccttgggtgtctgaacagaagggcatgggagggagggctgcacccctgcagtcttactctgctggtgtagcgggcagctgcccactcccaccccaccctgcaccgcgggctcctgagtcggcagattaagcattttataaattgtattttaaatacatgttttaaacttgtca

SEQ ID NO: 187779 - DNA, 3401 bp, Homo sapiens
  Payload ID: 16959
  Gene Symbol: SZRD1
  Gene Name: SUZ RNA binding domain containing 1
  Uniprot ID: Q7Z422
  ENST ID: ENST00000492354
  CDS Start-End: 1-399
atgaggaggtcgctgagagctgggaagaggcggcagacagcggggaaatccaaatctcctcccaaagtgcccattgtgattcaggacgatagccttcccgcggggccccctccacagatccgcatcctcaagaggcccaccagcaacggtgtggtcagcagccccaactccaccagcaggcccacccttccagtcaagtccctagcacagcgagaggccgagtacgccgaggcccggaagcggatcctgggcagcgccagccccgaggaggagcaggagaaacccatcctcgacaggccaaccaggatctcccaacccgaagacagcaggcagcccaataatgtgatcagacagcctttgggtcctgatgggtctcaaggcttcaaacagcgcagataaatgcaggcaagaaaagatgccgccgttgctgccgtcaccgcctcctgggtcgtccgccacgggttgcactgccgtggcagacagctggacttgagcagagggaacgacctgacttacttgcactgtgatcccccttgctccgcccactgtgaccttgaaccccatgcactgtgacctccccccttctcccccttcccactgtgattggcacatcgacaagggctgtcccaagtcaatggaaagggaaagggtgggggttaggggaaggttggggggacccagcaaggactcagagagtcagacagtgccacttggccacttggggtaaagccagtgccagcaataacagtttatcatgctcattaatttgggatttcaaaacacaaatgaaaactcacacccacccacccccaagtgcatgtctccatcacttaaaaagtaagttccatttgaaaatatcctttcttttttttttcttcctatttttgtttgtttatacaaatatctgatttgcaagaaaaagtgcatgggaggggttttagtggtttaatgaatttttaattaagaaagggtagtttggtagtctacttaaaaatgtttctgggaaattcactagaaacattaaccaataggattttggtgagcttagcttctgtattcctactgccgcccagaaaaggggcagggctctgcagccgccaggacagacgagcaccccatgcctatacctccctccccgagctaagtcccagggcatctgggccttgcctggagactgggctagctctgtaggctcggagagcctggggagggtgccaaccccacctctagtattttgggagatagggaaagtgaaccgacttccccttcccatacccctcagggtggttccctaccagccaggcttactacttctagaagaaagcagagtgccagggagtgagattgcatccctgggcttagaagtgacggagagaagacttgtttagtattttgccatcagcacaaggaaaaccaggagagagtctgcctccaggactctgagccttctgcctcgtatgttcagaaggtggataggtcttcccactccagcatggcttgaactcttaggggtctgcagtgctccatctccattggtggccccagctcagtaactatacctggtacatttcctgtgtgcaatcagtaccttgaaggcagaacattctgaataaagttggaaaaagaacagctttgctttgcaaagattgatgacagactggttcctcagaggcctaggctacccgtcacccctttttccagagcgagggcctggaatgaaggcagtttatcctctgtccctggagcctggggtttgctttggctccttgaggtggaagagactaagagggcagctgcccagagcagctgtgtgtacctggctcctctcaggcttcctgatcccttccgttgcactgcgccttatccctcagccagccagacagcctccctgctcctgaccagcagatacgtttcggagtggttggtgtggtttttgtgatgagggcagcacgtggtggccaaggtggcaagctgagtctcacaggctcactccctcgttggttccctgtgggaatggtaggccaggcccagtaagccatgccccaacacgtcctctcctccggaggaagggccagctgccagctgagtcagcagctagtccatagcacagccttataactgtaaagccaggcattgcccatgagcagagctggaaccagagcttcagtcagtaagagggaggattaccttcaggagaaggcaaggaagaaaactggctgctatctttatagttccactgccctaaccaagtgtccacattctaaatgtgtagtgtccatcccttatgtaatagtggtttcccgcccaaagtgagactttccttttaattggagaagggtatagaggtagtccaggtgggaacgccagaagtgctgattgcccagccattgggaccacctgttcttgccccactaccctctagtgggaggccaaagtaaaggctggctggtgggtgtctgtggattgaggatgtggcagggactggtcctcccacctccctctggccaaagatgggctttgcccgctgtgtgcctgtcaccacccaccagcagtcatgccctgggcttcccaaatggagaggtagcaggcaacgtttttaaaaagaaagaaaacaggaaactgtattgtgtcgggggaggcgggagggagatgaggaaacggtttggattttgtgtgtgggagggtattttttgggggtagttgtctgtaactttcctaagtgctttttttccttttcttttttaaagtaagttgcaggctttggcttggaaaaccccagggggatggggggcagaaacctgaggctgctgcccctttatctgccttcacggtactgtccccttcccccagctcctccctgaccccatgggccaggcctcagaccttccagctaaccgcttcccatgagccactactctgatgtcagcctataaccaaaggagctggggggtccaggcctggtgaccaacctttctcagcccactcaatcagggtgctccccacctgcaggcaggaggcaacaccctatctgctaccatcagccccttccagagcccatctgccccgcccagccctgccctgcccagccataccctgctctgccccatctgggggtgccctgctcagggatgggctggcagggctgtacccagcctccctggtaagcagagactcaagaaacctctggggtcctgttttctggtcgtgtgatcccaggggtgcacatgggccccttgggtgtctgaacagaagggcatgggagggagggctgcacccctgcagtcttactctgctggtgtagcgggcagctgcccactcccaccccaccctgcaccgcgggctcctgagtcggcagattaagcattttataaattgtattttaaatacatgttttaaacttg

SEQ ID NO: 187780 - DNA, 892 bp, Homo sapiens
  Payload ID: 16959
  Gene Symbol: SZRD1
  Gene Name: SUZ RNA binding domain containing 1
  Uniprot ID: Q7Z422
  ENST ID: ENST00000471507
  CDS Start-End: 171-626
aagatggctgccctaatgtacacttgggaccttgcctggcgcctcttccgggcttggcagcgggcggggtccattgagtaaagccttgcgtgcctgcgcccgcgacggaggcgcgcttcaaagcgcaggcgcggggagggggtgggggaggagggaaagcggcgagtaagatggaagatgaggaggtcgctgagagctgggaagaggcggcagacagcggggaaatagacagacggttggaaaaaaaactgaagatcacacaaaaagagaggaaatccaaatctcctcccaaagtgcccattgtgattcaggacgatagccttcccgcggggccccctccacagatccgcatcctcaagaggcccaccagcaacggtgtggtcagcagccccaactccaccagcaggcccacccttccagtcaagtccctagcacagcgagaggccgagtacgccgaggcccggaagcggatcctgggcagcgccagccccgaggaggagcaggagaaacccatcctcgacaggccaaccaggatctcccaacccgaagacagcaggcagcccaataatgtgatcagacagcctttgggtcctgatgggtctcaaggcttcaaacagcgcagataaatgcaggcaagaaaagatgccgccgttgctgccgtcaccgcctcctgggtcgtccgccacgggttgcactgccgtggcagacagctggacttgagcagagggaacgacctgacttacttgcactgtgatcccccttgctccgcccactgtgaccttgaaccccatgcactgtgacctccccccttctcccccttcccactgtgattggcacatcgacaagggctgtcccaagtcaatggaaagggaaagggtgggggttaggggaa

SEQ ID NO: 187781 - DNA, 567 bp, Homo sapiens
  Payload ID: 16959
  Gene Symbol: SZRD1
  Gene Name: SUZ RNA binding domain containing 1
  ENST ID: ENST00000476423
  CDS Start-End: 23-277
aaagcggcgagtaagatggaagatgaggaggtcgctgagagctgggaagaggcggcagacagcgggatctggccctgtctgccaaagcttgttggccgtcattaggcagggcaagtgctctttggtgccctgcagccccttcacttccccaggtatgctccgtgcgagtggagtttggctgcttgcctggtctatgaaggcatttggtctcaaccctcaaaggcttctaaattctacagctgtcaaggctctgtttatgatggagaaactcgaataggcagtcttgtatttagagtggagcgaaatgatacagtatgaaactttaaaacaagaagttacttgtgagaagcccttaaaaggaaatagacagacggttggaaaaaaaactgaagatcacacaaaaagagagcaggaaatccaaatctcctcccaaagtgcccattgtgattcaggacgatagccttcccgcggggccccctccacagatccgcatcctcaagaggcccaccagcaacggtgtggtcagcagccccaactccaccagcaggcccacccttccagtcaagt

SEQ ID NO: 187782 - DNA, 4491 bp, Homo sapiens
  Payload ID: 16960
  Gene Symbol: SUZ12
  Gene Name: SUZ12 polycomb repressive complex 2 subunit
  Uniprot ID: Q15022
  ENST ID: ENST00000322652
  CDS Start-End: 230-2449
agggtagggtgagcggcctccgaagcggagcggggctctgaggagacactttttttttcctccctccttccctcctctcctcctcccttcccttcccctctcctcccctctctcctccttcccccctcggtccgccggagcctgctggggcgagcggttggtattgcaggcgcttgctctccggggccgcccggcgggtagctggcggggggaggaggcaggaaccgcgatggcgcctcagaagcacggcggtgggggagggggcggctcggggcccagcgcggggtccgggggaggcggcttcgggggttcggcggcggtggcggcggcgacggcttcgggcggcaaatccggcggcgggagctgtggagggggtggcagttactcggcctcctcctcctcctccgcggcggcagcggcgggggctgcggtgttaccggtgaagaagccgaaaatggagcacgtccaggctgaccacgagcttttcctccaggcctttgagaagccaacacagatctatagatttcttcgaactcggaatctcatagcaccaatatttttgcacagaactcttacttacatgtctcatcgaaactccagaacaaacatcaaaaggaaaacatttaaagttgatgatatgttatcaaaagtagagaaaatgaaaggagagcaagaatctcatagcttgtcagctcatttgcagcttacgtttactggtttcttccacaaaaatgataagccatcaccaaactcagaaaatgaacaaaattctgttaccctggaagtcctgcttgtgaaagtttgccacaaaaaaagaaaggatgtaagttgtccaataaggcaagttcccacaggtaaaaagcaggtgcctttgaatcctgacctcaatcaaacaaaacccggaaatttcccgtcccttgcagtttccagtaatgaatttgaacctagtaacagccatatggtgaagtcttactcgttgctatttagagtgactcgtccaggaagaagagagtttaatggaatgattaatggagaaaccaatgaaaatattgatgtcaatgaagagcttccagccagaagaaaacgaaatcgtgaggatggggaaaagacatttgttgcacaaatgacagtatttgataaaaacaggcgcttacagcttttagatggggaatatgaagtagccatgcaggaaatggaagaatgtccaataagcaagaaaagagcaacatgggagactattcttgatgggaagaggctgcctccattcgaaacattttctcagggacctacgttgcagttcactcttcgttggacaggagagaccaatgataaatctacggctcctattgccaaacctcttgccactagaaattcagagagtctccatcaggaaaacaagcctggttcagttaaacctactcaaactattgctgttaaagaatcattgactacagatctacaaacaagaaaagaaaaggatactccaaatgaaaaccgacaaaaattaagaatattttatcagtttctctataacaacaatacaaggcaacaaactgaagcaagagatgacctgcattgcccttggtgtactctgaactgccgcaaactttatagtttactcaagcatcttaaactctgccatagcagatttatcttcaactatgtttatcatccaaaaggtgctaggatagatgtttctatcaatgagtgttatgatggctcctatgcaggaaatcctcaggatattcatcgccaacctggatttgcttttagtcgcaacggaccagttaagagaacacctatcacacatattcttgtgtgcaggccaaaacgaacaaaagcaagcatgtctgaatttcttgaatctgaagatggggaagtagaacagcaaagaacatatagtagtggccacaatcgtctgtatttccatagtgatacctgcttacctctccgtccacaagaaatggaagtagatagtgaagatgaaaaggatcctgaatggctaagagaaaaaaccattacacaaattgaagagttttctgatgttaatgaaggagagaaagaagtgatgaaactctggaatctccatgtcatgaagcatgggtttattgctgacaatcaaatgaatcatgcctgtatgctgtttgtagaaaattatggacagaaaataattaagaagaatttatgtcgaaacttcatgcttcatctagtcagcatgcatgactttaatcttattagcataatgtcaatagataaagctgttaccaagctccgtgaaatgcagcaaaaattagaaaagggggaatctgcttcccctgcaaacgaagaaataactgaagaacaaaatgggacagcaaatggatttagtgaaattaactcaaaagagaaagctttggaaacagatagtgtctcaggggtttcaaaacagagcaaaaaacaaaaactctgaaaagctctaaccccatgttatggacaaacactgaaattacattttagggaattcatcctctaagaattatgtttttgtttttaatcatatgttccaaacaggcactgttagatgaagtaaatgatttcaacaaggatatttgtatcagggttctacttcacttcattatgcagcattacatgtatatcacttttattgatgtcattaaaacattctgtactttaagcatgaaaagcaatatttcaaagtatttttaaactcaacaaatgtcatcaaatatgttgaattgatctagaaattatttcatatataaatcagaatttttttgcatttatgaacggctgtttttctactttgtaattgtgagacattttcttggggagggaaaattggaatggttcccttttttagaaattgaagtggtcttcatatgtcaactacagaaaaggaaaaaaatagaaattgaaggatttttatgaaattatattgcattactatttgcagtcaaactttgatccttgtttttgaaatcatttgtcaattcggaatgaaaaattataatgtaattttacattacataagttccttttacaattaaaaaatagcacttcttcatcttatgcctgtttgagaagatattaaattttcacattgttgacagtgaaatgctatgttggtttataagattacagaccatttgttttcatgtggataattttagtgcattgctcacccggtatgttttttttttttaacttgaacattttgcttgttttgtttttcttttttaattagataatcacacggaaaattaagctgttcatatctttaaattaggattgcaaaccaaggaaagaacgcatttgagattttaagatgtcacttataaggggagaagtgttcttaaaaagtcaaccagaaaactgttatgccttttatttgtttgcaaggatgtctttgtaatgtgtttcatgaatagaatatccaatagagataagctgacttgaatcattttgagcaattttgccctgtgttatatgtgtttcacgcacatatttgcagttggattttctccaacagaaagtggattcactactggcacattaacaagcaccaataggtttttattccaactccgagcactgtggttgagtaacatcacctcaattttttattatccttaaagatattgcattttcatattctttatttataaaggatcaatgctgctgtaaatacaggtatttttaattttaaaatttcattccaccaccatcagatgcagttccctattttgtttaatgaagggatatataagctttctaatggtgtcttcagaaatttataaaatgtaaatactgatttgactggtctttaagatgtgtttaactgtgaggctatttaacgaatagtgtggatgtgatttgtcatccagtattaagttcttagtcattgatttttgtgtttaaaaaaaaataggaaagagggaaactgcagctttcattacagattccttgattggtaagctctccaaatgatgagttctagtaaactctgatttttgcctctggatagtagatctcgagcgtttatctcgggctttaatttgctaaagctgtgcacatatgtaaaaaaaaaaaaaaaaagattattttaggggagatgtaggtgtagaattattgcttatgtcatttcttaagcagttatgctcttaatgcttaaaagaaggctagcattgtttgcacaaaaagttggtgattcccaccccaaatagtaataaaattacttctgttgagtaaactttttatgtcatcgtaaaagctgaaaaaatccctttgtttctatttataaaaaaagtgcttttctatatgtacccttgataacagattttgaagaaatcctgtaagatgataaagcatttgaatggtacagtagatgtaaaaaaaattcagtttaaaagaacatttgtttttacattaaatgtttatttgaaatcaaatgattttgtacataaagttcaataatataaaagctgtattctg

SEQ ID NO: 187783 - DNA, 3977 bp, Homo sapiens
  Payload ID: 16960
  Gene Symbol: SUZ12
  Gene Name: SUZ12 polycomb repressive complex 2 subunit
  ENST ID: ENST00000580398
  CDS Start-End: 181-2331
tttttttttcctccctccttccctcctctcctcctcccttcccttcccctctcctcccctctctcctccttcccccctcggtccgccggagcctgctggggcgagcggttggtattgcaggcgcttgctctccggggccgcccggcgggtagctggcggggggaggaggcaggaaccgcgatggcgcctcagaagcacggcggtgggggagggggcggctcggggcccagcgcggggtccgggggaggcggcttcgggggttcggcggcggtggcggcggcgacggcttcgggcggcaaatccggcggcgggagctgtggagggggtggcagttactcggcctcctcctcctcctccgcggcggcagcggcgggggctgcggtgttaccggtgaagaagccgaaaatggagcacgtccaggctgaccacgagcttttcctccaggcctttgagaagccaacacagatctatagatttcttcgaactcggaatctcatagcaccaatatttttgcacagaactcttacttacatgtctcatcgaaactccagaacaaacatcaaaagcttgtcagctcatttgcagcttacgtttactggtttcttccacaaaaatgataagccatcaccaaactcagaaaatgaacaaaattctgttaccctggaagtcctgcttgtgaaagtttgccacaaaaaaagaaaggatgtaagttgtccaataaggcaagttcccacaggtaaaaagcaggtgcctttgaatcctgacctcaatcaaacaaaacccggaaatttcccgtcccttgcagtttccagtaatgaatttgaacctagtaacagccatatggtgaagtcttactcgttgctatttagagtgactcgtccaggaagaagagagtttaatggaatgattaatggagaaaccaatgaaaatattgatgtcaatgaagagcttccagccagaagaaaacgaaatcgtgaggatggggaaaagacatttgttgcacaaatgacagtatttgataaaaacaggcgcttacagcttttagatggggaatatgaagtagccatgcaggaaatggaagaatgtccaataagcaagaaaagagcaacatgggagactattcttgatgggaagaggctgcctccattcgaaacattttctcagggacctacgttgcagttcactcttcgttggacaggagagaccaatgataaatctacggctcctattgccaaacctcttgccactagaaattcagagagtctccatcaggaaaacaagcctggttcagttaaacctactcaaactattgctgttaaagaatcattgactacagatctacaaacaagaaaagaaaaggatactccaaatgaaaaccgacaaaaattaagaatattttatcagtttctctataacaacaatacaaggcaacaaactgaagcaagagatgacctgcattgcccttggtgtactctgaactgccgcaaactttatagtttactcaagcatcttaaactctgccatagcagatttatcttcaactatgtttatcatccaaaaggtgctaggatagatgtttctatcaatgagtgttatgatggctcctatgcaggaaatcctcaggatattcatcgccaacctggatttgcttttagtcgcaacggaccagttaagagaacacctatcacacatattcttgtgtgcaggccaaaacgaacaaaagcaagcatgtctgaatttcttgaatctgaagatggggaagtagaacagcaaagaacatatagtagtggccacaatcgtctgtatttccatagtgatacctgcttacctctccgtccacaagaaatggaagtagatagtgaagatgaaaaggatcctgaatggctaagagaaaaaaccattacacaaattgaagagttttctgatgttaatgaaggagagaaagaagtgatgaaactctggaatctccatgtcatgaagcatgggtttattgctgacaatcaaatgaatcatgcctgtatgctgtttgtagaaaattatggacagaaaataattaagaagaatttatgtcgaaacttcatgcttcatctagtcagcatgcatgactttaatcttattagcataatgtcaatagataaagctgttaccaagctccgtgaaatgcagcaaaaattagaaaagggggaatctgcttcccctgcaaacgaagaaataactgaagaacaaaatgggacagcaaatggatttagtgaaattaactcaaaagagaaagctttggaaacagatagtgtctcaggggtttcaaaacagagcaaaaaacaaaaactctgaaaagctctaaccccatgttatggacaaacactgaaattacattttagggaattcatcctctaagaattatgtttttgtttttaatcatatgttccaaacaggcactgttagatgaagtaaatgatttcaacaaggatatttgtatcagggttctacttcacttcattatgcagcattacatgtatatcacttttattgatgtcattaaaacattctgtactttaagcatgaaaagcaatatttcaaagtatttttaaactcaacaaatgtcatcaaatatgttgaattgatctagaaattatttcatatataaatcagaatttttttgcatttatgaacggctgtttttctactttgtaattgtgagacattttcttggggagggaaaattggaatggttcccttttttagaaattgaagtggtcttcatatgtcaactacagaaaaggaaaaaaatagaaattgaaggatttttatgaaattatattgcattactatttgcagtcaaactttgatccttgtttttgaaatcatttgtcaattcggaatgaaaaattataatgtaattttacattacataagttccttttacaattaaaaaatagcacttcttcatcttatgcctgtttgagaagatattaaattttcacattgttgacagtgaaatgctatgttggtttataagattacagaccatttgttttcatgtggataattttagtgcattgctcacccggtatgttttttttttttaacttgaacattttgcttgttttgtttttcttttttaattagataatcacacggaaaattaagctgttcatatctttaaattaggattgcaaaccaaggaaagaacgcatttgagattttaagatgtcacttataaggggagaagtgttcttaaaaagtcaaccagaaaactgttatgccttttatttgtttgcaaggatgtctttgtaatgtgtttcatgaatagaatatccaatagagataagctgacttgaatcattttgagcaattttgccctgtgttatatgtgtttcacgcacatatttgcagttggattttctccaacagaaagtggattcactactggcacattaacaagcaccaataggtttttattccaactccgagcactgtggttgagtaacatcacctcaattttttattatccttaaagatattgcattttcatattctttatttataaaggatcaatgctgctgtaaatacaggtatttttaattttaaaatttcattccaccaccatcagatgcagttccctattttgtttaatgaagggatatataagctttctaatggtgtcttcagaaatttataaaatgtaaatactgatttgactggtctttaagatgtgtttaactgtgaggctatttaacgaatagtgtggatgtgatttgtcatccagtattaagttcttagtcattgatttttgtgtttaaaaaaaaataggaaagagggaaactgcagctttcattacagattccttgattggtaagctctccaaatgatgagttctagtaaactctgatttttgcctctggatagtagatctcgagcgtttatctcgggctttaatttgctaaagctgtgcacatatgtaaaaaaaaaaaaaaaaa

SEQ ID NO: 187784 - DNA, 639 bp, Homo sapiens
  Payload ID: 16961
  Gene Symbol: SVOP
  Gene Name: SV2 related protein
  ENST ID: ENST00000546618
  CDS Start-End: 173-639
ggctttgtctcgtgggctggtccccagcggctccctccccgaacagctgctgctccagggaggaagcggcgcgggtgctgtccagcttcccggtgctgaaaaccggagggctcgtcatccaccactaccatgtaagggccatgagaagggctcatcctggcgcagcgcggacatggaggaggacttattccagctaaggcagctgccggttgtgaaattccgtcgcacaggcgagagtgcaaggtcagaggacgacacggcttcaggagagcatgaagtccagattgaaggggtccacgtgggcctagaggctgtggagctggatgatggggcagctgtgcccaaggagtttgccaatcccactgatgatactttcatggtggaagatgcagtggaagccattggctttggaaaatttcagtggaagctgtctgttctcactggcttggcttgggtggtctttgtaggcatgatgtccagctccacgctctggggaaatatctcagaccagtacggcaggaaaacagggctgaagatcagcgtgctgtggactctgtactatggcatccttagtgcatttgcgcccgtgtatagctggatcctggtgctccggggcctggtgggcttcgggatcggagg

SEQ ID NO: 187785 - DNA, 695 bp, Homo sapiens
  Payload ID: 16961
  Gene Symbol: SVOP
  Gene Name: SV2 related protein
  ENST ID: ENST00000550436
  CDS Start-End: 156-470
tggtccccagcggctccctccccgaacagctgctgctccagggaggaagcggcgcgggtgctgtccagcttcccggtgctgaaaaccggagggctcgtcatccaccactaccatgtaagggccatgagaagggctcatcctggcgcagcgcggacatggaggaggacttattccagctaaggcagctgccggttgtgaaattccgtcgcacaggcgagagtgcaaggtcagaggacgacacggcttcaggagagcatgaagtccagattgaaggggtccacgtgggcctagaggctgtggagctggatgatggggcagctgtgcccaaggagtttgccaatcccactgatggtggtctttgtaggcatgatgtccagctccacgctctggggaaatatctcagaccagtacggcaggaaaacagggctgaagatcagcgtgctgtggactctgtactatggcatccttagtgcatttgcgcccgtgtatagctggatcctggtgctccggggcctggtgggcttcgggatcggaggagttccccagtcggtgacgctgtatgccgagttccttcccatgaaagccagagctaaatgtattttgctgattgaggtattctgggccatcgggacagtgttcgaggtcgtcctggctgtgttcgtgatgcccagcctgggctggcgttggctgctcat

SEQ ID NO: 187786 - DNA, 6813 bp, Homo sapiens
  Payload ID: 16961
  Gene Symbol: SVOP
  Gene Name: SV2 related protein
  Uniprot ID: Q8N4V2
  ENST ID: ENST00000610966
  CDS Start-End: 373-2019
aaagggtgctcactggtacccggacaaccatttcacagactggtgtgccctataggcatcccagtgatacaccatcagccagagagcctgtgaactcttccaagcagaagggctctccctgccccctctccccgcgcagctcgctctgccctccgcctcctcttctccgcccactctcgccgcggtctcctggcggcggaggctttgtctcgtgggctggtccccagcggctccctccccgaacagctgctgctccagggaggaagcggcgcgggtgctgtccagcttcccggtgctgaaaaccggagggctcgtcatccaccactaccatgtaagggccatgagaagggctcatcctggcgcagcgcggacatggaggaggacttattccagctaaggcagctgccggttgtgaaattccgtcgcacaggcgagagtgcaaggtcagaggacgacacggcttcaggagagcatgaagtccagattgaaggggtccacgtgggcctagaggctgtggagctggatgatggggcagctgtgcccaaggagtttgccaatcccactgatgatactttcatggtggaagatgcagtggaagccattggctttggaaaatttcagtggaagctgtctgttctcactggcttggcttggatggctgatgccatggagatgatgatcctcagcatcctggcaccacagctgcattgcgagtggaggctcccaagctggcaggtggcattgctgacctcggtggtctttgtaggcatgatgtccagctccacgctctggggaaatatctcagaccagtacggcaggaaaacagggctgaagatcagcgtgctgtggactctgtactatggcatccttagtgcatttgcgcccgtgtatagctggatcctggtgctccggggcctggtgggcttcgggatcggaggagttccccagtcggtgacgctgtatgccgagttccttcccatgaaagccagagctaaatgtattttgctgattgaggtattctgggccatcgggacagtgttcgaggtcgtcctggctgtgttcgtgatgcccagcctgggctggcgttggctgctcatcctctcagctgtcccgctcctcctctttgccgtgctgtgtttctggctgcctgaaagtgcaaggtatgatgtgctgtcagggaaccaggaaaaggcaatcgccaccttaaagaggatagcaactgaaaacggagctcccatgccgctggggaaactcatcatctccagacaggaagaccgaggcaaaatgagggaccttttcacaccccattttagatggacaactttgctgctgtggtttatatggttttccaatgcattctcttactacgggttagttctactcaccacagaactcttccaggcaggagatgtctgcggcatctccagtcggaagaaggctgtagaggcaaaatgcagcctggcctgcgagtacctgagtgaggaggattacatggacttgctgtggaccaccctctctgagtttccaggtgtccttgtgactctgtggattattgaccgcctggggcgcaagaagaccatggccctgtgctttgtcatcttctccttctgcagcctcctgctgtttatctgtgttggaagaaatgtgctcactctgttactcttcattgcaagagcgtttatttctggaggctttcaagcggcatatgtttacacacctgaggtctaccccacggcaacgcgggccctcggcctgggcacctgcagcggcatggcaagagtgggtgctctcatcactccgttcatcgcccaggtgatgctggaatcctctgtgtacctgactctggcagtttacagtggctgctgcctcctggctgccctggcctcctgctttttgcccattgagaccaaaggccgaggactgcaggagtccagccaccgggagtggggccaggagatggtcggccgaggaatgcacggtgcaggtgttaccaggtcgaactctggctctcaggaatagtgaccgatgggggactgagctggtctttgaggctgcagagcttggggggctggcaggccccaactggggcactgattgtcactgccgacatcaagaactcacccaagagtatgacctggaccaacagggttttgtgtcttgactcagtttgctcatcttcattgaggtccacccagggatggggagatgtttgctctagggggttctctgtatatgtggtgaaagctttgttcataacctgtggatctacatgggaagactacccatattaggagggtctggtaatgccagcaaccaatcagacaccacccagagtcacccggccaaaccctcagtgaacaaccaaaatatctctctgtagataccgtccaggctcaggcccatgtgacacctgctgtccacccaccggacctgttcagtaggtttctcccacactcacagccccaggctttcttctttgaaattgcaggcgatctaggtgtggtctgagcagctatttcctggcaggggccccccggtttgcctccctagagcctgaccagtggattctctggcagatggacatggtgcattcaaactggagccacatgcccccacccagccccctctggagttgccgttgttggcaccaagagatccagatgtgtccctggggacagctggtcttgcaccaggtgacaacctcagaacgccgttaccccctgggaactgaggactgaggccaaagtgaatcaagctgaagtcagagcacgggcctccccttctgaagcagcgaaggccacggttccgacttctttcctggccccctccttggtcaggctgaatggtgacttttattgttttttgagacggagtcttgatctgtcgcccaggctggagtgcagtagcgtgatctcggctcactgcaactctgcctcccgggttcaagcaattctcctgtctcagcctcccgagtagctgggattacaggtgcccacctgtactttttagtagagacagggtttcaccatgttggccaggctggtctcgaactcctgacctcaagtgatccacccgcctcggcctcccacagtgctgagattacaggtgggagccactgcacccggcctgaatgatgactcttgaggggaaaaagtttactcaggtttgcaggtacaaaatccaaaatccagggctttgggttttgtgcatgggtagacagctgaatgggcagagaaaccagaaggatgctacacccaccatctcatcccatggggatcaggggaccaggattccctgatgcgaagctgctcctctgtccagggacgtcttgatcattacacaaaggcagcccctggagttccattcatggagcctgccgtggagtggagaggggtgggaggactcaggtgtgtgaaatgtatatgttttcaaaggaagcagtgggaggccagttggttttgagttggtctccgcaggcaacatcacttctgggatttggtttactggagccttttttcccatggtgaaggcaggggacatagacaaggagggaggaagctggcagatcccatcaaaggccagagcagacagacctactgcttgaagtaaacattgcaaggaagccaatttgtgcgttcaactcttattaaaacatgtcagtgatggacattgcaagagcctaagtttattcattgtcatcatgtcctagtgacagtccagcctaacggtctgactacctttgttcatcggaattcatctcaatgctttagtgtgataatctcctttccaatgagtggggaaagacataccgttggcagccaacattgtggctgagcttgttggagacaacactttcttctaatggtgtgcaggtcatgatgggggacttcttccagctcaagttctaaatcaactgcaaacaatactgtgtctctaaaatgtgggctgcagccccctccgcccaggcagttgaagaggagatggcttggcagatctctgtctctctctgacaaccacatttccttgaaccacgtgtggctgtagctctaattatttctggacagctgagctctcctgggtaacacagaacttttgcttgtctcttttgccttccggctggtcagacgctactggatgatcatgtccgctccctcaccctagaataacccagtggagctgggggctgggggggatagagtgcttggtgggcaggaatatttcccagagactagggtaaaggggtttacagttgagggccttctctacttgagaaagtgaaagttaaaaactcctgctgggtatggtggctcatgcctataatcccagcacttttggaggccgaggcgggcggatcacaaggtcaggagatcgagaccatcctggctaacatggtgaaaccccgtctctactaaaaatacaaaaaaaaattagccaggtgtggtggcgggtgcctgtagtcccagctactcaggaggctgaggccggagaatggcgtgaacccaggaggcagagcttgcagtgagccgagatcgcgccactgcactccagcctgggcgacagagcaagactccatctcaaaaacaaaacaaaacaaaacaaaaactctttgccttgtaaatagcctgcctttttcaaaaaaatcaatattatcaaatgatacaagagctatcacaaaaggcacccaaacttctgaatatgtgagacctttagctgagaacatttgtatctaattttgaacaatcctattcaaaaagctcctattttcgttaatggaaatgccatgtttctcttagagttacgaaagatctcagaaagtggcaaaagatatttaatgtagccagagctatatatttctgtttttctcgtacttcaagtattctgaaaaacatataactgaccttggtggtgttcacaatgggatgaaacagtatcttaggaattgactttgaaattagtatggaaattcattgtttttaatataacattgagcaacagaaagccttgaatgataagatcaagagtctcccctgccattattttcaatggcaaaaactgcaattactttttttttttttttgagatgaagtctcagctcactgcaactctgtctcccaggttcaagcgattctccctcctcagcctcctgagtagctgggattacaggtgcccgccttgatgcttggctaatttttgtatttttagtatagacaaggtttcaccatgttggtcaggctggtctcaaactcctgacctcaagtgatccgcccaccttggcctcccaaatgcaattacttttgcaccaacctaagaacagtaatctcagtcaatagtggcttaaaccattagaaccaaaaccaggcagagatcagagaaggttcaacgctcaacaatgttatcaagaacccagcttctttttgccttttcttttcaccatcctctgcatgttggccatctgaccctgtgcttgaaacctcatggtcacaaaatggctgcccctgtgctggacatcatatttcttttcaaagaaggtagaatgggaaaggagcagtcataaaaggttttctttcagaagagtctgttggttttggttagaaaaggaagtcccctggcagatttaccattgcttctcattgatcagacctgggtgtcatgcccatcccagcatgagtcctgctgtagggctggaaggaagggcctacgagcaccaagggatacccacagcctcctgaacacaaaattgggattctgttagcacagaagaaggatagcaatggctgttggatgggcgatggttgcaaggagcctgccgtggatgtgtaggccacagagctctcatcagcactgttttcgtggccaggaacagaaattctactcaggataattaaaattaaggaacagagctttattataagactgggatcggtagttaatttcctacaggggaaattcagggcatgtaaatcagtgaaatggaaaaggtgtaaggacaagagaaacaccagccctgtctgcaggggggggctgcaactcccttccagctgatgttgttccaccatgggtccagtgtgaccagatcttacaatgttcaaaagaggagtctaggtttttctgtgaaatctccaaatattagtatattggatcaaaaatgttcaaatgatgtgtgagctcaataaaatgcatctgcagtgcagctttggttgatgggctgatggttcactctgacagtttagagagattgcataggaataaagtacagcctggtgtcattcagaggaacagggatctgggaaaccactggggcccaagacagctgcccctctgaatctgtggctcttgtttcttcccttttctggcagaaatgagtctagcttccatctgtttccttgtggctgctgtgtatgcataatcatgcacagagcttccatagcctcataacccagctctgcaaacatacctgactcagctgctcagtgccccactcccagatcttcaggaatgaagctgattggcccagtttagtgttggattgagtcttggtccaattcaattgggtcaggaagaagtggtggagaggtacagacacggtggcattggcctgccctttagcagggtggtgcagacaattgctggtatgcctggaatctgcagtgacatgtgcataaactctcaagtctattcatcagaactctcttacagatcataacgtggcaagtggtcagtatgcatggaatatccagcatgtcctggacatgttattcaacactgaggatgcaaaatatcataagacatggtcctggctgggtgcagtggctc

SEQ ID NO: 187787 - DNA, 1413 bp, Homo sapiens
  Payload ID: 16962
  Gene Symbol: SVOPL
  Gene Name: SVOP-like
  Uniprot ID: Q8N434
  ENST ID: ENST00000288513
  CDS Start-End: 66-1088
cttgcagatggtgttttttggctacatggttttcagtatcctctttggcctcctggctgacagatatggccgctggaaggttaatcataaagactgaatttttgcccacgaaataccgaggctatatgttacccttgtctcaggtgttctggcttgcgggctccctgctcatcattggcttggcctctgtgatcatccccaccatcgggtggcgctggctcattcgcgtcgcctccatcccgggcatcatcctcatcgtggccttcaagtttattcctgaatctgcccggttcaatgtctccactgggaacactcgggctgccctggccactctggagcgcgttgccaagatgaaccgctcggtcatgccggaggggaagctggtggagcccgtcctggaaaaaagaggaagatttgcagacctattggatgctaaatatttacggaccacattacagatctgggtcatatggcttggaatctcttttgcctactatggggttatcctggccagtgctgagctgctggagcgggacttggtctgtggttcaaagtcagactctgcggtggtggtgactgggggggactcaggggagagccagagcccctgctactgccacatgtttgcaccctctgactatcggaccatgatcatcagcaccatcggtgaaattgctttgaatcctttaaatatactgggcatcaatttcctgggaagacggctgagcctttctattaccatgggatgcacggctttattcttccttctcctcaacatttgcacttcaagtgccggcctgattggcttcctcttcatgctgagggctctggtagctgcaaacttcaacaccgtctacatttacacagctgaggtctaccccaccacgatgcgcgctttggggatgggaaccagcggctccctgtgtcgcattggtgcaatggtggcaccatttatatcccaggttcttatgagtgcatcaatactgggggccctgtgtctcttctcatctgtctgtgttgtatgcgccatttctgcattcactctccccatcgaaaccaaaggacgggccctccagcaaattaaatgaagacctgcaaagctatgtctaccagatgagaaaaatgaattctatcttcagaactgcggtgcatttttttaaaacttggttttacttctgtatgctactcggtaattagtaaagtgattttttttttaaaggcatatatgggaatggggtaggtaactgtatattgatctcttccttgaggaacaatatataaagtacttttataaaatataatttaagctttcaaaggggtgtgagagggagatggtgggggggaagatggcttttcttcattgaaatcaagtctgtaaacctttatatgaataaatactaaattttaaactta

SEQ ID NO: 187788 - DNA, 5761 bp, Homo sapiens
  Payload ID: 16962
  Gene Symbol: SVOPL
  Gene Name: SVOP-like
  ENST ID: ENST00000441685
  CDS Start-End: 3980-4681
ttggatttggtgtttaaagttatgtctatttgtaataacataaagggagactgcttctagtggccccaatttgtgtactgtataaggcagcgcatgaacagacaattttaaaaattacagtggaaattcacaagtacacatctgaatagagtggagccgaagccgtcctctagcaacaagcgggcggcagaggaccccgtttccacctggggcaggatctgccttgttaggctcccaccaacagggagctgaaatcctgaacatgaagggcctcaggggcaagcaagaccaacgtgaaaccctgttctttaaattaacttccatccctcccgtatttccagcctacttctagtgaaaatggctaacggggtaaagtaacatgtaaaacctgcttagagaaccgttttatctcgctcccacttgcagatggtgttttttggctacatggttttcagtatcctctttggcctcctggctgacagatatggccgctggaaggtaggtggggcctcacagtagcatttggaattgtcttttgtgtattcttttgggggcaaccttatcactgtttctctttagtaggcatctccctcccaatacccaagatagaaaatgcagacatttccctccctgatggaacattccaggcttatcttctggacatttttctcagggtacctgtgcctgcagctgttcctctgcagtccaggtgtggagtaaaaggagatgcgggtattatagagttctaagaaatctctacccagaaggattaaaggaaggaaggccgctaagtggctctatttgaacttttaaaggttgggacttagaagcagtcatgggttggttagatgcccccaccacgtccagtttactgtggtggtgttgagaacagaggtctgatatcagtgggggcacacatctgttctccatttatccatatcttcgcttctaatgagttaataaggggaatggaaaaggccccttagcccttcagagcagccctattgggaggttttttcctctggttttcatttaaatgactagtccactgctgcaacagcaagctcagaagaagctgttctttcaggactatgtgtcatgagtgagtgtccataaagtctctaaccccccagagcacccaagtaggttgggagggagcaagtctcccttaattttggggcaagaaaactcaccctcaggcacctatctgtttgaaactagcaggaactggccacaaatgaaaagagaagtccaaattacaatcagtaggaaacagatgcaagttttaaagcctgtgatggaattttaggacaagaaaaagtaaaatgactagtgctggatggccaagaccattaagccaaacctgctgctatgaggcagaggcagagaaagcagaagttctctgcagagccatttgcctgaatgtcccgtccagggacagaaatggaagcccatgctcttaaatgagagagtttataaagaagccacccaaactgtagacctcaacctaaaggaaaggagggccagattcagaaagactcacccttttgcccccagtgaaacctctggagttaggggaacgcagtgggttcatgcagcaagttcaagaggagcctattggtaattgtgggggtaaggggtggtgttgctctgaaccttgccagctatgccagaaatattgacctaaaggaagaaacagagacgaaattaatataagtagggagtttatttggaccaagattgaggattgcagctcggaagtcatacagtccagttgccctgaatatatgctccgattagcagcagttacaagtgggttttttaaaggaggagagaaaagaatttgggggcacttcctaagttatttactaataatttacattggttcgttaaaataaggtatgctatcagctgattctacatctttcttggtgtcacaaaatctaaaaacatggagataatggatgagcgtcacattgtgcaacttgcggtaaccttttaggtaatttatcagctagtctggaaactacagggaaggtaagaaaaacaaaatgaaatacaattaccctgggcatgggtgcgggaatgtgaccggagtcgcatgctcctgtgtctctggacctgataaattctgcatacctcacattcctcagactgttctgagccgcttttctctctcaagttgatggatgtacggagttaaaacatattagagtgtggacatttgcaggtataaacataagcagctacacattttgctcatgttggtatagctttgaaactagctacgtgctcaaagtcacgtgcctactaagattagacatcaagacataaattatgtcttctgattacaaacccaggtctgtcttttctatttgcttgatttctggtgaaatcctctctgagcataaacacaaatggaggaatctcaaaggaaaacattagtagaattggctgtatgttttaaagtacatgaaataaatagcatagattcttgtaaatttgaaaacacgagtatctcaaaaaagcacaaaaaggcattttataaaagaaatacaaattatcaagaaactttgaaaaaacattaaagtacaggagttatcaaaaacaaaatacatagcaagatataatttttccttatcaaatatgtaaggaaatttttccttaaagagtcctgcaccgttgaaatggacattttcatgacttgcaagtatatagacacccttactatatataacaccctgttggtgttaatatatcattattattatataatattattaaaccctattggtataatttttctgaccatcagcctggcagtatgaaacatgaaccttgaaaatattctgctaacctgaacatttgtcttccagaaatctagcttgctaaagatatcagagagggcataacgacttatgtacagatatcatcgcagcttattttaataatgagaagatctgaaacaacttaaactgcaacagtagagcaaggtcttatgtattatattacatgtatgaaagtacatctttccactggaacatttatagccagccattaacacttcgttttctctcataaacagagaagataaaacagtgttaagagttatcttctctgggttggacaatcaatggtgatttcaatttcttaattttcttttttcttctgtattgtttactatgaatttatccttataattaaagaaaaagcaaataccttaaatgttctccttgtactcctcccaacatactgcctcattacgtccccagcagccctgtgagtagggaggacacgtttttgccttttgatgtccaagttcagggacctgccacccatgagggtgggcacagcatggtagttttaaagaatggtctgaacttggtaggtctgggcttccagacagtagaatggcatggattgtattgttggatgattgtgaaagaccagtgggcttgctacaggttagctcctcagagaagcaactatcaggatggaaaccgaaaatcgccttcagaagttagggcttcttccctccccgcattgaggcaggtcccattcatgtgttctgctgttgcttcagattctgctcatctcgttcctgtggggagcctatttctccttgctgacctcgtttgctccttcgtacatctggtttgtcttcctgcggacgatggtgggctgtggtgtgtccggccactcgcaagggttaatcataaagactgaatttttgcccacgaaataccgaggctatatgttacccttgtctcaggtgttctggcttgcgggctccctgctcatcattggcttggcctctgtgatcatccccaccatcgggtggcgctggctcattcgcgtcgcctccatcccgggcatcatcctcatcgtggccttcaagtttattcctgaatctgcccggttcaatgtctccactgggaacactcgggctgccctggccactctggagcgcgttgccaagatgaaccgctcggtcatgccggaggggaagctggtggagcccgtcctggaaaaaagaggaagatttgcagacctattggatgctaaatatttacggaccacattacagatctgggtcatatggcttggaatctcttttgcctactatggggttatcctggccagtgctgagctgctggagcgggacttggtctgtggttcaaagtcagactctgcggtggtggtgactgggggggactcaggggagagccagagcccctgctactgccacatgtttgcaccctctgactatcggaccatgatcatcagcaccatcggtgaaattgctttgaatcctttaaatatactgggcatcaatttcctgggaagacggctgagcctttctattaccatgggatgcacggctttattcttccttctcctcaacatttgcacttcaagtgccggcctgattggcttcctcttcatgctgagggctctggtagctgcaaacttcaacaccgtctacatttacacagctgaggtctaccccaccacgatgcgcgctttggggatgggaaccagcggctccctgtgtcgcattggtgcaatggtggcaccatttatatcccagagagctttgctgttggttaaccacttcatactttactgtcgttgtgagattaatggagaactatcaagaacacagaccaagagaaactaaagtatgagatggagtatctgaattaccagtatctgcgtgaaaagatccaggccaaagcatgtgtacagatggacagaaacccagttactgtggaaaaattgacaccaaagagttttggtgtcacacaactccataaccggagacaagacacattagcaatcctttcagagactctgagataacacctcttccaaaaaaaactttcacctgtttcatgctgtcaggactgaagagataatggatatttggcagacagaggatatagcatgaagtgagagttagaagttaagcaagctgaaatggtatgagaaagggggtggggaaacgggcagatcccccatcttttccatatatcaaaacttggctctggagatgcctgacaggtggatgccaagagaggtcttacctggccaatgcgtgttaataccagttcctgttcttggactaatcacacaaaatgactacaccagattggctcagataaatcaatttgtcaggaaggtacaacctgtagaatggctgcaaaggaccatcttagtgaagtgaatctgtattttctctttcacataaagaacagtttagaggtaactggagcataataaattgagtaattctcttgtgacttgcaggttcttatgagtgcatcaatactgggggccctgtgtctcttctcatctgtctgtgttgtatgcgccatttctgcattcactctccccatcgaaaccaaaggacgggccctccagcaaattaaatgaagacctgcaaagctatgtctaccagatgagaaaaatgaattctatcttcagaactgcggtgcatttttttaaaacttggttttacttctgtatgctactcggtaattagtaaagtgattttttttttaaaggcatatatgggaatggggtaggtaactgtatattgatctcttccttgaggaacaatatataaagtacttttataaaatataatttaagctttcaaaggggtgtgagagggagatggtgggggggaagatggcttttcttcattgaaatcaagtctgtaaacctttatatgaataaatactaaattttaaactta

SEQ ID NO: 187789 - DNA, 1523 bp, Homo sapiens
  Payload ID: 16962
  Gene Symbol: SVOPL
  Gene Name: SVOP-like
  Uniprot ID: Q8N434
  ENST ID: ENST00000419765
  CDS Start-End: 35-1513
ggaagctgtttggggaacttgagctatttagaagatggcaaccaagccaacagagcctgtcacgatcctcagccttcggaaattgagcctggggaccgcagagccacaggttaaagagccaaagacgttcaccgtggaagatgcagtggagactatcggcttcgggcgtttccacattgccctctttctgatcatgggcagtactggggtggttgaggccatggagatcatgttgatagctgttgtgtctcctgtcatccgctgtgaatggcaactggagaattggcaggtggcattagtaaccacgatggtgttttttggctacatggttttcagtatcctctttggcctcctggctgacagatatggccgctggaagattctgctcatctcgttcctgtggggagcctatttctccttgctgacctcgtttgctccttcgtacatctggtttgtcttcctgcggacgatggtgggctgtggtgtgtccggccactcgcaagggttaatcataaagactgaatttttgcccacgaaataccgaggctatatgttacccttgtctcaggtgttctggcttgcgggctccctgctcatcattggcttggcctctgtgatcatccccaccatcgggtggcgctggctcattcgcgtcgcctccatcccgggcatcatcctcatcgtggccttcaagtttattcctgaatctgcccggttcaatgtctccactgggaacactcgggctgccctggccactctggagcgcgttgccaagatgaaccgctcggtcatgccggaggggaagctggtggagcccgtcctggaaaaaagaggaagatttgcagacctattggatgctaaatatttacggaccacattacagatctgggtcatatggcttggaatctcttttgcctactatggggttatcctggccagtgctgagctgctggagcgggacttggtctgtggttcaaagtcagactctgcggtggtggtgactgggggggactcaggggagagccagagcccctgctactgccacatgtttgcaccctctgactatcggaccatgatcatcagcaccatcggtgaaattgctttgaatcctttaaatatactgggcatcaatttcctgggaagacggctgagcctttctattaccatgggatgcacggctttattcttccttctcctcaacatttgcacttcaagtgccggcctgattggcttcctcttcatgctgagggctctggtagctgcaaacttcaacaccgtctacatttacacagctgaggtctaccccaccacgatgcgcgctttggggatgggaaccagcggctccctgtgtcgcattggtgcaatggtggcaccatttatatcccaggttcttatgagtgcatcaatactgggggccctgtgtctcttctcatctgtctgtgttgtatgcgccatttctgcattcactctccccatcgaaaccaaaggacgggccctccagcaaattaaatgaagacctgcaa

SEQ ID NO: 187790 - DNA, 1653 bp, Homo sapiens
  Payload ID: 16962
  Gene Symbol: SVOPL
  Gene Name: SVOP-like
  ENST ID: ENST00000421622
  CDS Start-End: 210-1328
gatctgagacccgacctgaaaggagaggataagaccagggagccaggcgtcttgggaacacaagtctggccacccctgagaagccatctgtgctccaatttccgtctaagacttggccacggtgaggggagcaaaagagcctgaaattggaagactgtccaaggaatatacagagggaagctgtttggggaacttgagctatttagaagatggcaaccaagccaacagagcctgtcacgatcctcagccttcggaaattgagcctggggaccgcagagccacaggttaaagagccaaagacgttcaccgtggaagatgcagtggagactatcggcttcgggcgtttccacattgccctctttctgatcatgggcagtactggggtgttctggcttgcgggctccctgctcatcattggcttggcctctgtgatcatccccaccatcgggtggcgctggctcattcgcgtcgcctccatcccgggcatcatcctcatcgtggccttcaagtttattcctgaatctgcccggttcaatgtctccactgggaacactcgggctgccctggccactctggagcgcgttgccaagatgaaccgctcggtcatgccggaggggaagctggtggagcccgtcctggaaaaaagaggaagatttgcagacctattggatgctaaatatttacggaccacattacagatctgggtcatatggcttggaatctcttttgcctactatggggttatcctggccagtgctgagctgctggagcgggacttggtctgtggttcaaagtcagactctgcggtggtggtgactgggggggactcaggggagagccagagcccctgctactgccacatgtttgcaccctctgactatcggaccatgatcatcagcaccatcggtgaaattgctttgaatcctttaaatatactgggcatcaatttcctgggaagacggctgagcctttctattaccatgggatgcacggctttattcttccttctcctcaacatttgcacttcaagtgccggcctgattggcttcctcttcatgctgagggctctggtagctgcaaacttcaacaccgtctacatttacacagctgaggtctaccccaccacgatgcgcgctttggggatgggaaccagcggctccctgtgtcgcattggtgcaatggtggcaccatttatatcccaggttcttatgagtgcatcaatactgggggccctgtgtctcttctcatctgtctgtgttgtatgcgccatttctgcattcactctccccatcgaaaccaaaggacgggccctccagcaaattaaatgaagacctgcaaagctatgtctaccagatgagaaaaatgaattctatcttcagaactgcggtgcatttttttaaaacttggttttacttctgtatgctactcggtaattagtaaagtgattttttttttaaaggcatatatgggaatggggtaggtaactgtatattgatctcttccttgaggaacaatatataaagtacttttataaaatataatttaagctttcaaaggggtgtgagagggagatggtgggggggaagatggcttttcttcattgaaatcaagtctgtaaacctttatatgaataaatactaaattttaaactta

SEQ ID NO: 187791 - DNA, 1420 bp, Homo sapiens
  Payload ID: 16962
  Gene Symbol: SVOPL
  Gene Name: SVOP-like
  Uniprot ID: Q8N434
  ENST ID: ENST00000436657
  CDS Start-End: 74-1096
caggacgtcttccagatggtgttttttggctacatggttttcagtatcctctttggcctcctggctgacagatatggccgctggaaggttaatcataaagactgaatttttgcccacgaaataccgaggctatatgttacccttgtctcaggtgttctggcttgcgggctccctgctcatcattggcttggcctctgtgatcatccccaccatcgggtggcgctggctcattcgcgtcgcctccatcccgggcatcatcctcatcgtggccttcaagtttattcctgaatctgcccggttcaatgtctccactgggaacactcgggctgccctggccactctggagcgcgttgccaagatgaaccgctcggtcatgccggaggggaagctggtggagcccgtcctggaaaaaagaggaagatttgcagacctattggatgctaaatatttacggaccacattacagatctgggtcatatggcttggaatctcttttgcctactatggggttatcctggccagtgctgagctgctggagcgggacttggtctgtggttcaaagtcagactctgcggtggtggtgactgggggggactcaggggagagccagagcccctgctactgccacatgtttgcaccctctgactatcggaccatgatcatcagcaccatcggtgaaattgctttgaatcctttaaatatactgggcatcaatttcctgggaagacggctgagcctttctattaccatgggatgcacggctttattcttccttctcctcaacatttgcacttcaagtgccggcctgattggcttcctcttcatgctgagggctctggtagctgcaaacttcaacaccgtctacatttacacagctgaggtctaccccaccacgatgcgcgctttggggatgggaaccagcggctccctgtgtcgcattggtgcaatggtggcaccatttatatcccaggttcttatgagtgcatcaatactgggggccctgtgtctcttctcatctgtctgtgttgtatgcgccatttctgcattcactctccccatcgaaaccaaaggacgggccctccagcaaattaaatgaagacctgcaaagctatgtctaccagatgagaaaaatgaattctatcttcagaactgcggtgcatttttttaaaacttggttttacttctgtatgctactcggtaattagtaaagtgattttttttttaaaggcatatatgggaatggggtaggtaactgtatattgatctcttccttgaggaacaatatataaagtacttttataaaatataatttaagctttcaaaggggtgtgagagggagatggtgggggggaagatggcttttcttcattgaaatcaagtctgtaaacctttatatgaataaatactaaattttaaactt

SEQ ID NO: 187792 - DNA, 4882 bp, Homo sapiens
  Payload ID: 16963
  Gene Symbol: SWAP70
  Gene Name: SWAP switching B-cell complex 70kDa subunit
  Uniprot ID: Q9UH65
  ENST ID: ENST00000318950
  CDS Start-End: 104-1861
aggtgactgcgcggcgggctgtggctgcggaggttgaggggcgtccgaggcgcggaggggctggctgggcaggaggggttggcggggcagcagggccgcggccatggggagcttgaaggaggagctgctcaaagccatctggcacgccttcaccgcactcgaccaggaccacagcggcaaggtctccaagtcccagctcaaggtcctttcccataacctgtgcacggtgctgaaggttcctcatgacccagttgcccttgaagagcacttcagggatgatgatgagggtccagtgtccaaccagggctacatgccttatttaaacaggttcattttggaaaaggtccaagacaactttgacaagattgaattcaataggatgtgttggaccctctgtgtcaaaaaaaacctcacaaagaatcccctgctcattacagaagaagatgcatttaaaatatgggttattttcaactttttatctgaggacaagtatccattaattattgtgtcagaagagattgaatacctgcttaagaagcttacagaagctatgggaggaggttggcagcaagaacaatttgaacattataaaatcaactttgatgacagtaaaaatggcctttctgcatgggaacttattgagcttattggaaatggacagtttagcaaaggcatggaccggcagactgtgtctatggcaattaatgaagtctttaatgaacttatattagatgtgttaaagcagggttacatgatgaaaaagggccacagacggaaaaactggactgaaagatggtttgtactaaaacccaacataatttcttactatgtgagtgaggatctgaaggataagaaaggagacattctcttggatgaaaattgctgtgtagagtccttgcctgacaaagatggaaagaaatgcctttttctcgtaaaatgttttgataagacttttgaaatcagtgcttcagataagaagaagaaacaggagtggattcaagccattcattctactattcatctgttgaagctgggcagccctccaccacacaaagaagcccgccagcgtcggaaagaactccggaagaagcagctggctgaacaagaggaactggagcgacaaatgaaggaactccaggccgccaacgaaagcaagcagcaggagctggaggccgtgcggaagaaactggaggaagcagcatctcgtgcagcagaagaggaaaagaaacgccttcagactcaagtggaacttcaggccaggttcagcacagagctggaaagagagaagcttatcagacagcagatggaagaacaggttgctcaaaagtcctctgaactggaacagtatttacagcgagtacgggagctggaagacatgtacctaaagctgcaggaggctcttgaagatgagagacaggcccggcaagatgaagagacagtgcggaagcttcaggccaggttgttggaggaagagtcttccaagagggctgaactagaaaagtggcacttggagcagcagcaggccattcagacaaccgaggcggagaagcaggagttggagaatcagcgtgtcctgaaggaacaggccctgcaggaggccatggagcagctggagcagcttgagttagaacggaagcaagcacttgagcagtacgaggaagttaaaaagaagctggagatggcaactaataagaccaagagctggaaggacaaagtggcccatcatgaaggattaattcgactgatagaaccaggttcaaagaaccctcacctgatcactaactggggacctgcagctttcactgaggcagaacttgaagagagagagaagaactggaaagagaaaaagaccacggagtgactgagcttgctggcagtcacgtcagttatgtagatactgcatggcaggagagctttacgctaaagacaaaagaaacagctttgggggccgggcgtggtggctcacgcctgtaatcccagcactttgggaggccgaggcgggtggatcacctgaggtcaggagttcaagagcagcctggccaacctggtgaaaccctgtctctactaaaaatacaaaaaaaattagctgagcgtggtggcgggcgcctgtaatcccagctacttgggaggctgaggcaggagaatcacttgaacgtgggaggcggaggttgcagcgagctgagatcatgccgttgtactccagcttgggcaacagagtgagactccatctcaaaacaaaacaaaacaaaacaaaacaaaaaaacccggctttgctgcttttaactcttcttccttctgtgcctctctaagtgggtcagtatcctaaggaagccttcttatttatcttcctgcaaacaagggttacctgaaaagaaaaaaaaagtcaacattgtcaagctgtttgtttactctttctttgaaaacatcaccttctgaaatttgtcttttagctctctcagattcttccccaaatgaggcagggtgcagacagcacagtcagctctgcagagtttggaggggctcactgccactgggtactcagaacctctgtggactggatgtcagctctttcctttggcagcgtgtttccttttccgagtatgtgctgttaaactagattggccggttcgctttccatttcctgacacttgacatggaatgcctttgaccattggtgctctgacagagaagtcatggagtcattgccatttcctggttgcccttttggaatgtgatcctgttagtagaggttttctagcttctactaagatatttctttccctaaccatcatacacttggcatgtttcattcccatctcctttcccctcaccttaaaggagactacccctttgccccatattgtcaacctaattttctctcgtactctctctagtgaatgatgtgctaccaagtatatgccaggctgtgagaggattatactgagtagtagaaagaagctaatttgaaataaaaattatttgtataattaagaaagcagattagatgcacatggtcaacaggaagttgactgtatgtctgctagttagattcaaaacatcataaagatgatagcatgtcaatatattagcctagccattatgttagcctttgttaggtgggcagcttttctgctttttcccttcctctgtggtgacaacggaggaaatatccaacagaaatacgtctaacagggaaattgggatcatagtttatatgcatctgatttgaaaggagtattgaggaaggttttcatatatgatctatctttggattaaaaagaacatttatgaaatcaagccttctaacactagttataattgagaagcaacagtaactccgtggacagcaatcaagcttaaaattgtaaataaatatggggataattcagttgttgcaaaaaaagggcagaattcagtagaataaagtccttttctcttacaggtattaaatgaggacagagaacctcaggtgttcttatgctagtgcttgctgagtgcatactaagaaagcaattccaaatagatgtatacatctagagagagtggtattagagattcagtgtatgtatttatttacatgagaggaaactggaatataatcccataaattatcaccttttatgactggaaaatatttgccaatgaagaaatggtctgtaggtatttgtcttaagatttttggctgtttaataaaaatgtaactttaacggtttcttatagttgcctttataaagtgtattgtctaaaatatttttgtatcatgtgcctttgaaatttgacagctgatttgggtgttggatttctgcccagccatttatcagtattatcattttattcagtagctggcaggtgtattagaccaacgagacttaggtaaggaatggaacctttcctgtggtttgactgcacattacaccagaagactccagtatccctcattccagaatgaggaaaaagtattctacaaagaacctaatcacctctgtgaaatctatgggatggaaacagtgtggccttaggagtcaaatagtctctgcatggtggggaggatcatgatggaatatgtgaatttctacttctagaagttgtgaaataggtcctgcacttttgcagaatgtccttctttaaacctggcttattccacagctgtagctgataacatgacctggggcttagctgctctagccctgggttcttggagacctcacactgcctggcccctggccatccacctaaggactgcctgctttctggtcacatgtggaccttgatacgactaagcggttacatatgtggttgtgcaaaagctttctgtttaatgcatagtgttaccgatttacatcttggttttcagtggcactatgtctaggaggcaatatccttttaaacagtgctttggctaagatagatacttgtgaatcaaagatagcacagaaatgaactaagtatatcccatttggaattatattttgatactatttaaaatggtttcacctgttaaagggccaacagaactcttggttttacttttgtaattactgtacagaaaatttcaagagtgtttgagtgcttgtcatcaggtgttttccttaataagtagggatatgatcatttacaggaattatatatgaaaaaagtttttgaaatgtatttttgtgatgtgctatgttgaggggaaaccaaatatttatgattttaaaacattcgtatgaaaacattgtacaatgtaatatgctcaactttctcaattttttgctaatttttctaagatacattaaaaatgttttatatttttttttaagtaaaatggacccagtaagaaaattaaaaataccagaacatacactttaaactgtctgatttaataaaacagtggggggta

SEQ ID NO: 187793 - DNA, 3538 bp, Homo sapiens
  Payload ID: 16963
  Gene Symbol: SWAP70
  Gene Name: SWAP switching B-cell complex 70kDa subunit
  ENST ID: ENST00000447399
  CDS Start-End: 104-1687
aggtgactgcgcggcgggctgtggctgcggaggttgaggggcgtccgaggcgcggaggggctggctgggcaggaggggttggcggggcagcagggccgcggccatggggagcttgaaggaggagctgctcaaagccatctggcacgccttcaccgcactcgaccaggaccacagcggcaaggtctccaagtcccagctcaaggtcctttcccataacctgtgcacggtgctgaaggttcctcatgacccagttgcccttgaagagcacttcagggatgatgatgagggtccagtgtccaaccagggctacatgccttatttaaacaggttcattttggaaaagattgaatacctgcttaagaagcttacagaagctatgggaggaggttggcagcaagaacaatttgaacattataaaatcaactttgatgacagtaaaaatggcctttctgcatgggaacttattgagcttattggaaatggacagtttagcaaaggcatggaccggcagactgtgtctatggcaattaatgaagtctttaatgaacttatattagatgtgttaaagcagggttacatgatgaaaaagggccacagacggaaaaactggactgaaagatggtttgtactaaaacccaacataatttcttactatgtgagtgaggatctgaaggataagaaaggagacattctcttggatgaaaattgctgtgtagagtccttgcctgacaaagatggaaagaaatgcctttttctcgtaaaatgttttgataagacttttgaaatcagtgcttcagataagaagaagaaacaggagtggattcaagccattcattctactattcatctgttgaagctgggcagccctccaccacacaaagaagcccgccagcgtcggaaagaactccggaagaagcagctggctgaacaagaggaactggagcgacaaatgaaggaactccaggccgccaacgaaagcaagcagcaggagctggaggccgtgcggaagaaactggaggaagcagcatctcgtgcagcagaagaggaaaagaaacgccttcagactcaagtggaacttcaggccaggttcagcacagagctggaaagagagaagcttatcagacagcagatggaagaacaggttgctcaaaagtcctctgaactggaacagtatttacagcgagtacgggagctggaagacatgtacctaaagctgcaggaggctcttgaagatgagagacaggcccggcaagatgaagagacagtgcggaagcttcaggccaggttgttggaggaagagtcttccaagagggctgaactagaaaagtggcacttggagcagcagcaggccattcagacaaccgaggcggagaagcaggagttggagaatcagcgtgtcctgaaggaacaggccctgcaggaggccatggagcagctggagcagcttgagttagaacggaagcaagcacttgagcagtacgaggaagttaaaaagaagctggagatggcaactaataagaccaagagctggaaggacaaagtggcccatcatgaaggattaattcgactgatagaaccaggttcaaagaaccctcacctgatcactaactggggacctgcagctttcactgaggcagaacttgaagagagagagaagaactggaaagagaaaaagaccacggagtgactgagcttgctggcagtcacgtcagttatgtagatactgcatggcaggagagctttacgctaaagacaaaagaaacagctttgggggccgggcgtggtggctcacgcctgtaatcccagcactttgggaggccgaggcgggtggatcacctgaggtcaggagttcaagagcagcctggccaacctggtgaaaccctgtctctactaaaaatacaaaaaaaattagctgagcgtggtggcgggcgcctgtaatcccagctacttgggaggctgaggcaggagaatcacttgaacgtgggaggcggaggttgcagcgagctgagatcatgccgttgtactccagcttgggcaacagagtgagactccatctcaaaacaaaacaaaacaaaacaaaacaaaaaaacccggctttgctgcttttaactcttcttccttctgtgcctctctaagtgggtcagtatcctaaggaagccttcttatttatcttcctgcaaacaagggttacctgaaaagaaaaaaaaagtcaacattgtcaagctgtttgtttactctttctttgaaaacatcaccttctgaaatttgtcttttagctctctcagattcttccccaaatgaggcagggtgcagacagcacagtcagctctgcagagtttggaggggctcactgccactgggtactcagaacctctgtggactggatgtcagctctttcctttggcagcgtgtttccttttccgagtatgtgctgttaaactagattggccggttcgctttccatttcctgacacttgacatggaatgcctttgaccattggtgctctgacagagaagtcatggagtcattgccatttcctggttgcccttttggaatgtgatcctgttagtagaggttttctagcttctactaagatatttctttccctaaccatcatacacttggcatgtttcattcccatctcctttcccctcaccttaaaggagactacccctttgccccatattgtcaacctaattttctctcgtactctctctagtgaatgatgtgctaccaagtatatgccaggctgtgagaggattatactgagtagtagaaagaagctaatttgaaataaaaattatttgtataattaagaaagcagattagatgcacatggtcaacaggaagttgactgtatgtctgctagttagattcaaaacatcataaagatgatagcatgtcaatatattagcctagccattatgttagcctttgttaggtgggcagcttttctgctttttcccttcctctgtggtgacaacggaggaaatatccaacagaaatacgtctaacagggaaattgggatcatagtttatatgcatctgatttgaaaggagtattgaggaaggttttcatatatgatctatctttggattaaaaagaacatttatgaaatcaagccttctaacactagttataattgagaagcaacagtaactccgtggacagcaatcaagcttaaaattgtaaataaatatggggataattcagttgttgcaaaaaaagggcagaattcagtagaataaagtccttttctcttacaggtattaaatgaggacagagaacctcaggtgttcttatgctagtgcttgctgagtgcatactaagaaagcaattccaaatagatgtatacatctagagagagtggtattagagattcagtgtatgtatttatttacatgagaggaaactggaatataatcccataaattatcaccttttatgactggaaaatatttgccaatgaagaaatggtctgtaggtatttgtcttaagatttttggctgtttaataaaaatgtaactttaacggtt

SEQ ID NO: 187794 - DNA, 813 bp, Homo sapiens
  Payload ID: 16963
  Gene Symbol: SWAP70
  Gene Name: SWAP switching B-cell complex 70kDa subunit
  ENST ID: ENST00000526358
  CDS Start-End: 100-549
gactgcgcggcgggctgtggctgcggaggttgaggggcgtccgaggcgcggaggggctggctgggcaggaggggttggcggggcagcagggccgcggccatggggagcttgaaggaggagctgctcaaagccatctggcacgccttcaccgcactcgaccaggaccacagcggcaaggtctccaagtcccagctcaaggtcctttcccataacctgtgcacggtgctgaaggttcctcatgacccagttgcccttgaagagcacttcagggatgatgatgagggtccagtgtccaaccagggctacatgccttatttaaacaggttcattttggaaaagattaccaagacccttcctgcctcagagccttcagacatgctgcttcctgtgctgtccaagacaactttgacaagattgaattcaataggatgtgttggaccctctgtgtcaaaaaaaacctcacaaagaatcccctgctcattacagaagaagatgcatttaaaatatgggttattttcaactttttatctgaggacaagtatccattaattattgtgtcagaagagattgaatacctgcttaagaagcttacagaagctatgggaggaggttggcagcaagaacaatttgaacattataaaatcaactttgatgacagtaaaaatggcctttctgcatgggaacttattgagcttattggaaatggacagtttagcaaaggcatggaccggcagactgtgtctatggcaattaatgaagtctttaatgaacttatattagatgtgttaaagcagggttacatgatgaaaaagg

SEQ ID NO: 187795 - DNA, 977 bp, Homo sapiens
  Payload ID: 16963
  Gene Symbol: SWAP70
  Gene Name: SWAP switching B-cell complex 70kDa subunit
  ENST ID: ENST00000534562
  CDS Start-End: 1-71
attttcctgttggtctggggcagagttcctccttcagaatattgagaggtcaggcagaaagggttacatgatgaaaaagggccacagacggaaaaactggactgaaagatggtttgtactaaaacccaacataatttcttactatgtgagtgaggatctgaaggataagaaaggagacattctcttggatgaaaattgctgtgtagagtccttgcctgacaaagatggaaagaaatgcctttttctcgtaaaatgttttgataagacttttgaaatcagtgcttcagataagaagaagaaacaggagtggattcaagccattcattctactattcatctgttgaagctgggcagccctccaccacacaaagaagcccgccagcgtcggaaagaactccggaagaagcagctggctgaacaagaggaactggagcgacaaatgaaggaactccaggccgccaacgaaagcaagcagcaggagctggaggccgtgcggaagaaactggaggaagcagcatctcgtgcagcagaagaggaaaagaaacgccttcagactcaagtggaacttcaggccaggttcagcacagagctggaaagagagaagcttatcagacagcagatggaagaacaggttgctcaaaagtcctctgaactggaacagtatttacagcgagtacgggagctggaagacatgtacctaaagctgcaggaggctcttgaagatgagagacaggcccggcaagatgaagagacagtgcggaagcttcagcgagctgagatcatgccgttgtactccagcttgggcaacagagtgagactccatctcaaaacaaaacaaaacaaaacaaaacaaaaaaacccggctttgctgcttttaactcttcttccttctgtgcctctctaagtgggtcagtatcctaaggaagccttcttatttatcttcctgcaaacaagggttacctgaaaagaaaaaaaaa

SEQ ID NO: 187796 - DNA, 1131 bp, Homo sapiens
  Payload ID: 16963
  Gene Symbol: SWAP70
  Gene Name: SWAP switching B-cell complex 70kDa subunit
  ENST ID: ENST00000534662
  CDS Start-End: 452-1131
agaattgatgcaggccactagagactaaaacggcaacacatgatttattatttagtataattgaatagtggagaatggtaatgtttgtctctccttggcccaatataatgaatcaaaaggcccttaagttatttggttatgatacgtatatgattgtgttgaaagtcagcaggaaatgaatctagattagttgtctggcacagtcactgggaatgctgagcagatcgaagctgggtgctaatgacaacttcataaggcttgggagggcaccttcagaaaggttcaggatgaacctggcaagctacttctagagctgagtttgctactaataggcgctttctgagttacaaacataacaagtcatctgattttgaagaaactgaagcttggagtgtgaatgacgtgggttcagtaagagattgaatacctgcttaagaagcttacagaagctatgggaggaggttggcagcaagaacaatttgaacattataaaatcaactttgatgacagtaaaaatggcctttctgcatgggaacttattgagcttattggaaatggacagtttagcaaaggcatggaccggcagactgtgtctatggcaattaatgaagtctttaatgaacttatattagatgtgttaaagcagggttacatgatgaaaaagggccacagacggaaaaactggactgaaagatggtttgtactaaaacccaacataatttcttactatgtgagtgaggatctgaaggataagaaaggagacattctcttggatgaaaattgctgtgtagagtccttgcctgacaaagatggaaagaaatgcctttttctcgtaaaatgttttgataagacttttgaaatcagtgcttcagataagaagaagaaacaggagtggattcaagccattcattctactattcatctgttgaagctgggcagccctccaccacacaaagaagcccgccagcgtcggaaagaactccggaagaagcagctggctgaacaagaggaactggagcgacaaatgaaggaactccaggccgccaacgaaagcaagcagcaggagctggaggccgtgcggaagaaactggaggaagcagcatctcgtgcagcagaagaggaaaagaaacg

SEQ ID NO: 187797 - DNA, 3564 bp, Homo sapiens
  Payload ID: 16964
  Gene Symbol: SMARCA1
  Gene Name: SWI/SNF related, matrix associated, actin dependent regulator of chromatin, subfamily a, member 1
  ENST ID: ENST00000371121
  CDS Start-End: 36-3248
tgccttgtccccctactcgttcccgctcccacggcatggagcaggacactgccgcagtggcagccaccgtggcagccgcggatgcgaccgccactatcgtggtcatagaggacgagcagcccgggccgtccacctctcaggaggagggagcggccgccgcggccaccgaagccaccgcggccacggagaagggcgagaagaagaaggagaaaaacgtttcttcatttcaactcaaacttgctgctaaagcgcctaaatctgaaaaggaaatggacccagaatatgaagagaaaatgaaagccgaccgagcaaagagatttgaatttttactgaagcagacagaactttttgcacatttcattcagccttcagcacagaaatctccaacatctccactgaacatgaaattgggacgtccccgaataaagaaagatgaaaagcagagcttaatttctgctggagactaccgccataggcgcacagagcaagaagaagatgaagagctactgtctgagagtcggaaaacatctaatgtgtgtattagatttgaggtgtcaccttcatatgtgaaaggggggccactgagagattatcagattcgaggactgaattggttgatctctttatatgaaaatggagtcaatggcattttggctgatgaaatgggccttgggaaaactttacaaacaattgctttgcttggttacctgaaacactaccgaaatattcctggacctcacatggttttagttccaaagtctactttacacaactggatgaatgaatttaaacgatgggtcccatctctccgtgtcatttgttttgtcggagacaaggatgccagagctgcttttattcgtgatgaaatgatgccaggagagtgggatgtttgcgttacttcttatgagatggtaattaaagaaaaatctgtattcaaaaagtttcactggcgatacctggtcattgatgaagctcacagaataaagaatgaaaaatctaagctttcagagattgttcgtgagttcaagtcgactaaccgcttgctcctaactggaacacctttgcagaataacctgcatgaactgtgggccttactcaactttttattgcctgatgtctttaattctgcagatgactttgattcttggtttgacactaaaaattgtcttggtgatcaaaaactcgtggaaagacttcatgcagttttaaaaccatttttgttacgccgtataaaaactgatgtagagaagagtctgccacctaaaaaggaaataaagatttacttggggctgagtaagatgcaacgagaatggtatacaaaaatcctgatgaaagatattgatgttttaaactcttctggcaagatggacaagatgcgactcttaaacattctgatgcagcttcgaaagtgttgtaatcatccatatctgtttgatggtgctgaacctggtccaccttataccactgatgagcatattgtcagcaacagtggtaaaatggtagttctggataaactattggccaaactcaaagaacagggttcaagggttctcattttcagccagatgactcgcttgctggatattttggaagattattgcatgtggcgtggttatgagtattgtcgactggatggacaaaccccgcatgaagaaagagaggataaattcctagaagtggaatttctgggtcaaagggaagcaatagaggcttttaatgctcctaatagtagcaaattcatctttatgctaagtaccagggctggaggtctcggaattaacctggcaagtgctgatgtggttatactatatgattcagactggaacccacaggttgatctacaagctatggatcgagcacatcgtattggtcagaagaaaccagtacgtgtattccgtctcatcactgacaacactgttgaagagaggattgtagaaagagctgagataaaactgagactcgattcaattgttatacaacaaggaagactcattgaccaacagtctaacaagctggcaaaagaggaaatgttacaaatgatacggcatggagccacccatgtttttgcttctaaagagagtgagttgacagatgaagacattacaactattctggaaagaggggaaaagaagactgcagagatgaatgaacgcctgcaaaaaatgggagagtcttctctaagaaattttagaatggacattgaacaaagtttatacaaatttgagggagaagattatagagaaaaacagaagcttggcatggtggaatggattgaacctcctaaacgagaacgcaaagcaaactacgcagtggatgcctactttagagaggctttgcgtgtcagcgagccaaagattccaaaggctccacggcctccaaaacagccaaatgttcaggattttcaatttttcccaccacgcttatttgagctcctggaaaaggaaattctttattatcggaagacaataggctataaggttccaaggaatcctgatatcccaaatccagctctggctcaaagagaagagcaaaaaaagattgatggagctgaacctcttacaccagaagagactgaagaaaaggaaaaacttctcacacaaggtttcacaaactggactaaacgagattttaaccagtttattaaagctaatgagaaatatggaagagatgacattgataacatagctcgagaggtagagggcaaatcccctgaggaggtcatggagtattcagctgtattttgggaacgttgcaatgaattacaggacattgagaaaattatggctcaaattgaacgtggagaagcaagaattcaacgaaggatcagtatcaagaaagccctggatgccaaaattgcaagatacaaggctccatttcatcagttgcgcattcagtatggaaccagcaaaggaaagaactatactgaggaagaagatagattcttgatttgtatgttacacaaaatgggctttgatagagaaaatgtatatgaagaattaagacagtgtgtacgaaatgctccccagtttagatttgactggtttatcaagtctaggactgccatggaattccagagacgctgtaacactctgatttcattgattgagaaagaaaatatggaaattgaggaaagagagagagcagaaaagaagaaacgggcaactaaaactccaatgtcacagaaaagaaaagcagagtcagctactgagagctctggaaagaaggatgtcaagaaggtgaaatcctaaagcctagaaataaagttttaaatgggaaactgctattttcttgttcccatcttcaaatgctaattgccagttccagtgtattcatggtactctaagaaaaatctctttggttttgatttcttgcatattttatatattttacaatgctttctacctgaaatgtgtagctttatattttatggcattctagtatttttgtgtactgtattttgtgcatttcatgtcttcatcaaaatcctctcagtccttgttcttttgaagcttgtgctgaggttttagcttttctatgttttatatgccgctgctttgaaagaga

SEQ ID NO: 187798 - DNA, 4099 bp, Homo sapiens
  Payload ID: 16964
  Gene Symbol: SMARCA1
  Gene Name: SWI/SNF related, matrix associated, actin dependent regulator of chromatin, subfamily a, member 1
  Uniprot ID: P28370
  ENST ID: ENST00000371122
  CDS Start-End: 131-3295
gagcgaaggggttggaagcggagtgattccccacccctgctccatctagctctttccagtgcagccactgccgccgcccaggagccctcgtcccctgccttgtccccctactcgttcccgctcccacggcatggagcaggacactgccgcagtggcagccaccgtggcagccgcggatgcgaccgccactatcgtggtcatagaggacgagcagcccgggccgtccacctctcaggaggagggagcggccgccgcggccaccgaagccaccgcggccacggagaagggcgagaagaagaaggagaaaaacgtttcttcatttcaactcaaacttgctgctaaagcgcctaaatctgaaaaggaaatggacccagaatatgaagagaaaatgaaagccgaccgagcaaagagatttgaatttttactgaagcagacagaactttttgcacatttcattcagccttcagcacagaaatctccaacatctccactgaacatgaaattgggacgtccccgaataaagaaagatgaaaagcagagcttaatttctgctggagactaccgccataggcgcacagagcaagaagaagatgaagagctactgtctgagagtcggaaaacatctaatgtgtgtattagatttgaggtgtcaccttcatatgtgaaaggggggccactgagagattatcagattcgaggactgaattggttgatctctttatatgaaaatggagtcaatggcattttggctgatgaaatgggccttgggaaaactttacaaacaattgctttgcttggttacctgaaacactaccgaaatattcctggacctcacatggttttagttccaaagtctactttacacaactggatgaatgaatttaaacgatgggtcccatctctccgtgtcatttgttttgtcggagacaaggatgccagagctgcttttattcgtgatgaaatgatgccaggagagtgggatgtttgcgttacttcttatgagatggtaattaaagaaaaatctgtattcaaaaagtttcactggcgatacctggtcattgatgaagctcacagaataaagaatgaaaaatctaagctttcagagattgttcgtgagttcaagtcgactaaccgcttgctcctaactggaacacctttgcagaataacctgcatgaactgtgggccttactcaactttttattgcctgatgtctttaattctgcagatgactttgattcttggtttgacactaaaaattgtcttggtgatcaaaaactcgtggaaagacttcatgcagttttaaaaccatttttgttacgccgtataaaaactgatgtagagaagagtctgccacctaaaaaggaaataaagatttacttggggctgagtaagatgcaacgagaatggtatacaaaaatcctgatgaaagatattgatgttttaaactcttctggcaagatggacaagatgcgactcttaaacattctgatgcagcttcgaaagtgttgtaatcatccatatctgtttgatggtgctgaacctggtccaccttataccactgatgagcatattgtcagcaacagtggtaaaatggtagttctggataaactattggccaaactcaaagaacagggttcaagggttctcattttcagccagatgactcgcttgctggatattttggaagattattgcatgtggcgtggttatgagtattgtcgactggatggacaaaccccgcatgaagaaagagaggataaattcctagaagtggaatttctgggtcaaagggaagcaatagaggcttttaatgctcctaatagtagcaaattcatctttatgctaagtaccagggctggaggtctcggaattaacctggcaagtgctgatgtggttatactatatgattcagactggaacccacaggttgatctacaagctatggatcgagcacatcgtattggtcagaagaaaccagtacgtgtattccgtctcatcactgacaacactgttgaagagaggattgtagaaagagctgagataaaactgagactcgattcaattgttatacaacaaggaagactcattgaccaacagtctaacaagctggcaaaagaggaaatgttacaaatgatacggcatggagccacccatgtttttgcttctaaagagagtgagttgacagatgaagacattacaactattctggaaagaggggaaaagaagactgcagagatgaatgaacgcctgcaaaaaatgggagagtcttctctaagaaattttagaatggacattgaacaaagtttatacaaatttgagggagaagattatagagaaaaacagaagcttggcatggtggaatggattgaacctcctaaacgagaacgcaaagcaaactacgcagtggatgcctactttagagaggctttgcgtgtcagcgagccaaagattccaaaggctccacggcctccaaaacagccaaatgttcaggattttcaatttttcccaccacgcttatttgagctcctggaaaaggaaattctttattatcggaagacaataggctataaggttccaaggaatcctgatatcccaaatccagctctggctcaaagagaagagcaaaaaaagattgatggagctgaacctcttacaccagaagagactgaagaaaaggaaaaacttctcacacaaggtttcacaaactggactaaacgagattttaaccagtttattaaagctaatgagaaatatggaagagatgacattgataacatagctcgagaggtagagggcaaatcccctgaggaggtcatggagtattcagctgtattttgggaacgttgcaatgaattacaggacattgagaaaattatggctcaaattgaacgtggagaagcaagaattcaacgaaggatcagtatcaagaaagccctggatgccaaaattgcaagatacaaggctccatttcatcagttgcgcattcagtatggaaccagcaaaggaaagaactatactgaggaagaagatagattcttgatttgtatgttacacaaaatgggctttgatagagaaaatgtatatgaagaattaagacagtgtgtacgaaatgctccccagtttagatttgactggtttatcaagtctaggactgccatggaattccagagacgctgtaacactctgatttcattgattgagaaagaaaatatggaaattgaggaaagagagagagcagaaaagaagaaacgggcaactaaaactccaatggtaaaattttcagcattttcctaacttttagatttaacattgttgggccatttaaaatgtgcatattggagcagaacattaaatctgtttccattttagtcacagaaaagaaaagcagagtcagctactgagagctctggaaagaaggatgtcaagaaggtgaaatcctaaagcctagaaataaagttttaaatgggaaactgctattttcttgttcccatcttcaaatgctaattgccagttccagtgtattcatggtactctaagaaaaatctctttggttttgatttcttgcatattttatatattttacaatgctttctacctgaaatgtgtagctttatattttatggcattctagtatttttgtgtactgtattttgtgcatttcatgtcttcatcaaaatcctctcagtccttgttcttttgaagcttgtgctgaggttttagcttttctatgttttatatgccgctgctttgaaagagaacctagattctatagttgtattattgttgtttcatactttaaatttatatggctgtggaaaaacgaattaaaatgttttgaggagaaagactttttcacttctttgttgctttcttttctattgagtctgggcttgtttgtgttactgcatactgtgattagcataataattgtttctttgaggtcatctaaatatttttttcctaaaggaataaagggtgaggaaagaaaaatattaaaaaagctaatatttgatactgtgcttgctgtcagtatgcattacatttaaattattctctattcaagtgggaaaatataataaagaaatgtctataagaaat

SEQ ID NO: 187799 - DNA, 3948 bp, Homo sapiens
  Payload ID: 16964
  Gene Symbol: SMARCA1
  Gene Name: SWI/SNF related, matrix associated, actin dependent regulator of chromatin, subfamily a, member 1
  ENST ID: ENST00000371123
  CDS Start-End: 116-3292
aagcggagtgattccccacccctgctccatctagctctttccagtgcagccactgccgccgcccaggagccctcgtcccctgccttgtccccctactcgttcccgctcccacggcatggagcaggacactgccgcagtggcagccaccgtggcagccgcggatgcgaccgccactatcgtggtcatagaggacgagcagcccgggccgtccacctctcaggaggagggagcggccgccgcggccaccgaagccaccgcggccacggagaagggcgagaagaagaaggagaaaaacgtttcttcatttcaactcaaacttgctgctaaagcgcctaaatctgaaaaggaaatggacccagaatatgaagagaaaatgaaagccgaccgagcaaagagatttgaatttttactgaagcagacagaactttttgcacatttcattcagccttcagcacagaaatctccaacatctccactgaacatgaaattgggacgtccccgaataaagaaagatgaaaagcagagcttaatttctgctggagactaccgccataggcgcacagagcaagaagaagatgaagagctactgtctgagagtcggaaaacatctaatgtgtgtattagatttgaggtgtcaccttcatatgtgaaaggggggccactgagagattatcagattcgaggactgaattggttgatctctttatatgaaaatggagtcaatggcattttggctgatgaaatgggccttgggaaaactttacaaacaattgctttgcttggttacctgaaacactaccgaaatattcctggacctcacatggttttagttccaaagtctactttacacaactggatgaatgaatttaaacgatgggtcccatctctccgtgtcatttgttttgtcggagacaaggatgccagagctgcttttattcgtgatgaaatgatgccaggagagtgggatgtttgcgttacttcttatgagatggtaattaaagaaaaatctgtattcaaaaagtttcactggcgatacctggtcattgatgaagctcacagaataaagaatgaaaaatctaagctttcagagattgttcgtgagttcaagtcgactaaccgcttgctcctaactggaacacctttgcagaataacctgcatgaactgtgggccttactcaactttttattgcctgatgtctttaattctgcagatgactttgattcttggtttgacactaaaaattgtcttggtgatcaaaaactcgtggaaagacttcatgcagttttaaaaccatttttgttacgccgtataaaaactgatgtagagaagagtctgccacctaaaaaggaaataaagatttacttggggctgagtaagatgcaacgagaatggtatacaaaaatcctgatgaaagatattgatgttttaaactcttctggcaagatggacaagatgcgactcttaaacattctgatgcagcttcgaaagtgttgtaatcatccatatctgtttgatggtgctgaacctggtccaccttataccactgatgagcatattgtcagcaacagtggtaaaatggtagttctggataaactattggccaaactcaaagaacagggttcaagggttctcattttcagccagatgactcgcttgctggatattttggaagattattgcatgtggcgtggttatgagtattgtcgactggatggacaaaccccgcatgaagaaagagaggaagcaatagaggcttttaatgctcctaatagtagcaaattcatctttatgctaagtaccagggctggaggtctcggaattaacctggcaagtgctgatgtggttatactatatgattcagactggaacccacaggttgatctacaagctatggatcgagcacatcgtattggtcagaagaaaccagtacgtgtattccgtctcatcactgacaacactgttgaagagaggattgtagaaagagctgagataaaactgagactcgattcaattgttatacaacaaggaagactcattgaccaacagtctaacaagctggcaaaagaggaaatgttacaaatgatacggcatggagccacccatgtttttgcttctaaagagagtgagttgacagatgaagacattacaactattctggaaagaggggaaaagaagactgcagagatgaatgaacgcctgcaaaaaatgggagagtcttctctaagaaattttagaatggacattgaacaaagtttatacaaatttgagggagaagattatagagaaaaacagaagcttggcatggtggaatggattgaacctcctaaacgagaacgcaaagcaaactacgcagtggatgcctactttagagaggctttgcgtgtcagcgagccaaagattccaaaggctccacggcctccaaaacagccaaatgttcaggattttcaatttttcccaccacgcttatttgagctcctggaaaaggaaattctttattatcggaagacaataggctataaggttccaaggaatcctgatatcccaaatccagctctggctcaaagagaagagcaaaaaaagattgatggagctgaacctcttacaccagaagagactgaagaaaaggaaaaacttctcacacaaggtttcacaaactggactaaacgagattttaaccagtttattaaagctaatgagaaatatggaagagatgacattgataacatagctcgagaggtagagggcaaatcccctgaggaggtcatggagtattcagctgtattttgggaacgttgcaatgaattacaggacattgagaaaattatggctcaaattgaacgtggagaagcaagaattcaacgaaggatcagtatcaagaaagccctggatgccaaaattgcaagatacaaggctccatttcatcagttgcgcattcagtatggaaccagcaaaggaaagaactatactgaggaagaagatagattcttgatttgtatgttacacaaaatgggctttgatagagaaaatgtatatgaagaattaagacagtgtgtacgaaatgctccccagtttagatttgactggtttatcaagtctaggactgccatggaattccagagacgctgtaacactctgatttcattgattgagaaagaaaatatggaaattgaggaaagagagagagcagaaaagaagaaacgggcaactaaaactccaatgtcacagaaaagaaaagcagagtcagctactgagagctctggaaagaaggatgtcaagaaggtgaaatcctaaagcctagaaataaagttttaaatgggaaactgctattttcttgttcccatcttcaaatgctaattgccagttccagtgtattcatggtactctaagaaaaatctctttggttttgatttcttgcatattttatatattttacaatgctttctacctgaaatgtgtagctttatattttatggcattctagtatttttgtgtactgtattttgtgcatttcatgtcttcatcaaaatcctctcagtccttgttcttttgaagcttgtgctgaggttttagcttttctatgttttatatgccgctgctttgaaagagaacctagattctatagttgtattattgttgtttcatactttaaatttatatggctgtggaaaaacgaattaaaatgttttgaggagaaagactttttcacttctttgttgctttcttttctattgagtctgggcttgtttgtgttactgcatactgtgattagcataataattgtttctttgaggtcatctaaatatttttttcctaaaggaataaagggtgaggaaagaaaaatattaaaaaagctaatatttgatactgtgcttgctgtcagtatgcattacatttaaattattctctattcaagtgggaaaatataataaagaaatgtctataagaaa

SEQ ID NO: 187800 - DNA, 5761 bp, Homo sapiens
  Payload ID: 16965
  Gene Symbol: SMARCA2
  Gene Name: SWI/SNF related, matrix associated, actin dependent regulator of chromatin, subfamily a, member 2
  Uniprot ID: P51531
  ENST ID: ENST00000349721
  CDS Start-End: 154-4926
gggacggctgtcatcaatgaagtcatattcataatctagtcctctctccctctgtttctgtactctgggtgactcagagagggaagagattcagccagcacactcctcgcgagcaagcattactctactgactggcagagacaggagaggtagatgtccacgcccacagaccctggtgcgatgccccacccagggccttcgccggggcctgggccttcccctgggccaattcttgggcctagtccaggaccaggaccatccccaggttccgtccacagcatgatggggccaagtcctggacctccaagtgtctcccatcctatgccgacgatggggtccacagacttcccacaggaaggcatgcatcaaatgcataagcccatcgatggtatacatgacaaggggattgtagaagacatccattgtggatccatgaagggcactggtatgcgaccacctcacccaggcatgggccctccccagagtccaatggatcaacacagccaaggttatatgtcaccacacccatctccattaggagccccagagcacgtctccagccctatgtctggaggaggcccaactccacctcagatgccaccaagccagccgggggccctcatcccaggtgatccgcaggccatgagccagcccaacagaggtccctcacctttcagtcctgtccagctgcatcagcttcgagctcagattttagcttataaaatgctggcccgaggccagcccctccccgaaacgctgcagcttgcagtccaggggaaaaggacgttgcctggcttgcagcaacaacagcagcagcaacagcagcagcagcagcagcagcagcagcagcagcagcagcaacagcagccgcagcagcagccgccgcaaccacagacgcagcaacaacagcagccggcccttgttaactacaacagaccatctggcccggggccggagctgagcggcccgagcaccccgcagaagctgccggtgcccgcgcccggcggccggccctcgcccgcgccccccgcagccgcgcagccgcccgcggccgcagtgcccgggccctcagtgccgcagccggccccggggcagccctcgcccgtcctccagctgcagcagaagcagagccgcatcagccccatccagaaaccgcaaggcctggaccccgtggaaattctgcaagagcgggaatacagacttcaggcccgcatagctcataggatacaagaactggaaaatctgcctggctctttgccaccagatttaagaaccaaagcaaccgtggaactaaaagcacttcggttactcaatttccagcgtcagctgagacaggaggtggtggcctgcatgcgcagggacacgaccctggagacggctctcaactccaaagcatacaaacggagcaagcgccagactctgagagaagctcgcatgaccgagaagctggagaagcagcagaagattgagcaggagaggaaacgccgtcagaaacaccaggaatacctgaacagtattttgcaacatgcaaaagattttaaggaatatcatcggtctgtggccggaaagatccagaagctctccaaagcagtggcaacttggcatgccaacactgaaagagagcagaagaaggagacagagcggattgaaaaggagagaatgcggcgactgatggctgaagatgaggagggttatagaaaactgattgatcaaaagaaagacaggcgtttagcttaccttttgcagcagaccgatgagtatgtagccaatctgaccaatctggtttgggagcacaagcaagcccaggcagccaaagagaagaagaagaggaggaggaggaagaagaaggctgaggagaatgcagagggtggggagtctgccctgggaccggatggagagcccatagatgagagcagccagatgagtgacctccctgtcaaagtgactcacacagaaaccggcaaggttctgttcggaccagaagcacccaaagcaagtcagctggacgcctggctggaaatgaatcctggttatgaagttgcccctagatctgacagtgaagagagtgattctgattatgaggaagaggatgaggaagaagagtccagtaggcaggaaaccgaagagaaaatactcctggatccaaatagcgaagaagtttctgagaaggatgctaagcagatcattgagacagctaagcaagacgtggatgatgaatacagcatgcagtacagtgccaggggctcccagtcctactacaccgtggctcatgccatctcggagagggtggagaaacagtctgccctcctaattaatgggaccctaaagcattaccagctccagggcctggaatggatggtttccctgtataataacaacttgaacggaatcttagccgatgaaatggggcttggaaagaccatacagaccattgcactcatcacttatctgatggagcacaaaagactcaatggcccctatctcatcattgttcccctttcgactctatctaactggacatatgaatttgacaaatgggctccttctgtggtgaagatttcttacaagggtactcctgccatgcgtcgctcccttgtcccccagctacggagtggcaaattcaatgtcctcttgactacttatgagtatattataaaagacaagcacattcttgcaaagattcggtggaaatacatgatagtggacgaaggccaccgaatgaagaatcaccactgcaagctgactcaggtcttgaacactcactatgtggcccccagaaggatcctcttgactgggaccccgctgcagaataagctccctgaactctgggccctcctcaacttcctcctcccaacaatttttaagagctgcagcacatttgaacaatggttcaatgctccatttgccatgactggtgaaagggtggacttaaatgaagaagaaactatattgatcatcaggcgtctacataaggtgttaagaccatttttactaaggagactgaagaaagaagttgaatcccagcttcccgaaaaagtggaatatgtgatcaagtgtgacatgtcagctctgcagaagattctgtatcgccatatgcaagccaaggggatccttctcacagatggttctgagaaagataagaaggggaaaggaggtgctaagacacttatgaacactattatgcagttgagaaaaatctgcaaccacccatatatgtttcagcacattgaggaatcctttgctgaacacctaggctattcaaatggggtcatcaatggggctgaactgtatcgggcctcagggaagtttgagctgcttgatcgtattctgccaaaattgagagcgactaatcaccgagtgctgcttttctgccagatgacatctctcatgaccatcatggaggattattttgcttttcggaacttcctttacctacgccttgatggcaccaccaagtctgaagatcgtgctgctttgctgaagaaattcaatgaacctggatcccagtatttcattttcttgctgagcacaagagctggtggcctgggcttaaatcttcaggcagctgatacagtggtcatctttgacagcgactggaatcctcatcaggatctgcaggcccaagaccgagctcaccgcatcgggcagcagaacgaggtccgggtactgaggctctgtaccgtgaacagcgtggaggaaaagatcctcgcggccgcaaaatacaagctgaacgtggatcagaaagtgatccaggcgggcatgtttgaccaaaagtcttcaagccacgagcggagggcattcctgcaggccatcttggagcatgaggaggaaaatgaggaagaagatgaagtaccggacgatgagactctgaaccaaatgattgctcgacgagaagaagaatttgacctttttatgcggatggacatggaccggcggagggaagatgcccggaacccgaaacggaagccccgtttaatggaggaggatgagctgccctcctggatcattaaggatgacgctgaagtagaaaggctcacctgtgaagaagaggaggagaaaatatttgggagggggtcccgccagcgccgtgacgtggactacagtgacgccctcacggagaagcagtggctaagggccatcgaagacggcaatttggaggaaatggaagaggaagtacggcttaagaagcgaaaaagacgaagaaatgtggataaagatcctgcaaaagaagatgtggaaaaagctaagaagagaagaggccgccctcccgctgagaaactgtcaccaaatccccccaaactgacaaagcagatgaacgctatcatcgatactgtgataaactacaaagataggtgtaacgtggagaaggtgcccagtaattctcagttggaaatagaaggaaacagttcagggcgacagctcagtgaagtcttcattcagttaccttcaaggaaagaattaccagaatactatgaattaattaggaagccagtggatttcaaaaaaataaaggaaaggattcgtaatcataagtaccggagcctaggcgacctggagaaggatgtcatgcttctctgtcacaacgctcagacgttcaacctggagggatcccagatctatgaagactccatcgtcttacagtcagtgtttaagagtgcccggcagaaaattgccaaagaggaagagagtgaggatgaaagcaatgaagaggaggaagaggaagatgaagaagagtcagagtccgaggcaaaatcagtcaaggtgaaaattaagctcaataaaaaagatgacaaaggccgggacaaagggaaaggcaagaaaaggccaaatcgaggaaaagccaaacctgtagtgagcgattttgacagcgatgaggagcaggatgaacgtgaacagtcagaaggaagtgggacggatgatgagtgatcagtatggacctttttccttggtagaactgaattccttcctcccctgtctcatttctacccagtgagttcatttgtcatataggcactgggttgtttctatatcatcatcgtctataaactagctttaggatagtgccagacaaacatatgatatcatggtgtaaaaaacacacacatacacaaatatttgtaacatattgtgaccaaatgggcctcaaagattcagattgaaacaaacaaaaagcttttgatggaaaatatgtgggtggatagtatatttctatgggtgggtctaatttggtaacggtttgattgtgcctggttttatcacctgttcagatgagaagatttttgtcttttgtagcactgataaccaggagaagccattaaaagccactggttattttatttttcatcaggcaattttcgaggtttttatttgttcggtattgtttttttacactgtggtacatataagcaactttaataggtgataaatgtacagtagttagatttcacctgcatatacatttttccattttatgctctatgatctgaacaaaagctttttgaattgtataagatttatgtctactgtaaacattgcttaatttttttgctcttgatttaaaaaaaagttttgttgaaagcgctattgaatattgcaatctatatagtgtattggatggcttcttttgtcaccctgatctcctatgttaccaatgtgtatcgtctccttctccctaaagtgtacttaatctttgctttctttgcacaatgtctttggttgcaagtcataagcctgaggcaaataaaattccagtaatttcgaa

SEQ ID NO: 187801 - DNA, 2242 bp, Homo sapiens
  Payload ID: 16965
  Gene Symbol: SMARCA2
  Gene Name: SWI/SNF related, matrix associated, actin dependent regulator of chromatin, subfamily a, member 2
  ENST ID: ENST00000302401
  CDS Start-End: 521-1357
acttcattaaatctagaggcagttgagcatgggagccgtctgtatgttgaattagggctcgcactcttgcgcaacacgtcaccagtcggaaactgggggtttgcttctgtgatttatttcattattgtgctggtaaaaggtttggaagggaattctttttgggggtagtactttagcattgtgtagcaagttttggggttttttttgtgtgtgaccccccagcccccagcgctgagtttgagtcagttgagccagtttagtaaataattttttaaaataaaagaacagtttaaaatctccatgaataattttacttacatgcaggagtaatcttactctactctttatgtgcgaaaagcattgggaagtgtttagtgaattgatttccattagaaaaagacccttagaaatcacagaacataaagcactgcatatggatgtgtttggggtctttggggaggagggaagatgttttgtagctctctgcattcctgcataaaaccttagtttgaggggaataatgctgatgaagagactagcagctcgctgctttgctggcttgttaattttatccccactaactgtgatttctgatagccggcctgctgatagtggtaaggccatcgaagacggcaatttggaggaaatggaagaggaagtacggcttaagaagcgaaaaagacgaagaaatgtggataaagatcctgcaaaagaagatgtggaaaaagctaagaagagaagaggccgccctcccgctgagaaactgtcaccaaatccccccaaactgacaaagcagatgaacgctatcatcgatactgtgataaactacaaagatagttcagggcgacagctcagtgaagtcttcattcagttaccttcaaggaaagaattaccagaatactatgaattaattaggaagccagtggatttcaaaaaaataaaggaaaggattcgtaatcataagtaccggagcctaggcgacctggagaaggatgtcatgcttctctgtcacaacgctcagacgttcaacctggagggatcccagatctatgaagactccatcgtcttacagtcagtgtttaagagtgcccggcagaaaattgccaaagaggaagagagtgaggatgaaagcaatgaagaggaggaagaggaagatgaagaagagtcagagtccgaggcaaaatcagtcaaggtgaaaattaagctcaataaaaaagatgacaaaggccgggacaaagggaaaggcaagaaaaggccaaatcgaggaaaagccaaacctgtagtgagcgattttgacagcgatgaggagcaggatgaacgtgaacagtcagaaggaagtgggacggatgatgagtgatcagtatggacctttttccttggtagaactgaattccttcctcccctgtctcatttctacccagtgagttcatttgtcatataggcactgggttgtttctatatcatcatcgtctataaactagctttaggatagtgccagacaaacatatgatatcatggtgtaaaaaacacacacatacacaaatatttgtaacatattgtgaccaaatgggcctcaaagattcagattgaaacaaacaaaaagcttttgatggaaaatatgtgggtggatagtatatttctatgggtgggtctaatttggtaacggtttgattgtgcctggttttatcacctgttcagatgagaagatttttgtcttttgtagcactgataaccaggagaagccattaaaagccactggttattttatttttcatcaggcaattttcgaggtttttatttgttcggtattgtttttttacactgtggtacatataagcaactttaataggtgataaatgtacagtagttagatttcacctgcatatacatttttccattttatgctctatgatctgaacaaaagctttttgaattgtataagatttatgtctactgtaaacattgcttaatttttttgctcttgatttaaaaaaaagttttgttgaaagcgctattgaatattgcaatctatatagtgtattggatggcttcttttgtcaccctgatctcctatgttaccaatgtgtatcgtctccttctccctaaagtgtacttaatctttgctttctttgcacaatgtctttggttgcaagtcataagcctgaggcaaataaaattccagtaatttcgaagaatgtggtgttggtgctttcctaataaagaaataatttagcttgacaaa

SEQ ID NO: 187802 - DNA, 1781 bp, Homo sapiens
  Payload ID: 16965
  Gene Symbol: SMARCA2
  Gene Name: SWI/SNF related, matrix associated, actin dependent regulator of chromatin, subfamily a, member 2
  ENST ID: ENST00000324954
  CDS Start-End: 200-946
ggagaggcggaggtggaaacgatgcgcaggagttggcttggggctttttgtttgcgtgtccctgtttacctattcataatcatggatcccctctgctttgtgatactgtgaaccacgcataacagcaattctttacaccaccgggttgagaagaaggcgcctgaggctgactttctggacctgccgtcacgcagtaaagatgtggttggccatcgaagacggcaatttggaggaaatggaagaggaagtacggcttaagaagcgaaaaagacgaagaaatgtggataaagatcctgcaaaagaagatgtggaaaaagctaagaagagaagaggccgccctcccgctgagaaactgtcaccaaatccccccaaactgacaaagcagatgaacgctatcatcgatactgtgataaactacaaagatagttcagggcgacagctcagtgaagtcttcattcagttaccttcaaggaaagaattaccagaatactatgaattaattaggaagccagtggatttcaaaaaaataaaggaaaggattcgtaatcataagtaccggagcctaggcgacctggagaaggatgtcatgcttctctgtcacaacgctcagacgttcaacctggagggatcccagatctatgaagactccatcgtcttacagtcagtgtttaagagtgcccggcagaaaattgccaaagaggaagagagtgaggatgaaagcaatgaagaggaggaagaggaagatgaagaagagtcagagtccgaggcaaaatcagtcaaggtgaaaattaagctcaataaaaaagatgacaaaggccgggacaaagggaaaggcaagaaaaggccaaatcgaggaaaagccaaacctgtagtgagcgattttgacagcgatgaggagcaggatgaacgtgaacagtcagaaggaagtgggacggatgatgagtgatcagtatggacctttttccttggtagaactgaattccttcctcccctgtctcatttctacccagtgagttcatttgtcatataggcactgggttgtttctatatcatcatcgtctataaactagctttaggatagtgccagacaaacatatgatatcatggtgtaaaaaacacacacatacacaaatatttgtaacatattgtgaccaaatgggcctcaaagattcagattgaaacaaacaaaaagcttttgatggaaaatatgtgggtggatagtatatttctatgggtgggtctaatttggtaacggtttgattgtgcctggttttatcacctgttcagatgagaagatttttgtcttttgtagcactgataaccaggagaagccattaaaagccactggttattttatttttcatcaggcaattttcgaggtttttatttgttcggtattgtttttttacactgtggtacatataagcaactttaataggtgataaatgtacagtagttagatttcacctgcatatacatttttccattttatgctctatgatctgaacaaaagctttttgaattgtataagatttatgtctactgtaaacattgcttaatttttttgctcttgatttaaaaaaaagttttgttgaaagcgctattgaatattgcaatctatatagtgtattggatggcttcttttgtcaccctgatctcctatgttaccaatgtgtatcgtctccttctccctaaagtgtacttaatctttgctttctttgcacaatgtctttggttgcaagtcataagcctgaggcaaataaaattccagtaatttcgaa

SEQ ID NO: 187803 - DNA, 5712 bp, Homo sapiens
  Payload ID: 16965
  Gene Symbol: SMARCA2
  Gene Name: SWI/SNF related, matrix associated, actin dependent regulator of chromatin, subfamily a, member 2
  Uniprot ID: P51531
  ENST ID: ENST00000357248
  CDS Start-End: 113-4831
ctctctccctctgtttctgtactctgggtgactcagagagggaagagattcagccagcacactcctcgcgagcaagcattactctactgactggcagagacaggagaggtagatgtccacgcccacagaccctggtgcgatgccccacccagggccttcgccggggcctgggccttcccctgggccaattcttgggcctagtccaggaccaggaccatccccaggttccgtccacagcatgatggggccaagtcctggacctccaagtgtctcccatcctatgccgacgatggggtccacagacttcccacaggaaggcatgcatcaaatgcataagcccatcgatggtatacatgacaaggggattgtagaagacatccattgtggatccatgaagggcactggtatgcgaccacctcacccaggcatgggccctccccagagtccaatggatcaacacagccaaggttatatgtcaccacacccatctccattaggagccccagagcacgtctccagccctatgtctggaggaggcccaactccacctcagatgccaccaagccagccgggggccctcatcccaggtgatccgcaggccatgagccagcccaacagaggtccctcacctttcagtcctgtccagctgcatcagcttcgagctcagattttagcttataaaatgctggcccgaggccagcccctccccgaaacgctgcagcttgcagtccaggggaaaaggacgttgcctggcttgcagcaacaacagcagcagcaacagcagcagcagcagcagcagcagcagcagcagcagcagcaacagcagccgcagcagcagccgccgcaaccacagacgcagcaacaacagcagccggcccttgttaactacaacagaccatctggcccggggccggagctgagcggcccgagcaccccgcagaagctgccggtgcccgcgcccggcggccggccctcgcccgcgccccccgcagccgcgcagccgcccgcggccgcagtgcccgggccctcagtgccgcagccggccccggggcagccctcgcccgtcctccagctgcagcagaagcagagccgcatcagccccatccagaaaccgcaaggcctggaccccgtggaaattctgcaagagcgggaatacagacttcaggcccgcatagctcataggatacaagaactggaaaatctgcctggctctttgccaccagatttaagaaccaaagcaaccgtggaactaaaagcacttcggttactcaatttccagcgtcagctgagacaggaggtggtggcctgcatgcgcagggacacgaccctggagacggctctcaactccaaagcatacaaacggagcaagcgccagactctgagagaagctcgcatgaccgagaagctggagaagcagcagaagattgagcaggagaggaaacgccgtcagaaacaccaggaatacctgaacagtattttgcaacatgcaaaagattttaaggaatatcatcggtctgtggccggaaagatccagaagctctccaaagcagtggcaacttggcatgccaacactgaaagagagcagaagaaggagacagagcggattgaaaaggagagaatgcggcgactgatggctgaagatgaggagggttatagaaaactgattgatcaaaagaaagacaggcgtttagcttaccttttgcagcagaccgatgagtatgtagccaatctgaccaatctggtttgggagcacaagcaagcccaggcagccaaagagaagaagaagaggaggaggaggaagaagaaggctgaggagaatgcagagggtggggagtctgccctgggaccggatggagagcccatagatgagagcagccagatgagtgacctccctgtcaaagtgactcacacagaaaccggcaaggttctgttcggaccagaagcacccaaagcaagtcagctggacgcctggctggaaatgaatcctggttatgaagttgcccctagatctgacagtgaagagagtgattctgattatgaggaagaggatgaggaagaagagtccagtaggcaggaaaccgaagagaaaatactcctggatccaaatagcgaagaagtttctgagaaggatgctaagcagatcattgagacagctaagcaagacgtggatgatgaatacagcatgcagtacagtgccaggggctcccagtcctactacaccgtggctcatgccatctcggagagggtggagaaacagtctgccctcctaattaatgggaccctaaagcattaccagctccagggcctggaatggatggtttccctgtataataacaacttgaacggaatcttagccgatgaaatggggcttggaaagaccatacagaccattgcactcatcacttatctgatggagcacaaaagactcaatggcccctatctcatcattgttcccctttcgactctatctaactggacatatgaatttgacaaatgggctccttctgtggtgaagatttcttacaagggtactcctgccatgcgtcgctcccttgtcccccagctacggagtggcaaattcaatgtcctcttgactacttatgagtatattataaaagacaagcacattcttgcaaagattcggtggaaatacatgatagtggacgaaggccaccgaatgaagaatcaccactgcaagctgactcaggtcttgaacactcactatgtggcccccagaaggatcctcttgactgggaccccgctgcagaataagctccctgaactctgggccctcctcaacttcctcctcccaacaatttttaagagctgcagcacatttgaacaatggttcaatgctccatttgccatgactggtgaaagggtggacttaaatgaagaagaaactatattgatcatcaggcgtctacataaggtgttaagaccatttttactaaggagactgaagaaagaagttgaatcccagcttcccgaaaaagtggaatatgtgatcaagtgtgacatgtcagctctgcagaagattctgtatcgccatatgcaagccaaggggatccttctcacagatggttctgagaaagataagaaggggaaaggaggtgctaagacacttatgaacactattatgcagttgagaaaaatctgcaaccacccatatatgtttcagcacattgaggaatcctttgctgaacacctaggctattcaaatggggtcatcaatggggctgaactgtatcgggcctcagggaagtttgagctgcttgatcgtattctgccaaaattgagagcgactaatcaccgagtgctgcttttctgccagatgacatctctcatgaccatcatggaggattattttgcttttcggaacttcctttacctacgccttgatggcaccaccaagtctgaagatcgtgctgctttgctgaagaaattcaatgaacctggatcccagtatttcattttcttgctgagcacaagagctggtggcctgggcttaaatcttcaggcagctgatacagtggtcatctttgacagcgactggaatcctcatcaggatctgcaggcccaagaccgagctcaccgcatcgggcagcagaacgaggtccgggtactgaggctctgtaccgtgaacagcgtggaggaaaagatcctcgcggccgcaaaatacaagctgaacgtggatcagaaagtgatccaggcgggcatgtttgaccaaaagtcttcaagccacgagcggagggcattcctgcaggccatcttggagcatgaggaggaaaatgaggaagaagatgaagtaccggacgatgagactctgaaccaaatgattgctcgacgagaagaagaatttgacctttttatgcggatggacatggaccggcggagggaagatgcccggaacccgaaacggaagccccgtttaatggaggaggatgagctgccctcctggatcattaaggatgacgctgaagtagaaaggctcacctgtgaagaagaggaggagaaaatatttgggagggggtcccgccagcgccgtgacgtggactacagtgacgccctcacggagaagcagtggctaagggccatcgaagacggcaatttggaggaaatggaagaggaagtacggcttaagaagcgaaaaagacgaagaaatgtggataaagatcctgcaaaagaagatgtggaaaaagctaagaagagaagaggccgccctcccgctgagaaactgtcaccaaatccccccaaactgacaaagcagatgaacgctatcatcgatactgtgataaactacaaagatagttcagggcgacagctcagtgaagtcttcattcagttaccttcaaggaaagaattaccagaatactatgaattaattaggaagccagtggatttcaaaaaaataaaggaaaggattcgtaatcataagtaccggagcctaggcgacctggagaaggatgtcatgcttctctgtcacaacgctcagacgttcaacctggagggatcccagatctatgaagactccatcgtcttacagtcagtgtttaagagtgcccggcagaaaattgccaaagaggaagagagtgaggatgaaagcaatgaagaggaggaagaggaagatgaagaagagtcagagtccgaggcaaaatcagtcaaggtgaaaattaagctcaataaaaaagatgacaaaggccgggacaaagggaaaggcaagaaaaggccaaatcgaggaaaagccaaacctgtagtgagcgattttgacagcgatgaggagcaggatgaacgtgaacagtcagaaggaagtgggacggatgatgagtgatcagtatggacctttttccttggtagaactgaattccttcctcccctgtctcatttctacccagtgagttcatttgtcatataggcactgggttgtttctatatcatcatcgtctataaactagctttaggatagtgccagacaaacatatgatatcatggtgtaaaaaacacacacatacacaaatatttgtaacatattgtgaccaaatgggcctcaaagattcagattgaaacaaacaaaaagcttttgatggaaaatatgtgggtggatagtatatttctatgggtgggtctaatttggtaacggtttgattgtgcctggttttatcacctgttcagatgagaagatttttgtcttttgtagcactgataaccaggagaagccattaaaagccactggttattttatttttcatcaggcaattttcgaggtttttatttgttcggtattgtttttttacactgtggtacatataagcaactttaataggtgataaatgtacagtagttagatttcacctgcatatacatttttccattttatgctctatgatctgaacaaaagctttttgaattgtataagatttatgtctactgtaaacattgcttaatttttttgctcttgatttaaaaaaaagttttgttgaaagcgctattgaatattgcaatctatatagtgtattggatggcttcttttgtcaccctgatctcctatgttaccaatgtgtatcgtctccttctccctaaagtgtacttaatctttgctttctttgcacaatgtctttggttgcaagtcataagcctgaggcaaataaaattccagtaatttcgaagaatgtggtgttggtgctttcctaataaagaaataatttagcttga

SEQ ID NO: 187804 - DNA, 1178 bp, Homo sapiens
  Payload ID: 16965
  Gene Symbol: SMARCA2
  Gene Name: SWI/SNF related, matrix associated, actin dependent regulator of chromatin, subfamily a, member 2
  ENST ID: ENST00000382183
  CDS Start-End: 165-875
ttcattaaatctagaggcagttgagcatgggagccgtctgtatgttgaattagggctcgcactcttgcgcaacacgtcaccagtcggaaactgggggtttgcttctgtgatttatttcattattgtgctggtaaaaggccatcgaagacggcaatttggaggaaatggaagaggaagtacggcttaagaagcgaaaaagacgaagaaatgtggataaagatcctgcaaaagaagatgtggaaaaagctaagaagagaagaggccgccctcccgctgagaaactgtcaccaaatccccccaaactgacaaagcagatgaacgctatcatcgatactgtgataaactacaaagatagttcagggcgacagctcagtgaagtcttcattcagttaccttcaaggaaagaattaccagaatactatgaattaattaggaagccagtggatttcaaaaaaataaaggaaaggattcgtaatcataagtaccggagcctaggcgacctggagaaggatgtcatgcttctctgtcacaacgctcagacgttcaacctggagggatcccagatctatgaagactccatcgtcttacagtcagtgtttaagagtgcccggcagaaaattgccaaagaggaagagagtgaggatgaaagcaatgaagaggaggaagaggaagatgaagaagagtcagagtccgaggcaaaatcagtcaaggtgaaaattaagctcaataaaaaagatgacaaaggccgggacaaagggaaaggcaagaaaaggccaaatcgaggaaaagccaaacctgtagtgagcgattttgacagcgatgaggagcaggatgaacgtgaacagtcagaaggaagtgggacggatgatgagtgatcagtatggacctttttccttggtagaactgaattccttcctcccctgtctcatttctacccagtgagttcatttgtcatataggcactgggttgtttctatatcatcatcgtctataaactagctttaggatagtgccagacaaacatatgatatcatggtgtaaaaaacacacacatacacaaatatttgtaacatattgtgaccaaatgggcctcaaagattcagattgaaacaaacaaaaagcttttgatggaaaatatgtgggtggatagtatatttctatgggtgggtctaatttgg

SEQ ID NO: 187805 - DNA, 1584 bp, Homo sapiens
  Payload ID: 16965
  Gene Symbol: SMARCA2
  Gene Name: SWI/SNF related, matrix associated, actin dependent regulator of chromatin, subfamily a, member 2
  ENST ID: ENST00000382185
  CDS Start-End: 106-936
attcacttcattaaatctagaggcagttgagcatgggagccgtctgtatgttgaattagggctcgcactcttgcgcaacacgtcaccagtcggaaactggggctgatgaagagactagcagctcgctgctttgctggcttgttaattttatccccactaactgtgatttctgatagccggcctgctgatagtggtaaggccatcgaagacggcaatttggaggaaatggaagaggaagtacggcttaagaagcgaaaaagacgaagaaatgtggataaagatcctgcaaaagaagatgtggaaaaagctaagaagagaagaggccgccctcccgctgagaaactgtcaccaaatccccccaaactgacaaagcagatgaacgctatcatcgatactgtgataaactacaaagatagttcagggcgacagctcagtgaagtcttcattcagttaccttcaaggaaagaattaccagaatactatgaattaattaggaagccagtggatttcaaaaaaataaaggaaaggattcgtaatcataagtaccggagcctaggcgacctggagaaggatgtcatgcttctctgtcacaacgctcagacgttcaacctggagggatcccagatctatgaagactccatcgtcttacagtcagtgtttaagagtgcccggcagaaaattgccaaagaggaagagagtgaggatgaaagcaatgaagaggaggaagaggaagatgaagaagagtcagagtccgaggcaaaatcagtcaaggtgaaaattaagctcaataaaaaagatgacaaaggccgggacaaagggaaaggcaagaaaaggccaaatcgaggaaaagccaaacctgtagtgagcgattttgacagcgatgaggagcaggatgaacgtgaacagtcagaaggaagtgggacggatgatgagtgatcagtatggacctttttccttggtagaactgaattccttcctcccctgtctcatttctacccagtgagttcatttgtcatataggcactgggttgtttctatatcatcatcgtctataaactagctttaggatagtgccagacaaacatatgatatcatggtgtaaaaaacacacacatacacaaatatttgtaacatattgtgaccaaatgggcctcaaagattcagattgaaacaaacaaaaagcttttgatggaaaatatgtgggtggatagtatatttctatgggtgggtctaatttggtaacggtttgattgtgcctggttttatcacctgttcagatgagaagatttttgtcttttgtagcactgataaccaggagaagccattaaaagccactggttattttatttttcatcaggcaattttcgaggtttttatttgttcggtattgtttttttacactgtggtacatataagcaactttaataggtgataaatgtacagtagttagatttcacctgcatatacatttttccattttatgctctatgatctgaacaaaagctttttgaattgtataagatttatgtctactgtaaacattgcttaatttttttgctcttgatttaaaaaaaagttttgttg

SEQ ID NO: 187806 - DNA, 955 bp, Homo sapiens
  Payload ID: 16965
  Gene Symbol: SMARCA2
  Gene Name: SWI/SNF related, matrix associated, actin dependent regulator of chromatin, subfamily a, member 2
  ENST ID: ENST00000382186
  CDS Start-End: 178-942
ggcagttgagcatgggagccgtctgtatgttgaattagggctcgcactcttgcgcaacacgtcaccagtcggaaactgggggtttgcttctgtgatttatttcattattgtgctgtgctgctggctctggtttaaagcaagcgtttgcaggccatcgaagacggcaatttggaggaaatggaagaggaagtacggcttaagaagcgaaaaagacgaagaaatgtggataaagatcctgcaaaagaagatgtggaaaaagctaagaagagaagaggccgccctcccgctgagaaactgtcaccaaatccccccaaactgacaaagcagatgaacgctatcatcgatactgtgataaactacaaagataggtgtaacgtggagaaggtgcccagtaattctcagttggaaatagaaggaaacagttcagggcgacagctcagtgaagtcttcattcagttaccttcaaggaaagaattaccagaatactatgaattaattaggaagccagtggatttcaaaaaaataaaggaaaggattcgtaatcataagtaccggagcctaggcgacctggagaaggatgtcatgcttctctgtcacaacgctcagacgttcaacctggagggatcccagatctatgaagactccatcgtcttacagtcagtgtttaagagtgcccggcagaaaattgccaaagaggaagagagtgaggatgaaagcaatgaagaggaggaagaggaagatgaagaagagtcagagtccgaggcaaaatcagtcaaggtgaaaattaagctcaataaaaaagatgacaaaggccgggacaaagggaaaggcaagaaaaggccaaatcgaggaaaagccaaacctgtagtgagcgattttgacagcgatgaggagcaggatgaacgtgaacagtcagaaggaagtgggacggatgatgagtgatcagtatggacct

SEQ ID NO: 187807 - DNA, 5679 bp, Homo sapiens
  Payload ID: 16965
  Gene Symbol: SMARCA2
  Gene Name: SWI/SNF related, matrix associated, actin dependent regulator of chromatin, subfamily a, member 2
  Uniprot ID: P51531
  ENST ID: ENST00000382194
  CDS Start-End: 123-4841
gtgcgcgcaggagccagtgcgtcgggagcagcggctcgggcagctgctcctgcccgcaccctcccctggagcccggggaggacaagcattactctactgactggcagagacaggagaggtagatgtccacgcccacagaccctggtgcgatgccccacccagggccttcgccggggcctgggccttcccctgggccaattcttgggcctagtccaggaccaggaccatccccaggttccgtccacagcatgatggggccaagtcctggacctccaagtgtctcccatcctatgccgacgatggggtccacagacttcccacaggaaggcatgcatcaaatgcataagcccatcgatggtatacatgacaaggggattgtagaagacatccattgtggatccatgaagggcactggtatgcgaccacctcacccaggcatgggccctccccagagtccaatggatcaacacagccaaggttatatgtcaccacacccatctccattaggagccccagagcacgtctccagccctatgtctggaggaggcccaactccacctcagatgccaccaagccagccgggggccctcatcccaggtgatccgcaggccatgagccagcccaacagaggtccctcacctttcagtcctgtccagctgcatcagcttcgagctcagattttagcttataaaatgctggcccgaggccagcccctccccgaaacgctgcagcttgcagtccaggggaaaaggacgttgcctggcttgcagcaacaacagcagcagcaacagcagcagcagcagcagcagcagcagcagcagcagcagcaacagcagccgcagcagcagccgccgcaaccacagacgcagcaacaacagcagccggcccttgttaactacaacagaccatctggcccggggccggagctgagcggcccgagcaccccgcagaagctgccggtgcccgcgcccggcggccggccctcgcccgcgccccccgcagccgcgcagccgcccgcggccgcagtgcccgggccctcagtgccgcagccggccccggggcagccctcgcccgtcctccagctgcagcagaagcagagccgcatcagccccatccagaaaccgcaaggcctggaccccgtggaaattctgcaagagcgggaatacagacttcaggcccgcatagctcataggatacaagaactggaaaatctgcctggctctttgccaccagatttaagaaccaaagcaaccgtggaactaaaagcacttcggttactcaatttccagcgtcagctgagacaggaggtggtggcctgcatgcgcagggacacgaccctggagacggctctcaactccaaagcatacaaacggagcaagcgccagactctgagagaagctcgcatgaccgagaagctggagaagcagcagaagattgagcaggagaggaaacgccgtcagaaacaccaggaatacctgaacagtattttgcaacatgcaaaagattttaaggaatatcatcggtctgtggccggaaagatccagaagctctccaaagcagtggcaacttggcatgccaacactgaaagagagcagaagaaggagacagagcggattgaaaaggagagaatgcggcgactgatggctgaagatgaggagggttatagaaaactgattgatcaaaagaaagacaggcgtttagcttaccttttgcagcagaccgatgagtatgtagccaatctgaccaatctggtttgggagcacaagcaagcccaggcagccaaagagaagaagaagaggaggaggaggaagaagaaggctgaggagaatgcagagggtggggagtctgccctgggaccggatggagagcccatagatgagagcagccagatgagtgacctccctgtcaaagtgactcacacagaaaccggcaaggttctgttcggaccagaagcacccaaagcaagtcagctggacgcctggctggaaatgaatcctggttatgaagttgcccctagatctgacagtgaagagagtgattctgattatgaggaagaggatgaggaagaagagtccagtaggcaggaaaccgaagagaaaatactcctggatccaaatagcgaagaagtttctgagaaggatgctaagcagatcattgagacagctaagcaagacgtggatgatgaatacagcatgcagtacagtgccaggggctcccagtcctactacaccgtggctcatgccatctcggagagggtggagaaacagtctgccctcctaattaatgggaccctaaagcattaccagctccagggcctggaatggatggtttccctgtataataacaacttgaacggaatcttagccgatgaaatggggcttggaaagaccatacagaccattgcactcatcacttatctgatggagcacaaaagactcaatggcccctatctcatcattgttcccctttcgactctatctaactggacatatgaatttgacaaatgggctccttctgtggtgaagatttcttacaagggtactcctgccatgcgtcgctcccttgtcccccagctacggagtggcaaattcaatgtcctcttgactacttatgagtatattataaaagacaagcacattcttgcaaagattcggtggaaatacatgatagtggacgaaggccaccgaatgaagaatcaccactgcaagctgactcaggtcttgaacactcactatgtggcccccagaaggatcctcttgactgggaccccgctgcagaataagctccctgaactctgggccctcctcaacttcctcctcccaacaatttttaagagctgcagcacatttgaacaatggttcaatgctccatttgccatgactggtgaaagggtggacttaaatgaagaagaaactatattgatcatcaggcgtctacataaggtgttaagaccatttttactaaggagactgaagaaagaagttgaatcccagcttcccgaaaaagtggaatatgtgatcaagtgtgacatgtcagctctgcagaagattctgtatcgccatatgcaagccaaggggatccttctcacagatggttctgagaaagataagaaggggaaaggaggtgctaagacacttatgaacactattatgcagttgagaaaaatctgcaaccacccatatatgtttcagcacattgaggaatcctttgctgaacacctaggctattcaaatggggtcatcaatggggctgaactgtatcgggcctcagggaagtttgagctgcttgatcgtattctgccaaaattgagagcgactaatcaccgagtgctgcttttctgccagatgacatctctcatgaccatcatggaggattattttgcttttcggaacttcctttacctacgccttgatggcaccaccaagtctgaagatcgtgctgctttgctgaagaaattcaatgaacctggatcccagtatttcattttcttgctgagcacaagagctggtggcctgggcttaaatcttcaggcagctgatacagtggtcatctttgacagcgactggaatcctcatcaggatctgcaggcccaagaccgagctcaccgcatcgggcagcagaacgaggtccgggtactgaggctctgtaccgtgaacagcgtggaggaaaagatcctcgcggccgcaaaatacaagctgaacgtggatcagaaagtgatccaggcgggcatgtttgaccaaaagtcttcaagccacgagcggagggcattcctgcaggccatcttggagcatgaggaggaaaatgaggaagaagatgaagtaccggacgatgagactctgaaccaaatgattgctcgacgagaagaagaatttgacctttttatgcggatggacatggaccggcggagggaagatgcccggaacccgaaacggaagccccgtttaatggaggaggatgagctgccctcctggatcattaaggatgacgctgaagtagaaaggctcacctgtgaagaagaggaggagaaaatatttgggagggggtcccgccagcgccgtgacgtggactacagtgacgccctcacggagaagcagtggctaagggccatcgaagacggcaatttggaggaaatggaagaggaagtacggcttaagaagcgaaaaagacgaagaaatgtggataaagatcctgcaaaagaagatgtggaaaaagctaagaagagaagaggccgccctcccgctgagaaactgtcaccaaatccccccaaactgacaaagcagatgaacgctatcatcgatactgtgataaactacaaagatagttcagggcgacagctcagtgaagtcttcattcagttaccttcaaggaaagaattaccagaatactatgaattaattaggaagccagtggatttcaaaaaaataaaggaaaggattcgtaatcataagtaccggagcctaggcgacctggagaaggatgtcatgcttctctgtcacaacgctcagacgttcaacctggagggatcccagatctatgaagactccatcgtcttacagtcagtgtttaagagtgcccggcagaaaattgccaaagaggaagagagtgaggatgaaagcaatgaagaggaggaagaggaagatgaagaagagtcagagtccgaggcaaaatcagtcaaggtgaaaattaagctcaataaaaaagatgacaaaggccgggacaaagggaaaggcaagaaaaggccaaatcgaggaaaagccaaacctgtagtgagcgattttgacagcgatgaggagcaggatgaacgtgaacagtcagaaggaagtgggacggatgatgagtgatcagtatggacctttttccttggtagaactgaattccttcctcccctgtctcatttctacccagtgagttcatttgtcatataggcactgggttgtttctatatcatcatcgtctataaactagctttaggatagtgccagacaaacatatgatatcatggtgtaaaaaacacacacatacacaaatatttgtaacatattgtgaccaaatgggcctcaaagattcagattgaaacaaacaaaaagcttttgatggaaaatatgtgggtggatagtatatttctatgggtgggtctaatttggtaacggtttgattgtgcctggttttatcacctgttcagatgagaagatttttgtcttttgtagcactgataaccaggagaagccattaaaagccactggttattttatttttcatcaggcaattttcgaggtttttatttgttcggtattgtttttttacactgtggtacatataagcaactttaataggtgataaatgtacagtagttagatttcacctgcatatacatttttccattttatgctctatgatctgaacaaaagctttttgaattgtataagatttatgtctactgtaaacattgcttaatttttttgctcttgatttaaaaaaaagttttgttgaaagcgctattgaatattgcaatctatatagtgtattggatggcttcttttgtcaccctgatctcctatgttaccaatgtgtatcgtctccttctccctaaagtgtacttaatctttgctttctttgcacaatgtctttggttgcaagtcataagcctgaggcaaataaaattccagtaatttcgaagaa

SEQ ID NO: 187808 - DNA, 5867 bp, Homo sapiens
  Payload ID: 16965
  Gene Symbol: SMARCA2
  Gene Name: SWI/SNF related, matrix associated, actin dependent regulator of chromatin, subfamily a, member 2
  Uniprot ID: P51531
  ENST ID: ENST00000382203
  CDS Start-End: 210-4982
tcagaagaaagccccgagatcacagagacccggcgagatcacagagacccggcctgaaggaacgtggaaagaccaatgtacctgttttgaccggttgcctggagcaagaagttccagttggggagaattttcagaagataaagtcggagattgtggaaagacttgacttgcagcattactctactgactggcagagacaggagaggtagatgtccacgcccacagaccctggtgcgatgccccacccagggccttcgccggggcctgggccttcccctgggccaattcttgggcctagtccaggaccaggaccatccccaggttccgtccacagcatgatggggccaagtcctggacctccaagtgtctcccatcctatgccgacgatggggtccacagacttcccacaggaaggcatgcatcaaatgcataagcccatcgatggtatacatgacaaggggattgtagaagacatccattgtggatccatgaagggcactggtatgcgaccacctcacccaggcatgggccctccccagagtccaatggatcaacacagccaaggttatatgtcaccacacccatctccattaggagccccagagcacgtctccagccctatgtctggaggaggcccaactccacctcagatgccaccaagccagccgggggccctcatcccaggtgatccgcaggccatgagccagcccaacagaggtccctcacctttcagtcctgtccagctgcatcagcttcgagctcagattttagcttataaaatgctggcccgaggccagcccctccccgaaacgctgcagcttgcagtccaggggaaaaggacgttgcctggcttgcagcaacaacagcagcagcaacagcagcagcagcagcagcagcagcagcagcagcagcagcaacagcagccgcagcagcagccgccgcaaccacagacgcagcaacaacagcagccggcccttgttaactacaacagaccatctggcccggggccggagctgagcggcccgagcaccccgcagaagctgccggtgcccgcgcccggcggccggccctcgcccgcgccccccgcagccgcgcagccgcccgcggccgcagtgcccgggccctcagtgccgcagccggccccggggcagccctcgcccgtcctccagctgcagcagaagcagagccgcatcagccccatccagaaaccgcaaggcctggaccccgtggaaattctgcaagagcgggaatacagacttcaggcccgcatagctcataggatacaagaactggaaaatctgcctggctctttgccaccagatttaagaaccaaagcaaccgtggaactaaaagcacttcggttactcaatttccagcgtcagctgagacaggaggtggtggcctgcatgcgcagggacacgaccctggagacggctctcaactccaaagcatacaaacggagcaagcgccagactctgagagaagctcgcatgaccgagaagctggagaagcagcagaagattgagcaggagaggaaacgccgtcagaaacaccaggaatacctgaacagtattttgcaacatgcaaaagattttaaggaatatcatcggtctgtggccggaaagatccagaagctctccaaagcagtggcaacttggcatgccaacactgaaagagagcagaagaaggagacagagcggattgaaaaggagagaatgcggcgactgatggctgaagatgaggagggttatagaaaactgattgatcaaaagaaagacaggcgtttagcttaccttttgcagcagaccgatgagtatgtagccaatctgaccaatctggtttgggagcacaagcaagcccaggcagccaaagagaagaagaagaggaggaggaggaagaagaaggctgaggagaatgcagagggtggggagtctgccctgggaccggatggagagcccatagatgagagcagccagatgagtgacctccctgtcaaagtgactcacacagaaaccggcaaggttctgttcggaccagaagcacccaaagcaagtcagctggacgcctggctggaaatgaatcctggttatgaagttgcccctagatctgacagtgaagagagtgattctgattatgaggaagaggatgaggaagaagagtccagtaggcaggaaaccgaagagaaaatactcctggatccaaatagcgaagaagtttctgagaaggatgctaagcagatcattgagacagctaagcaagacgtggatgatgaatacagcatgcagtacagtgccaggggctcccagtcctactacaccgtggctcatgccatctcggagagggtggagaaacagtctgccctcctaattaatgggaccctaaagcattaccagctccagggcctggaatggatggtttccctgtataataacaacttgaacggaatcttagccgatgaaatggggcttggaaagaccatacagaccattgcactcatcacttatctgatggagcacaaaagactcaatggcccctatctcatcattgttcccctttcgactctatctaactggacatatgaatttgacaaatgggctccttctgtggtgaagatttcttacaagggtactcctgccatgcgtcgctcccttgtcccccagctacggagtggcaaattcaatgtcctcttgactacttatgagtatattataaaagacaagcacattcttgcaaagattcggtggaaatacatgatagtggacgaaggccaccgaatgaagaatcaccactgcaagctgactcaggtcttgaacactcactatgtggcccccagaaggatcctcttgactgggaccccgctgcagaataagctccctgaactctgggccctcctcaacttcctcctcccaacaatttttaagagctgcagcacatttgaacaatggttcaatgctccatttgccatgactggtgaaagggtggacttaaatgaagaagaaactatattgatcatcaggcgtctacataaggtgttaagaccatttttactaaggagactgaagaaagaagttgaatcccagcttcccgaaaaagtggaatatgtgatcaagtgtgacatgtcagctctgcagaagattctgtatcgccatatgcaagccaaggggatccttctcacagatggttctgagaaagataagaaggggaaaggaggtgctaagacacttatgaacactattatgcagttgagaaaaatctgcaaccacccatatatgtttcagcacattgaggaatcctttgctgaacacctaggctattcaaatggggtcatcaatggggctgaactgtatcgggcctcagggaagtttgagctgcttgatcgtattctgccaaaattgagagcgactaatcaccgagtgctgcttttctgccagatgacatctctcatgaccatcatggaggattattttgcttttcggaacttcctttacctacgccttgatggcaccaccaagtctgaagatcgtgctgctttgctgaagaaattcaatgaacctggatcccagtatttcattttcttgctgagcacaagagctggtggcctgggcttaaatcttcaggcagctgatacagtggtcatctttgacagcgactggaatcctcatcaggatctgcaggcccaagaccgagctcaccgcatcgggcagcagaacgaggtccgggtactgaggctctgtaccgtgaacagcgtggaggaaaagatcctcgcggccgcaaaatacaagctgaacgtggatcagaaagtgatccaggcgggcatgtttgaccaaaagtcttcaagccacgagcggagggcattcctgcaggccatcttggagcatgaggaggaaaatgaggaagaagatgaagtaccggacgatgagactctgaaccaaatgattgctcgacgagaagaagaatttgacctttttatgcggatggacatggaccggcggagggaagatgcccggaacccgaaacggaagccccgtttaatggaggaggatgagctgccctcctggatcattaaggatgacgctgaagtagaaaggctcacctgtgaagaagaggaggagaaaatatttgggagggggtcccgccagcgccgtgacgtggactacagtgacgccctcacggagaagcagtggctaagggccatcgaagacggcaatttggaggaaatggaagaggaagtacggcttaagaagcgaaaaagacgaagaaatgtggataaagatcctgcaaaagaagatgtggaaaaagctaagaagagaagaggccgccctcccgctgagaaactgtcaccaaatccccccaaactgacaaagcagatgaacgctatcatcgatactgtgataaactacaaagataggtgtaacgtggagaaggtgcccagtaattctcagttggaaatagaaggaaacagttcagggcgacagctcagtgaagtcttcattcagttaccttcaaggaaagaattaccagaatactatgaattaattaggaagccagtggatttcaaaaaaataaaggaaaggattcgtaatcataagtaccggagcctaggcgacctggagaaggatgtcatgcttctctgtcacaacgctcagacgttcaacctggagggatcccagatctatgaagactccatcgtcttacagtcagtgtttaagagtgcccggcagaaaattgccaaagaggaagagagtgaggatgaaagcaatgaagaggaggaagaggaagatgaagaagagtcagagtccgaggcaaaatcagtcaaggtgaaaattaagctcaataaaaaagatgacaaaggccgggacaaagggaaaggcaagaaaaggccaaatcgaggaaaagccaaacctgtagtgagcgattttgacagcgatgaggagcaggatgaacgtgaacagtcagaaggaagtgggacggatgatgagtgatcagtatggacctttttccttggtagaactgaattccttcctcccctgtctcatttctacccagtgagttcatttgtcatataggcactgggttgtttctatatcatcatcgtctataaactagctttaggatagtgccagacaaacatatgatatcatggtgtaaaaaacacacacatacacaaatatttgtaacatattgtgaccaaatgggcctcaaagattcagattgaaacaaacaaaaagcttttgatggaaaatatgtgggtggatagtatatttctatgggtgggtctaatttggtaacggtttgattgtgcctggttttatcacctgttcagatgagaagatttttgtcttttgtagcactgataaccaggagaagccattaaaagccactggttattttatttttcatcaggcaattttcgaggtttttatttgttcggtattgtttttttacactgtggtacatataagcaactttaataggtgataaatgtacagtagttagatttcacctgcatatacatttttccattttatgctctatgatctgaacaaaagctttttgaattgtataagatttatgtctactgtaaacattgcttaatttttttgctcttgatttaaaaaaaagttttgttgaaagcgctattgaatattgcaatctatatagtgtattggatggcttcttttgtcaccctgatctcctatgttaccaatgtgtatcgtctccttctccctaaagtgtacttaatctttgctttctttgcacaatgtctttggttgcaagtcataagcctgaggcaaataaaattccagtaatttcgaagaatgtggtgttggtgctttcctaataaagaaataatttagcttgacaaa

SEQ ID NO: 187809 - DNA, 980 bp, Homo sapiens
  Payload ID: 16965
  Gene Symbol: SMARCA2
  Gene Name: SWI/SNF related, matrix associated, actin dependent regulator of chromatin, subfamily a, member 2
  ENST ID: ENST00000417599
  CDS Start-End: 131-961
attaaatctagaggcagttgagcatgggagccgtctgtatgttgaattagggctcgcactcttgcgcaacacgtcaccagtcggaaactgggggtttgcttctgtgatttatttcattattgtgctgctgatgaagagactagcagctcgctgctttgctggcttgttaattttatccccactaactgtgatttctgatagccggcctgctgatagtggtaaggccatcgaagacggcaatttggaggaaatggaagaggaagtacggcttaagaagcgaaaaagacgaagaaatgtggataaagatcctgcaaaagaagatgtggaaaaagctaagaagagaagaggccgccctcccgctgagaaactgtcaccaaatccccccaaactgacaaagcagatgaacgctatcatcgatactgtgataaactacaaagatagttcagggcgacagctcagtgaagtcttcattcagttaccttcaaggaaagaattaccagaatactatgaattaattaggaagccagtggatttcaaaaaaataaaggaaaggattcgtaatcataagtaccggagcctaggcgacctggagaaggatgtcatgcttctctgtcacaacgctcagacgttcaacctggagggatcccagatctatgaagactccatcgtcttacagtcagtgtttaagagtgcccggcagaaaattgccaaagaggaagagagtgaggatgaaagcaatgaagaggaggaagaggaagatgaagaagagtcagagtccgaggcaaaatcagtcaaggtgaaaattaagctcaataaaaaagatgacaaaggccgggacaaagggaaaggcaagaaaaggccaaatcgaggaaaagccaaacctgtagtgagcgattttgacagcgatgaggagcaggatgaacgtgaacagtcagaaggaagtgggacggatgatgagtgatcagtatggacctttttcc

SEQ ID NO: 187810 - DNA, 5602 bp, Homo sapiens
  Payload ID: 16965
  Gene Symbol: SMARCA2
  Gene Name: SWI/SNF related, matrix associated, actin dependent regulator of chromatin, subfamily a, member 2
  ENST ID: ENST00000450198
  CDS Start-End: 223-4767
gcgtcttccggcgcccgcggaggaggcgagggtgggacgctgggcggagcccgagtttaggaagaggaggggacggctgtcatcaatgaagtcatattcataatctagtcctctctccctctgtttctgtactctgggtgactcagagagggaagagattcagccagcacactcctcgcgagcaagcattactctactgactggcagagacaggagaggtagatgtccacgcccacagaccctggtgcgatgccccacccagggccttcgccggggcctgggccttcccctgggccaattcttgggcctagtccaggaccaggaccatccccaggttccgtccacagcatgatggggccaagtcctggacctccaagtgtctcccatcctatgccgacgatggggtccacagacttcccacaggaaggcatgcatcaaatgcataagcccatcgatggtatacatgacaaggggattgtagaagacatccattgtggatccatgaagggcactggtatgcgaccacctcacccaggcatgggccctccccagagtccaatggatcaacacagccaaggttatatgtcaccacacccatctccattaggagccccagagcacgtctccagccctatgtctggaggaggcccaactccacctcagatgccaccaagccagccgggggccctcatcccaggtgatccgcaggccatgagccagcccaacagaggtccctcacctttcagtcctgtccagctgcatcagcttcgagctcagattttagcttataaaatgctggcccgaggccagcccctccccgaaacgctgcagcttgcagtccaggggaaaaggacgttgcctggcttgcagcaacaacagcagcagcaacagcagcagcagcagcagcagcagcagcagcagcagcagcaacagcagccgcagcagcagccgccgcaaccacagacgcagcaacaacagcagccggcccttgttaactacaacagaccatctggcccggggccggagctgagcggcccgagcaccccgcagaagctgccggtgcccgcgcccggcggccggccctcgcccgcgccccccgcagccgcgcagccgcccgcggccgcagtgcccgggccctcagtgccgcagccggccccggggcagccctcgcccgtcctccagctgcagcagaagcagagccgcatcagccccatccagaaaccgcaaggcctggaccccgtggaaattctgcaagagcgggaatacagacttcaggcccgcatagctcataggatacaagaactggaaaatctgcctggctctttgccaccagatttaagaaccaaagcaaccgtggaactaaaagcacttcggttactcaatttccagcgtcagctgagacaggaggtggtggcctgcatgcgcagggacacgaccctggagacggctctcaactccaaagcatacaaacggagcaagcgccagactctgagagaagctcgcatgaccgagaagctggagaagcagcagaagattgagcaggagaggaaacgccgtcagaaacaccaggaatacctgaacagtattttgcaacatgcaaaagattttaaggaatatcatcggtctgtggccggaaagatccagaagctctccaaagcagtggcaacttggcatgccaacactgaaagagagcagaagaaggagacagagcggattgaaaaggagagaatgcggcgactgatggctgaagatgaggagggttatagaaaactgattgatcaaaagaaagacaggcgtttagcttaccttttgcagcagaccgatgagtatgtagccaatctgaccaatctggtttgggagcacaagcaagcccaggcagccaaagagaagaagaagaggaggaggaggaagaagaaggctgaggagaatgcagagggtggggagtctgccctgggaccggatggagagcccatagatgagagcagccagatgagtgacctccctgtcaaagtgactcacacagaaaccggcaaggttctgttcggaccagaagcacccaaagcaagtcagctggacgcctggctggaaatgaatcctggttatgaagttgcccctagatctgacagtgaagagagtgattctgattatgaggaagaggatgaggaagaagagtccagtaggcaggaaaccgaagagaaaatactcctggatccaaatagcgaagaagtttctgagaaggatgctaagcagatcattgagacagctaagcaagacgtggatgatgaatacagcatgcagtacagtgccaggggctcccagtcctactacaccgtggctcatgccatctcggagagggtggagaaacagtctgccctcctaattaatgggaccctaaagcattaccagctccagggcctggaatggatggtttccctgtataataacaacttgaacggaatcttagccgatgaaatggggcttggaaagaccatacagaccattgcactcatcacttatctgatggagcacaaaagactcaatggcccctatctcatcattgttcccctttcgactctatctaactggacatatgaatttgacaaatgggctccttctgtggtgaagatttcttacaagggtactcctgccatgcgtcgctcccttgtcccccagctacggagtggcaaattcaatgtcctcttgactacttatgagtatattataaaagacaagcacattcttgcaaagattcggtggaaatacatgatagtggacgaaggccaccgaatgaagaatcaccactgcaagctgactcaggtggacttaaatgaagaagaaactatattgatcatcaggcgtctacataaggtgttaagaccatttttactaaggagactgaagaaagaagttgaatcccagcttcccgaaaaagtggaatatgtgatcaagtgtgacatgtcagctctgcagaagattctgtatcgccatatgcaagccaaggggatccttctcacagatggttctgagaaagataagaaggggaaaggaggtgctaagacacttatgaacactattatgcagttgagaaaaatctgcaaccacccatatatgtttcagcacattgaggaatcctttgctgaacacctaggctattcaaatggggtcatcaatggggctgaactgtatcgggcctcagggaagtttgagctgcttgatcgtattctgccaaaattgagagcgactaatcaccgagtgctgcttttctgccagatgacatctctcatgaccatcatggaggattattttgcttttcggaacttcctttacctacgccttgatggcaccaccaagtctgaagatcgtgctgctttgctgaagaaattcaatgaacctggatcccagtatttcattttcttgctgagcacaagagctggtggcctgggcttaaatcttcaggcagctgatacagtggtcatctttgacagcgactggaatcctcatcaggatctgcaggcccaagaccgagctcaccgcatcgggcagcagaacgaggtccgggtactgaggctctgtaccgtgaacagcgtggaggaaaagatcctcgcggccgcaaaatacaagctgaacgtggatcagaaagtgatccaggcgggcatgtttgaccaaaagtcttcaagccacgagcggagggcattcctgcaggccatcttggagcatgaggaggaaaatgaggaagaagatgaagtaccggacgatgagactctgaaccaaatgattgctcgacgagaagaagaatttgacctttttatgcggatggacatggaccggcggagggaagatgcccggaacccgaaacggaagccccgtttaatggaggaggatgagctgccctcctggatcattaaggatgacgctgaagtagaaaggctcacctgtgaagaagaggaggagaaaatatttgggagggggtcccgccagcgccgtgacgtggactacagtgacgccctcacggagaagcagtggctaagggccatcgaagacggcaatttggaggaaatggaagaggaagtacggcttaagaagcgaaaaagacgaagaaatgtggataaagatcctgcaaaagaagatgtggaaaaagctaagaagagaagaggccgccctcccgctgagaaactgtcaccaaatccccccaaactgacaaagcagatgaacgctatcatcgatactgtgataaactacaaagatagttcagggcgacagctcagtgaagtcttcattcagttaccttcaaggaaagaattaccagaatactatgaattaattaggaagccagtggatttcaaaaaaataaaggaaaggattcgtaatcataagtaccggagcctaggcgacctggagaaggatgtcatgcttctctgtcacaacgctcagacgttcaacctggagggatcccagatctatgaagactccatcgtcttacagtcagtgtttaagagtgcccggcagaaaattgccaaagaggaagagagtgaggatgaaagcaatgaagaggaggaagaggaagatgaagaagagtcagagtccgaggcaaaatcagtcaaggtgaaaattaagctcaataaaaaagatgacaaaggccgggacaaagggaaaggcaagaaaaggccaaatcgaggaaaagccaaacctgtagtgagcgattttgacagcgatgaggagcaggatgaacgtgaacagtcagaaggaagtgggacggatgatgagtgatcagtatggacctttttccttggtagaactgaattccttcctcccctgtctcatttctacccagtgagttcatttgtcatataggcactgggttgtttctatatcatcatcgtctataaactagctttaggatagtgccagacaaacatatgatatcatggtgtaaaaaacacacacatacacaaatatttgtaacatattgtgaccaaatgggcctcaaagattcagattgaaacaaacaaaaagcttttgatggaaaatatgtgggtggatagtatatttctatgggtgggtctaatttggtaacggtttgattgtgcctggttttatcacctgttcagatgagaagatttttgtcttttgtagcactgataaccaggagaagccattaaaagccactggttattttatttttcatcaggcaattttcgaggtttttatttgttcggtattgtttttttacactgtggtacatataagcaactttaataggtgataaatgtacagtagttagatttcacctgcatatacatttttccattttatgctctatgatctgaacaaaagctttttgaattgtataagatttatgtctactgtaaacattgcttaatttttttgctcttgatttaaaaaaaagttttgttgaaagcgctattgaatattgcaatctatatagtgtattggatggcttcttttgtcaccctgatctcctatgttaccaatgtgtatcgtctccttctccctaaagtgtacttaatctttgctttctttgcacaatgtctttggttgcaagtcataagcctgaggcaaataaaattccagtaatttcgaa

SEQ ID NO: 187811 - DNA, 750 bp, Homo sapiens
  Payload ID: 16965
  Gene Symbol: SMARCA2
  Gene Name: SWI/SNF related, matrix associated, actin dependent regulator of chromatin, subfamily a, member 2
  ENST ID: ENST00000452193
  CDS Start-End: 203-750
cttggagaggcggaggtggaaacgatgcgcaggagttggcttggggctttttgtttgcgtgtccctgtttacctattcataatcatggatcccctctgctttgtgatactgtgaaccacgcataacagcaattctttacaccaccgggttgagaagaaggcgcctgaggctgactttctggacctgccgtcacgcagtaaagatgtggttggccatcgaagacggcaatttggaggaaatggaagaggaagtacggcttaagaagcgaaaaagacgaagaaatgtggataaagatcctgcaaaagaagatgtggaaaaagctaagaagagaagaggccgccctcccgctgagaaactgtcaccaaatccccccaaactgacaaagcagatgaacgctatcatcgatactgtgataaactacaaagataggtgtaacgtggagaaggtgcccagtaattctcagttggaaatagaaggaaacagttcagggcgacagctcagtgaagtcttcattcagttaccttcaaggaaagaattaccagaatactatgaattaattaggaagccagtggatttcaaaaaaataaaggaaaggattcgtaatcataagtaccggagcctaggcgacctggagaaggatgtcatgcttctctgtcacaacgctcagacgttcaacctggagggatcccagatctatgaagactccatcgtcttacagtcagtgtttaagagtgcccggcagaaaattgc

SEQ ID NO: 187812 - DNA, 755 bp, Homo sapiens
  Payload ID: 16965
  Gene Symbol: SMARCA2
  Gene Name: SWI/SNF related, matrix associated, actin dependent regulator of chromatin, subfamily a, member 2
  ENST ID: ENST00000439732
  CDS Start-End: 110-755
gcgtcgggagcagcggctcgggcagctgctcctgcccgcaccctcccctggagcccggggaggacaaggcgagcattactctactgactggcagagacaggagaggtagatgtccacgcccacagaccctggtgcgatgccccacccagggccttcgccggggcctgggccttcccctgggccaattcttgggcctagtccaggaccaggaccatccccaggttccgtccacagcatgatggggccaagtcctggacctccaagtgtctcccatcctatgccgacgatggggtccacagacttcccacaggaaggcatgcatcaaatgcataagcccatcgatggtatacatgacaaggggattgtagaagacatccattgtggatccatgaagggcactggtatgcgaccacctcacccaggcatgggccctccccagagtccaatggatcaacacagccaaggttatatgtcaccacacccatctccattaggagccccagagcacgtctccagccctatgtctggaggaggcccaactccacctcagatgccaccaagccagccgggggccctcatcccaggtgatccgcaggccatgagccagcccaacagaggtccctcacctttcagtcctgtccagctgcatcagcttcgagctcagattttagcttataaaatgctggcccgaggccagcccctccccgaaacgctgcagcttgcagtccaggggaaaaggacgttgcctggcttgc

SEQ ID NO: 187813 - DNA, 633 bp, Homo sapiens
  Payload ID: 16965
  Gene Symbol: SMARCA2
  Gene Name: SWI/SNF related, matrix associated, actin dependent regulator of chromatin, subfamily a, member 2
  ENST ID: ENST00000416751
  CDS Start-End: 56-633
agtagaactacatcccaggcatgtgtaggccatcgaagacggcaatttggaggaaatggaagaggaagtacggcttaagaagcgaaaaagacgaagaaatgtggataaagatcctgcaaaagaagatgtggaaaaagctaagaagagaagaggccgccctcccgctgagaaactgtcaccaaatccccccaaactgacaaagcagatgaacgctatcatcgatactgtgataaactacaaagatagttcagggcgacagctcagtgaagtcttcattcagttaccttcaaggaaagaattaccagaatactatgaattaattaggaagccagtggatttcaaaaaaataaaggaaaggattcgtaatcataagtaccggagcctaggcgacctggagaaggatgtcatgcttctctgtcacaacgctcagacgttcaacctggagggatcccagatctatgaagactccatcgtcttacagtcagtgtttaagagtgcccggcagaaaattgccaaagaggaagagagtgaggatgaaagcaatgaagaggaggaagaggaagatgaagaagagtcagagtccgaggcaaaatcagtcaaggtgaaaattaagctcaataaaaaagatgacaa

SEQ ID NO: 187814 - DNA, 834 bp, Homo sapiens
  Payload ID: 16965
  Gene Symbol: SMARCA2
  Gene Name: SWI/SNF related, matrix associated, actin dependent regulator of chromatin, subfamily a, member 2
  ENST ID: ENST00000423555
  CDS Start-End: 150-834
cctattcacttcattaaatctagaggcagttgagcatgggagccgtctgtatgttgaattagggctcgcactcttgcgcaacacgtcaccagtcggaaactgggggtttgcttctgtgatttatttcattattgtgctggtaaaagctgatgaagagactagcagctcgctgctttgctggcttgttaattttatccccactaactgtgatttctgatagccggcctgctgatagtggtaaggccatcgaagacggcaatttggaggaaatggaagaggaagtacggcttaagaagcgaaaaagacgaagaaatgtggataaagatcctgcaaaagaagatgtggaaaaagctaagaagagaagaggccgccctcccgctgagaaactgtcaccaaatccccccaaactgacaaagcagatgaacgctatcatcgatactgtgataaactacaaagatagttcagggcgacagctcagtgaagtcttcattcagttaccttcaaggaaagaattaccagaatactatgaattaattaggaagccagtggatttcaaaaaaataaaggaaaggattcgtaatcataagtaccggagcctaggcgacctggagaaggatgtcatgcttctctgtcacaacgctcagacgttcaacctggagggatcccagatctatgaagactccatcgtcttacagtcagtgtttaagagtgcccggcagaaaattgccaaagaggaagagagtgaggatgaaagcaatgaagaggaggaagaggaagatgaagaagagtcagagtccgaggcaaaatcagtcaaggtgaaaattaagctcaata

SEQ ID NO: 187815 - DNA, 736 bp, Homo sapiens
  Payload ID: 16965
  Gene Symbol: SMARCA2
  Gene Name: SWI/SNF related, matrix associated, actin dependent regulator of chromatin, subfamily a, member 2
  ENST ID: ENST00000457226
  CDS Start-End: 158-736
tttccggtacacgcggggaaatcgcctcctgccagtgtctgatcgctcgcctccgcctccgcctctgccgcctggattgcattattatttttatccgggttgccgtttgctgcggatggtgcattactctactgactggcagagacaggagaggtagatgtccacgcccacagaccctggtgcgatgccccacccagggccttcgccggggcctgggccttcccctgggccaattcttgggcctagtccaggaccaggaccatccccaggttccgtccacagcatgatggggccaagtcctggacctccaagtgtctcccatcctatgccgacgatggggtccacagacttcccacaggaaggcatgcatcaaatgcataagcccatcgatggtatacatgacaaggggattgtagaagacatccattgtggatccatgaagggcactggtatgcgaccacctcacccaggcatgggccctccccagagtccaatggatcaacacagccaaggttatatgtcaccacacccatctccattaggagccccagagcacgtctccagccctatgtctggaggaggcccaactccacctcagatgccaccaagccagccgggggccctcatcccaggtgatccgcaggccatgagccagcccaacagaggtccctcacctttcagtcctgtccagctgcatcagcttcgagctcagattttagcttataaaatgctggcc

SEQ ID NO: 187816 - DNA, 683 bp, Homo sapiens
  Payload ID: 16965
  Gene Symbol: SMARCA2
  Gene Name: SWI/SNF related, matrix associated, actin dependent regulator of chromatin, subfamily a, member 2
  ENST ID: ENST00000635185
  CDS Start-End: 1-683
caaatagcgaagaagtttctgagaaggatgctaagcagatcattgagacagctaagcaagacgtggatgatgaatacagcatgcagtacagtgccaggggctcccagtcctactacaccgtggctcatgccatctcggagagggtggagaaacagtctgccctcctaattaatgggaccctaaagcattaccagctccagggcctggaatggatggtttccctgtataataacaacttgaacggaatcttagccgatgaaatggggcttggaaagaccatacagaccattgcactcatcacttatctgatggagcacaaaagactcaatggcccctatctcatcattgttcccctttcgactctatctaactggacatatgaatttgacaaatgggctccttctgtggtgaagatttcttacaagggtactcctgccatgcgtcgctcccttgtcccccagctacggagtggcaaattcaatgtcctcttgactacttatgagtatattataaaagacaagcacattcttgcaaaggtggacttaaatgaagaagaaactatattgatcatcaggcgtctacataaggtgttaagaccatttttactaaggagactgaagaaagaagttgaatcccagcttcccgaaaaagtggaatatgtgatcaagtgtgacatgtcagct

SEQ ID NO: 187817 - DNA, 1118 bp, Homo sapiens
  Payload ID: 16965
  Gene Symbol: SMARCA2
  Gene Name: SWI/SNF related, matrix associated, actin dependent regulator of chromatin, subfamily a, member 2
  ENST ID: ENST00000634989
  CDS Start-End: 136-432
acttcattaaatctagaggcagttgagcatgggagccgtctgtatgttgaattagggctcgcactcttgcgcaacacgtcaccagtcggaaactgggggtttgcttctgtgatttatttcattattgtgctgctgatgaagagactagcagctcgctgctttgctggcttgttaattttatccccactaactgtgatttctgatagccggcctgctgatagtggtaagtgctgctggctctggtttaaagcaagcgtttgcaggccatcgaagacggcaatttggaggaaatggaagaggaagtacggcttaagaagcgaaaaagacgaagaaatgtggataaagatcctgcaaaagaagatgtggaaaaagctaagaagagaagaggccgccctcccgctgagaaactgtcaccaaatccccccaaactgacaaagcagatgaacgctatcatcgatactgtgataaactacaaagatagttcagggcgacagctcagtgaagtcttcattcagttaccttcaaggaaagaattaccagaatactatgaattaattaggaagccagtggatttcaaaaaaataaaggaaaggattcgtaatcataagtaccggagcctaggcgacctggagaaggatgtcatgcttctctgtcacaacgctcagacgttcaacctggagggatcccagatctatgaagactccatcgtcttacagtcagtgtttaagagtgcccggcagaaaattgccaaagaggaagagagtgaggatgaaagcaatgaagaggaggaagaggaagatgaagaagagtcagagtccgaggcaaaatcagtcaaggtgaaaattaagctcaataaaaaagatgacaaaggccgggacaaagggaaaggcaagaaaaggccaaatcgaggaaaagccaaacctgtagtgagcgattttgacagcgatgaggagcaggatgaacgtgaacagtcagaaggaagtgggacggatgatgagtgatcagtatggacctttttccttggtagaactgaattccttcctcccctgtctcatttctacccagtgagttcatttgtcatataggcactgggttgtttctatatcatcatcgtctat

SEQ ID NO: 187818 - DNA, 424 bp, Homo sapiens
  Payload ID: 16965
  Gene Symbol: SMARCA2
  Gene Name: SWI/SNF related, matrix associated, actin dependent regulator of chromatin, subfamily a, member 2
  ENST ID: ENST00000634287
  CDS Start-End: 239-424
gtcttccggcgcccgcggaggaggcgagggtgggacgctgggcggagcccgagtttaggaagaggaggggacggctgtcatcaatgaagtcatattcataatctagtcctctctccctctgtttctgtactctgggtgactcagagagggaagagattcagccagcacactcctcgcgagcaagcccatcgatggtatacatgacaaggggattgtagaagacatccattgtggatccatgaagggcactggtatgcgaccacctcacccaggcatgggccctccccagagtccaatggatcaacacagccaaggttatatgtcaccacacccatctccattaggagccccagagcacgtctccagccctatgtctggaggaggcccaactccacctcagatgccaccaagccagccgggggcc

SEQ ID NO: 187819 - DNA, 758 bp, Homo sapiens
  Payload ID: 16965
  Gene Symbol: SMARCA2
  Gene Name: SWI/SNF related, matrix associated, actin dependent regulator of chromatin, subfamily a, member 2
  ENST ID: ENST00000635133
  CDS Start-End: 158-758
aggctgaaatatgcttaactgttttaacttgactggggatttttaccaccatatgggttttttttcgtgacatccggagccaaacgggtgcagtgtgcctttaagaaaagaggtgcctcactaaacttcgctgtagttgtgtttcaccgtctcgctgatgaagagactagcagctcgctgctttgctggcttgttaattttatccccactaactgtgatttctgatagccggcctgctgatagtggtaaggccatcgaagacggcaatttggaggaaatggaagaggaagtacggcttaagaagcgaaaaagacgaagaaatgtggataaagatcctgcaaaagaagatgtggaaaaagctaagaagagaagaggccgccctcccgctgagaaactgtcaccaaatccccccaaactgacaaagcagatgaacgctatcatcgatactgtgataaactacaaagatagttcagggcgacagctcagtgaagtcttcattcagttaccttcaaggaaagaattaccagaatactatgaattaattaggaagccagtggatttcaaaaaaataaaggaaaggattcgtaatcataagtaccggagcctaggcgacctggagaaggatgtcatgcttctctgtcacaacgctcagacgttcaacctggagggatcccagatctatgaagactccatcgtcttacagtcagtgtttaagagtgcccggcagaaaattgccaaagaggaagagagtgaggatg

SEQ ID NO: 187820 - DNA, 712 bp, Homo sapiens
  Payload ID: 16965
  Gene Symbol: SMARCA2
  Gene Name: SWI/SNF related, matrix associated, actin dependent regulator of chromatin, subfamily a, member 2
  ENST ID: ENST00000635530
  CDS Start-End: 26-712
cagttgagcatgggagccgtctctgatgaagagactagcagctcgctgctttgctggcttgttaattttatccccactaactgtgatttctgatagccggcctgctgatagtggtaaggccatcgaagacggcaatttggaggaaatggaagaggaagtacggcttaagaagcgaaaaagacgaagaaatgtggataaagatcctgcaaaagaagatgtggaaaaagctaagaagagaagaggccgccctcccgctgagaaactgtcaccaaatccccccaaactgacaaagcagatgaacgctatcatcgatactgtgataaactacaaagatagttcagggcgacagctcagtgaagtcttcattcagttaccttcaaggaaagaattaccagaatactatgaattaattaggaagccagtggatttcaaaaaaataaaggaaaggattcgtaatcataagtaccggagcctaggcgacctggagaaggatgtcatgcttctctgtcacaacgctcagacgttcaacctggagggatcccagatctatgaagactccatcgtcttacagtcagtgtttaagagtgcccggcagaaaattgccaaagaggaagagagtgaggatgaaagcaatgaagaggaggaagaggaagatgaagaagagtcagagtccgaggcaaaatcagtcaaggtgaaaattaagctcaataaa

SEQ ID NO: 187821 - DNA, 744 bp, Homo sapiens
  Payload ID: 16965
  Gene Symbol: SMARCA2
  Gene Name: SWI/SNF related, matrix associated, actin dependent regulator of chromatin, subfamily a, member 2
  ENST ID: ENST00000634435
  CDS Start-End: 10-744
gtgctgctgatgaagagactagcagctcgctgctttgctggcttgttaattttatccccactaactgtgatttctgatagccggcctgctgatagtggtaaggccatcgaagacggcaatttggaggaaatggaagaggaagtacggcttaagaagcgaaaaagacgaagaaatgtggataaagatcctgcaaaagaagatgtggaaaaagctaagaagagaagaggccgccctcccgctgagaaactgtcaccaaatccccccaaactgacaaagcagatgaacgctatcatcgatactgtgataaactacaaagataggtgtaacgtggagaaggtgcccagtaattctcagttggaaatagaaggaaacagttcagggcgacagctcagtgaagtcttcattcagttaccttcaaggaaagaattaccagaatactatgaattaattaggaagccagtggatttcaaaaaaataaaggaaaggattcgtaatcataagtaccggagcctaggcgacctggagaaggatgtcatgcttctctgtcacaacgctcagacgttcaacctggagggatcccagatctatgaagactccatcgtcttacagtcagtgtttaagagtgcccggcagaaaattgccaaagaggaagagagtgaggatgaaagcaatgaagaggaggaagaggaagatgaagaagagtcagagtccgaggcaaaatcagtcaaggtgaaaattaagctc

SEQ ID NO: 187822 - DNA, 5847 bp, Homo sapiens
  Payload ID: 16965
  Gene Symbol: SMARCA2
  Gene Name: SWI/SNF related, matrix associated, actin dependent regulator of chromatin, subfamily a, member 2
  ENST ID: ENST00000634760
  CDS Start-End: 349-4635
ggaggacaaggcgaggtttggtggcgagggctggtgggggtggcgtgtgcgtgtggttgtgagtgtgtgtgtgtgcgcgcgcgagcggcggagaatcaggaagtcacagcagcgaagcgcacacagcacacagacatgtttgattgccgtgacatgacgcgcgcgagggaggaagcggcagcggcgggggccgggccgcgggctgtggcgcgggcctagagccgcggctcggagaccggttcccgtccgccggccgcgccgccaccccaagctccgcgaaccccgcgcccctttttgttccgcgtcctccagcattactctactgactggcagagacaggagaggtagatgtccacgcccacagaccctggtgcgatgccccacccagggccttcgccggggcctgggccttcccctgggccaattcttgggcctagtccaggaccaggaccatccccaggttccgtccacagcatgatggggccaagtcctggacctccaagtgtctcccatcctatgccgacgatggggtccacagacttcccacaggaaggcatgcatcaaatgcataagcccatcgatggtatacatgacaaggggattgtagaagacatccattgtggatccatgaagggcactggtatgcgaccacctcacccaggcatgggccctccccagagtccaatggatcaacacagccaaggttatatgtcaccacacccatctccattaggagccccagagcacgtctccagccctatgtctggaggaggcccaactccacctcagatgccaccaagccagccgggggccctcatcccaggtgatccgcaggccatgagccagcccaacagaggtccctcacctttcagtcctgtccagctgcatcagcttcgagctcagattttagcttataaaatgctggcccgaggccagcccctccccgaaacgctgcagcttgcagtccaggggaaaaggacgttgcctggcttgcagcaacaacagcagcagcaacagcagcagcagcagcagcagcagcagcagcagcagcagcaacagcagccgcagcagcagccgccgcaaccacagacgcagcaacaacagcagccggcccttgttaactacaacagaccatctggcccggggccggagctgagcggcccgagcaccccgcagaagctgccggtgcccgcgcccggcggccggccctcgcccgcgccccccgcagccgcgcagccgcccgcggccgcagtgcccgggccctcagtgccgcagccggccccggggcagccctcgcccgtcctccagctgcagcagaagcagagccgcatcagccccatccagaaaccgcaaggcctggaccccgtggaaattctgcaagagcgggaatacagacttcaggcccgcatagctcataggatacaagaactggaaaatctgcctggctctttgccaccagatttaagaaccaaagcaaccgtggaactaaaagcacttcggttactcaatttccagcgtcagctgagacaggaggtggtggcctgcatgcgcagggacacgaccctggagacggctctcaactccaaagcatacaaacggagcaagcgccagactctgagagaagctcgcatgaccgagaagctggagaagcagcagaagattgagcaggagaggaaacgccgtcagaaacaccaggaatacctgaacagtattttgcaacatgcaaaagattttaaggaatatcatcggtctgtggccggaaagatccagaagctctccaaagcagtggcaacttggcatgccaacactgaaagagagcagaagaaggagacagagcggattgaaaaggagagaatgcggcgactgatggctgaagatgaggagggttatagaaaactgattgatcaaaagaaagacaggcgtttagcttaccttttgcagcagaccgatgagtatgtagccaatctgaccaatctggtttgggagcacaagcaagcccaggcagccaaagagaagaagaagaggaggaggaggaagaagaaggctgaggagaatgcagagggtggggagtctgccctgggaccggatggagagcccatagatgagagcagccagatgagtgacctccctgtcaaagtgactcacacagaaaccggcaaggttctgttcggaccagaagcacccaaagcaagtcagctggacgcctggctggaaatgaatcctggttatgaagttgcccctagatctgacagtgaagagagtgattctgattatgaggaagaggatgaggaagaagagtccagtaggcaggaaaccgaagagaaaatactcctggatccaaatagcgaagaagtttctgagaaggatgctaagcagatcattgagacagctaagcaagacgtggatgatgaatacagcatgcagtacagtgccaggggctcccagtcctactacaccgtggctcatgccatctcggagagggtggagaaacagtctgccctcctaattaatgggaccctaaagcattaccagctccagggcctggaatggatggtttccctgtataataacaacttgaacggaatcttagccgatgaaatggggcttggaaagaccatacagaccattgcactcatcacttatctgatggagcacaaaagactcaatggcccctatctcatcattgttcccctttcgactctatctaactggacatatgaatttgacaaatgggctccttctgtggtgaagatttcttacaagggtactcctgccatgcgtcgctcccttgtcccccagctacggagtggcaaattcaatgtcctcttgactacttatgagtatattataaaagacaagcacattcttgcaaagattcggtggaaatacatgatagtggacgaaggccaccgaatgaagaatcaccactgcaagctgactcaggtcttgaacactcactatgtggcccccagaaggatcctcttgactgggaccccgctgcagaataagctccctgaactctgggccctcctcaacttcctcctcccaacaatttttaagagctgcagcacatttgaacaatggttcaatgctccatttgccatgactggtgaaagggtggacttaaatgaagaagaaactatattgatcatcaggcgtctacataaggtgttaagaccatttttactaaggagactgaagaaagaagttgaatcccagcttcccgaaaaagtggaatatgtgatcaagtgtgacatgtcagctctgcagaagattctgtatcgccatatgcaagccaaggggatccttctcacagatggttctgagaaagataagaaggggaaaggaggtgctaagacacttatgaacactattatgcagttgagaaaaatctgcaaccacccatatatgtttcagcacattgaggaatcctttgctgaacacctaggctattcaaatggggtcatcaatggggctgaactgtatcgggcctcagggaagtttgagctgcttgatcgtattctgccaaaattgagagcgactaatcaccgagtgctgcttttctgccagatgacatctctcatgaccatcatggaggattattttgcttttcggaacttcctttacctacgccttgatggcaccaccaagtctgaagatcgtgctgctttgctgaagaaattcaatgaacctggatcccagtatttcattttcttgctgagcacaagagctggtggcctgggcttaaatcttcaggcagctgatacagtggtcatctttgacagcgactggaatcctcatcaggatctgcaggcccaagaccgagctcaccgcatcgggcagcagaacgaggtccgggtactgaggctctgtaccgtgaacagcgtggaggaaaagatcctcgcggccgcaaaatacaagctgaacgtggatcagaaagtgatccaggcgggcatgtttgaccaaaagtcttcaagccacgagcggagggcattcctgcaggccatcttggagcatgaggaggaaaatgaggaagaagatgaagtaccggacgatgagactctgaaccaaatgattgctcgacgagaagaagaatttgacctttttatgcggatggacatggaccggcggagggaagatgcccggaacccgaaacggaagccccgtttaatggaggaggatgagctgccctcctggatcattaaggatgacgctgaagtagaaaggctcacctgtgaagaagaggaggagaaaatatttgggagggggtcccgccagcgccgtgacgtggactacagtgacgccctcacggagaagcagtggctaagggccatcgaagacggcaatttggaggaaatggaagaggaagtacggcttaagaagcgaaaaagacgaagaaatgtggataaagatcctgcaaaagaagatgtggaaaaagctaagaagagaagaggccgccctcccgctgagaaactgtcaccaaatccccccaaactgacaaagcagatgaacgctatcatcgatactgtgataaactacaaagataggtgtaacgtggagaaggtgcccagtaattctcagttggaaatagaaggaaacaggaaaggattcgtaatcataagtaccggagcctaggcgacctggagaaggatgtcatgcttctctgtcacaacgctcagacgttcaacctggagggatcccagatctatgaagactccatcgtcttacagtcagtgtttaagagtgcccggcagaaaattgccaaagaggaagagagtgaggatgaaagcaatgaagaggaggaagaggaagatgaagaagagtcagagtccgaggcaaaatcagtcaaggtgaaaattaagctcaataaaaaagatgacaaaggccgggacaaagggaaaggcaagaaaaggccaaatcgaggaaaagccaaacctgtagtgagcgattttgacagcgatgaggagcaggatgaacgtgaacagtcagaaggaagtgggacggatgatgagtgatcagtatggacctttttccttggtagaactgaattccttcctcccctgtctcatttctacccagtgagttcatttgtcatataggcactgggttgtttctatatcatcatcgtctataaactagctttaggatagtgccagacaaacatatgatatcatggtgtaaaaaacacacacatacacaaatatttgtaacatattgtgaccaaatgggcctcaaagattcagattgaaacaaacaaaaagcttttgatggaaaatatgtgggtggatagtatatttctatgggtgggtctaatttggtaacggtttgattgtgcctggttttatcacctgttcagatgagaagatttttgtcttttgtagcactgataaccaggagaagccattaaaagccactggttattttatttttcatcaggcaattttcgaggtttttatttgttcggtattgtttttttacactgtggtacatataagcaactttaataggtgataaatgtacagtagttagatttcacctgcatatacatttttccattttatgctctatgatctgaacaaaagctttttgaattgtataagatttatgtctactgtaaacattgcttaatttttttgctcttgatttaaaaaaaagttttgttgaaagcgctattgaatattgcaatctatatagtgtattggatggcttcttttgtcaccctgatctcctatgttaccaatgtgtatcgtctccttctccctaaagtgtacttaatctttgctttctttgcacaatgtctttggttgcaagtcataagcctgaggcaaataaaattccagtaatttc

SEQ ID NO: 187823 - DNA, 711 bp, Homo sapiens
  Payload ID: 16965
  Gene Symbol: SMARCA2
  Gene Name: SWI/SNF related, matrix associated, actin dependent regulator of chromatin, subfamily a, member 2
  ENST ID: ENST00000635388
  CDS Start-End: 106-711
agttgagcatgggagccgtctgtatgttgaattagggctcgcactcttgcgcaacacgtcaccagtcggaaactgggggccatcgaagacggcaatttggaggaaatggaagaggaagtacggcttaagaagcgaaaaagacgaagaaatgtggataaagatcctgcaaaagaagatgtggaaaaagctaagaagagaagaggccgccctcccgctgagaaactgtcaccaaatccccccaaactgacaaagcagatgaacgctatcatcgatactgtgataaactacaaagatagttcagggcgacagctcagtgaagtcttcattcagttaccttcaaggaaagaattaccagaatactatgaattaattaggaagccagtggatttcaaaaaaataaaggaaaggattcgtaatcataagtaccggagcctaggcgacctggagaaggatgtcatgcttctctgtcacaacgctcagacgttcaacctggagggatcccagatctatgaagactccatcgtcttacagtcagtgtttaagagtgcccggcagaaaattgccaaagaggaagagagtgaggatgaaagcaatgaagaggaggaagaggaagatgaagaagagtcagagtccgaggcaaaatcagtcaaggtgaaaattaagctcaataaaaaagatgacaaaggccgggacaaagggaaaggcaagaaa

SEQ ID NO: 187824 - DNA, 1106 bp, Homo sapiens
  Payload ID: 16965
  Gene Symbol: SMARCA2
  Gene Name: SWI/SNF related, matrix associated, actin dependent regulator of chromatin, subfamily a, member 2
  ENST ID: ENST00000634781
  CDS Start-End: 312-1094
tccttcatagtggttatctgaacactgtaggatcgtgatggaaattgtcttttgattattaaggcctaggctcagactgtcccttaggaatctgtctgtgtgcatgttgcttctatggatttgcacattggaggatgcgtagaaaacatatttttttaaaaatcccactggcatttttaacatgccaggttgttttgtgttctgcaccaggttttcttcacaaaacctttctttttcaggaagcgttgtacataagtgaaagaaattatgtctgagctgtaatcactctttatattgattgttatactcacatgatcataaatattagccatgtttggtgctgtggagaaatgaaggccatcgaagacggcaatttggaggaaatggaagaggaagtacggcttaagaagcgaaaaagacgaagaaatgtggataaagatcctgcaaaagaagatgtggaaaaagctaagaagagaagaggccgccctcccgctgagaaactgtcaccaaatccccccaaactgacaaagcagatgaacgctatcatcgatactgtgataaactacaaagatagttcagggcgacagctcagtgaagtcttcattcagttaccttcaaggaaagaattaccagaatactatgaattaattaggaagccagtggatttcaaaaaaataaaggaaaggattcgtaatcataagtaccggagcctaggcgacctggagaaggatgtcatgcttctctgtcacaacgctcagacgttcaacctggagggatcccagatctatgaagactccatcgtcttacagtcagtgtttaagagtgcccggcagaaaattgccaaagaggaagagagtgaggatgaaagcaatgaagaggaggaagaggaagatgaagaagagtcagagtccgaggcaaaatcagtcaaggtgaaaattaagctcaataaaaaagatgacaaaggccgggacaaagggaaaggcaagaaaaggccaaatcgaggaaaagccaaacctgtagtgagcgattttgacagcgatgaggagcaggatgaacgtgaacagtcagaaggaagtgggacggatgatgagtgatcagtatggacc

SEQ ID NO: 187825 - DNA, 762 bp, Homo sapiens
  Payload ID: 16965
  Gene Symbol: SMARCA2
  Gene Name: SWI/SNF related, matrix associated, actin dependent regulator of chromatin, subfamily a, member 2
  ENST ID: ENST00000635659
  CDS Start-End: 1-176
agcctttccccagctctcttttttttcctgatcagctgatgaagagactagcagctcgctgctttgctggcttgttaattttatccccactaactgtgatttctgatagccggcctgctgatagtggccatcgaagacggcaatttggaggaaatggaagaggaagtacggcttaagaagcgaaaaagacgaagaaatgtggataaagatcctgcaaaagaagatgtggaaaaagctaagaagagaagaggccgccctcccgctgagaaactgtcaccaaatccccccaaactgacaaagcagatgaacgctatcatcgatactgtgataaactacaaagatagttcagggcgacagctcagtgaagtcttcattcagttaccttcaaggaaagaattaccagaatactatgaattaattaggaagccagtggatttcaaaaaaataaaggaaaggattcgtaatcataagtaccggagcctaggcgacctggagaaggatgtcatgcttctctgtcacaacgctcagacgttcaacctggagggatcccagatctatgaagactccatcgtcttacagtcagtgtttaagagtgcccggcagaaaattgccaaagaggaagagagtgaggatgaaagcaatgaagaggaggaagaggaagatgaagaagagtcagagtccgaggcaaaatcagtcaaggtgaaaattaagctcaataaaaaagatgacaaaggccgggacaaagggaaaggcaagaaaagg

SEQ ID NO: 187826 - DNA, 740 bp, Homo sapiens
  Payload ID: 16965
  Gene Symbol: SMARCA2
  Gene Name: SWI/SNF related, matrix associated, actin dependent regulator of chromatin, subfamily a, member 2
  ENST ID: ENST00000634338
  CDS Start-End: 8-740
gtctctgatgaagagactagcagctcgctgctttgctggcttgttaattttatccccactaactgtgatttctgatagccggcctgctgatagtggtaaggccatcgaagacggcaatttggaggaaatggaagaggaagtacggcttaagaagcgaaaaagacgaagaaatgtggataaagatcctgcaaaagaagatgtggaaaaagctaagaagagaagaggccgccctcccgctgagaaactgtcaccaaatccccccaaactgacaaagcagatgaacgctatcatcgatactgtgataaactacaaagataggtgtaacgtggagaaggtgcccagtaattctcagttggaaatagaaggaaacagttcagggcgacagctcagtgaagtcttcattcagttaccttcaaggaaagaattaccagaatactatgaattaattaggaagccagtggatttcaaaaaaataaaggaaaggattcgtaatcataagtaccggagcctaggcgacctggagaaggatgtcatgcttctctgtcacaacgctcagacgttcaacctggagggatcccagatctatgaagactccatcgtcttacagtcagtgtttaagagtgcccggcagaaaattgccaaagaggaagagagtgaggatgaaagcaatgaagaggaggaagaggaagatgaagaagagtcagagtccgaggcaaaatcagtcaaggtgaaaattaagc

SEQ ID NO: 187827 - DNA, 939 bp, Homo sapiens
  Payload ID: 16965
  Gene Symbol: SMARCA2
  Gene Name: SWI/SNF related, matrix associated, actin dependent regulator of chromatin, subfamily a, member 2
  ENST ID: ENST00000634931
  CDS Start-End: 76-840
tcgtgacatccggagccaaacgggtgcagtgtgcctttaagaaaagaggccatcgaagacggcaatttggaggaaatggaagaggaagtacggcttaagaagcgaaaaagacgaagaaatgtggataaagatcctgcaaaagaagatgtggaaaaagctaagaagagaagaggccgccctcccgctgagaaactgtcaccaaatccccccaaactgacaaagcagatgaacgctatcatcgatactgtgataaactacaaagataggtgtaacgtggagaaggtgcccagtaattctcagttggaaatagaaggaaacagttcagggcgacagctcagtgaagtcttcattcagttaccttcaaggaaagaattaccagaatactatgaattaattaggaagccagtggatttcaaaaaaataaaggaaaggattcgtaatcataagtaccggagcctaggcgacctggagaaggatgtcatgcttctctgtcacaacgctcagacgttcaacctggagggatcccagatctatgaagactccatcgtcttacagtcagtgtttaagagtgcccggcagaaaattgccaaagaggaagagagtgaggatgaaagcaatgaagaggaggaagaggaagatgaagaagagtcagagtccgaggcaaaatcagtcaaggtgaaaattaagctcaataaaaaagatgacaaaggccgggacaaagggaaaggcaagaaaaggccaaatcgaggaaaagccaaacctgtagtgagcgattttgacagcgatgaggagcaggatgaacgtgaacagtcagaaggaagtgggacggatgatgagtgatcagtatggacctttttccttggtagaactgaattccttcctcccctgtctcatttctacccagtgagttcatttgtcatataggcactgggttgtttc

SEQ ID NO: 187828 - DNA, 897 bp, Homo sapiens
  Payload ID: 16965
  Gene Symbol: SMARCA2
  Gene Name: SWI/SNF related, matrix associated, actin dependent regulator of chromatin, subfamily a, member 2
  ENST ID: ENST00000634688
  CDS Start-End: 451-897
aatgaaggtaattgccttatgattagagctctttcagctacgagaaaggattgattatcatttgcatactggaggcaatattgagaggcaggaggaacaaataacaacattagttattttgtgtgagagagcaatctcaaaacgtaatttaaagatcttttttttagaaaatttcttttctatgttcaaattttatgttctttttttttttcttccttggcagtatttttcccctttatttttcttcttttgagttttgagatttaccaggaaaaaaaaaaaaagtttaaacttctgggtctgtcacatggatcttttagccctttatgaacaggtttcttttatacctggttgtttttatagctattttattatctctctgcattagtgctgctggctctggtttaaagcaagcgtttgcaggccatcgaagacggcaatttggaggaaatggaagaggaagtacggcttaagaagcgaaaaagacgaagaaatgtggataaagatcctgcaaaagaagatgtggaaaaagctaagaagagaagaggccgccctcccgctgagaaactgtcaccaaatccccccaaactgacaaagcagatgaacgctatcatcgatactgtgataaactacaaagatagttcagggcgacagctcagtgaagtcttcattcagttaccttcaaggaaagaattaccagaatactatgaattaattaggaagccagtggatttcaaaaaaataaaggaaaggattcgtaatcataagtaccggagcctaggcgacctggagaaggatgtcatgcttctctgtcacaacgctcagacgttcaacctggagggatcccagatctatgaagactccatcgtcttacagtcagtgtttaagagtgcccgg

SEQ ID NO: 187829 - DNA, 291 bp, Homo sapiens
  Payload ID: 16965
  Gene Symbol: SMARCA2
  Gene Name: SWI/SNF related, matrix associated, actin dependent regulator of chromatin, subfamily a, member 2
  ENST ID: ENST00000635392
  CDS Start-End: 1-115
ttcagggcgacagctcagtgaagtcttcattcagttaccttcaaggaaagaattaccagaatactatgaattaattaggaagccagtggatttcaaaaaaataaaggattcgtaatcataagtaccggagcctaggcgacctggagaaggatgtcatgcttctctgtcacaacgctcagacgttcaacctggagggatcccagatctatgaagactccatcgtcttacagtcagtgtttaagagtgcccggcagaaaattgccaaagaggaagagagtgaggatgaaagca

SEQ ID NO: 187830 - DNA, 630 bp, Homo sapiens
  Payload ID: 16965
  Gene Symbol: SMARCA2
  Gene Name: SWI/SNF related, matrix associated, actin dependent regulator of chromatin, subfamily a, member 2
  ENST ID: ENST00000634706
  CDS Start-End: 123-630
gtctgtatgttgaattagggctcgcactcttgcgcaacacgtcaccagtcggaaactgggggtttgcttctgtgatttatttcattattgtgctggccatcgaagacggcaatttggaggaaatggaagaggaagtacggcttaagaagcgaaaaagacgaagaaatgtggataaagatcctgcaaaagaagatgtggaaaaagctaagaagagaagaggccgccctcccgctgagaaactgtcaccaaatccccccaaactgacaaagcagatgaacgctatcatcgatactgtgataaactacaaagatagttcagggcgacagctcagtgaagtcttcattcagttaccttcaaggaaagaattaccagaatactatgaattaattaggaagccagtggatttcaaaaaaataaaggaaaggattcgtaatcataagtaccggagcctaggcgacctggagaaggatgtcatgcttctctgtcacaacgctcagacgttcaacctggagggatcccagatctatgaagactccatcgtcttacagtcagtgtttaagagtgcccggcagaaaattgccaaagaggaagagagtgaggatgaaagcaatgaagaggaggaagaggaag

SEQ ID NO: 187831 - DNA, 810 bp, Homo sapiens
  Payload ID: 16965
  Gene Symbol: SMARCA2
  Gene Name: SWI/SNF related, matrix associated, actin dependent regulator of chromatin, subfamily a, member 2
  ENST ID: ENST00000634772
  CDS Start-End: 1-810
cttaaatcttcaggcagctgatacagtggtcatctttgacagcgactggaatcctcatcaggaagaagatgaagtaccggacgatgagactctgaaccaaatgattgctcgacgagaagaagaatttgacctttttatgcggatggacatggaccggcggagggaagatgcccggaacccgaaacggaagccccgtttaatggaggaggatgagctgccctcctggatcattaaggatgacgctgaagtagaaaggctcacctgtgaagaagaggaggagaaaatatttgggagggggtcccgccagcgccgtgacgtggactacagtgacgccctcacggagaagcagtggctaagggccatcgaagacggcaatttggaggaaatggaagaggaagtacggcttaagaagcgaaaaagacgaagaaatgtggataaagatcctgcaaaagaagatgtggaaaaagctaagaagagaagaggccgccctcccgctgagaaactgtcaccaaatccccccaaactgacaaagcagatgaacgctatcatcgatactgtgataaactacaaagatagttcagggcgacagctcagtgaagtcttcattcagttaccttcaaggaaagaattaccagaatactatgaattaattaggaagccagtggatttcaaaaaaataaaggaaaggattcgtaatcataagtaccggagcctaggcgacctggagaaggatgtcatgcttctctgtcacaacgctcagacgttcaacctggagggatcccagatctatgaagactccatcgtcttaca

SEQ ID NO: 187832 - DNA, 616 bp, Homo sapiens
  Payload ID: 16965
  Gene Symbol: SMARCA2
  Gene Name: SWI/SNF related, matrix associated, actin dependent regulator of chromatin, subfamily a, member 2
  ENST ID: ENST00000635688
  CDS Start-End: 413-616
gtgatttatttcattattgtgctggtaaaaggtttggaagggaattctttttgggggtagtactttagcattgtgtagcaagttttggggttttttttgtgtgtgaccccccagcccccagcgctgagtttgagtcagttgagccagtttagtaaataattttttaaaataaaagaacagtttaaaatctccatgaataattttacttacatgcaggagtaatcttactctactctttatgtgcgaaaagcattgggaagtgtttagtgaattgatttccattagaaaaagacccttagaaatcacagaacataaagcactgcatatggatgtgtttggggtctttggggaggagggaagatgttttgtagctctctgcattcctgcataaaaccttagtttgaggggaataatggccatcgaagacggcaatttggaggaaatggaagaggaagtacggcttaagaagcgaaaaagacgaagaaatgtggataaagatcctgcaaaagaagatgtggaaaaagctaagaagagaagaggccgccctcccgctgagaaactgtcaccaaatccccccaaactgacaaagcagatgaacgctatcatcgatactgtg

SEQ ID NO: 187833 - DNA, 640 bp, Homo sapiens
  Payload ID: 16965
  Gene Symbol: SMARCA2
  Gene Name: SWI/SNF related, matrix associated, actin dependent regulator of chromatin, subfamily a, member 2
  ENST ID: ENST00000635226
  CDS Start-End: 1-174
gcagccgcgcagccgcccgcggccgcagtgcccgggccctcagtgccgcagccggccccggggcagccctcgcccgtcctccagctgcagcagaagcagagccgcatcagccccatccagaaaccgcaaggcctggaccccgtggaaattctgcaagagcgggaatacaggtaacgcaccccgccagcaaggggccccctgcggtgtgctagcacctgccgcccaagccgaggggggtgaggcgcctgcctccttggttggccaaactgtgattttcacccgtgcggtcggaaaactttcatccactcctggggccttcccggtgctgaggggaggcaccggggttttgaagatcaaaagccgacggggacttcctgtggacccgagagagtgatcatctcacactgcgactgtggaatacactgtccgtgtttgtgcttgtgcggttcggtgatgacggaggggctgggacgctgagtgtgttgcgctggcctgattttcatgttaactgtacgtttctactaaagcatccttcggtagcttggtataatctttgttttaattcacgtgtgtctatgcagtgatccagccttatgggtataccctgtgcgagtgtctttatacaaggtctatacttaaa

SEQ ID NO: 187834 - DNA, 1843 bp, Homo sapiens
  Payload ID: 16965
  Gene Symbol: SMARCA2
  Gene Name: SWI/SNF related, matrix associated, actin dependent regulator of chromatin, subfamily a, member 2
  ENST ID: ENST00000635590
  CDS Start-End: 146-442
ttcacttcattaaatctagaggcagttgagcatgggagccgtctgtatgttgaattagggctcgcactcttgcgcaacacgtcaccagtcggaaactgggggtttgcttctgtgatttatttcattattgtgctggtaaaagctgatgaagagactagcagctcgctgctttgctggcttgttaattttatccccactaactgtgatttctgatagccggcctgctgatagtggtaagtgctgctggctctggtttaaagcaagcgtttgcaggccatcgaagacggcaatttggaggaaatggaagaggaagtacggcttaagaagcgaaaaagacgaagaaatgtggataaagatcctgcaaaagaagatgtggaaaaagctaagaagagaagaggccgccctcccgctgagaaactgtcaccaaatccccccaaactgacaaagcagatgaacgctatcatcgatactgtgataaactacaaagatagttcagggcgacagctcagtgaagtcttcattcagttaccttcaaggaaagaattaccagaatactatgaattaattaggaagccagtggatttcaaaaaaataaaggaaaggattcgtaatcataagtaccggagcctaggcgacctggagaaggatgtcatgcttctctgtcacaacgctcagacgttcaacctggagggatcccagatctatgaagactccatcgtcttacagtcagtgtttaagagtgcccggcagaaaattgccaaagaggaagagagtgaggatgaaagcaatgaagaggaggaagaggaagatgaagaagagtcagagtccgaggcaaaatcagtcaaggtgaaaattaagctcaataaaaaagatgacaaaggccgggacaaagggaaaggcaagaaaaggccaaatcgaggaaaagccaaacctgtagtgagcgattttgacagcgatgaggagcaggatgaacgtgaacagtcagaaggaagtgggacggatgatgagtgatcagtatggacctttttccttggtagaactgaattccttcctcccctgtctcatttctacccagtgagttcatttgtcatataggcactgggttgtttctatatcatcatcgtctataaactagctttaggatagtgccagacaaacatatgatatcatggtgtaaaaaacacacacatacacaaatatttgtaacatattgtgaccaaatgggcctcaaagattcagattgaaacaaacaaaaagcttttgatggaaaatatgtgggtggatagtatatttctatgggtgggtctaatttggtaacggtttgattgtgcctggttttatcacctgttcagatgagaagatttttgtcttttgtagcactgataaccaggagaagccattaaaagccactggttattttatttttcatcaggcaattttcgaggtttttatttgttcggtattgtttttttacactgtggtacatataagcaactttaataggtgataaatgtacagtagttagatttcacctgcatatacatttttccattttatgctctatgatctgaacaaaagctttttgaattgtataagatttatgtctactgtaaacattgcttaatttttttgctcttgatttaaaaaaaagttttgttgaaagcgctattgaatattgcaatctatatagtgtattggatggcttcttttgtcaccctgatctcctatgttaccaatgtgtatcgtctccttctccctaaagtgtacttaatctttgctttctttgcacaatgtctttggttgcaagtcataagcctgaggcaaataaaattccagtaatttc

SEQ ID NO: 187835 - DNA, 792 bp, Homo sapiens
  Payload ID: 16965
  Gene Symbol: SMARCA2
  Gene Name: SWI/SNF related, matrix associated, actin dependent regulator of chromatin, subfamily a, member 2
  ENST ID: ENST00000634343
  CDS Start-End: 98-792
agccttcgggccttgtagtaggtagcatgaaacagcagatttgagtatccacaatcctttcagtattaaattttcagtaaaataaaattacttgtatatgaaaacacagcctttccccagctctcttttttttcctgatcagctgatgaagagactagcagctcgctgctttgctggcttgttaattttatccccactaactgtgatttctgatagccggcctgctgatagtggtaaggccatcgaagacggcaatttggaggaaatggaagaggaagtacggcttaagaagcgaaaaagacgaagaaatgtggataaagatcctgcaaaagaagatgtggaaaaagctaagaagagaagaggccgccctcccgctgagaaactgtcaccaaatccccccaaactgacaaagcagatgaacgctatcatcgatactgtgataaactacaaagatagttcagggcgacagctcagtgaagtcttcattcagttaccttcaaggaaagaattaccagaatactatgaattaattaggaagccagtggatttcaaaaaaataaaggaaaggattcgtaatcataagtaccggagcctaggcgacctggagaaggatgtcatgcttctctgtcacaacgctcagacgttcaacctggagggatcccagatctatgaagactccatcgtcttacagtcagtgtttaagagtgcccggcagaaaattgccaaagaggaagagagtgaggatgaaagcaatgaagaggaggaagaggaagatgaagaagagtcagagtc

SEQ ID NO: 187836 - DNA, 5392 bp, Homo sapiens
  Payload ID: 16966
  Gene Symbol: SMARCA4
  Gene Name: SWI/SNF related, matrix associated, actin dependent regulator of chromatin, subfamily a, member 4
  Uniprot ID: P51532
  ENST ID: ENST00000344626
  CDS Start-End: 206-5149
gtgaagggggggcggtggccgaggcgggcgggcgcgcgcgcgaggcttcccctcgtttggcggcggcggcggcttctttgtttcgtgaagagaagcgagacgcccattctgcccccggccccgcgcggaggggcgggggaggcgccgggaagtcgacggcgccggcggctcctgcaggaggccactgtctgcagctcccgtgaagatgtccactccagacccacccctgggcggaactcctcggccaggtccttccccgggccctggcccttcccctggagccatgctgggccctagcccgggtccctcgccgggctccgcccacagcatgatggggcccagcccagggccgccctcagcaggacaccccatccccacccaggggcctggagggtaccctcaggacaacatgcaccagatgcacaagcccatggagtccatgcatgagaagggcatgtcggacgacccgcgctacaaccagatgaaaggaatggggatgcggtcagggggccatgctgggatggggcccccgcccagccccatggaccagcactcccaaggttacccctcgcccctgggtggctctgagcatgcctctagtccagttccagccagtggcccgtcttcggggccccagatgtcttccgggccaggaggtgccccgctggatggtgctgacccccaggccttggggcagcagaaccggggcccaaccccatttaaccagaaccagctgcaccagctcagagctcagatcatggcctacaagatgctggccagggggcagcccctccccgaccacctgcagatggcggtgcagggcaagcggccgatgcccgggatgcagcagcagatgccaacgctacctccaccctcggtgtccgcaacaggacccggccctggccctggccctggccccggcccgggtcccggcccggcacctccaaattacagcaggcctcatggtatgggagggcccaacatgcctcccccaggaccctcgggcgtgccccccgggatgccaggccagcctcctggagggcctcccaagccctggcctgaaggacccatggcgaatgctgctgcccccacgagcacccctcagaagctgattcccccgcagccaacgggccgcccttcccccgcgccccctgccgtcccacccgccgcctcgcccgtgatgccaccgcagacccagtcccccgggcagccggcccagcccgcgcccatggtgccactgcaccagaagcagagccgcatcacccccatccagaagccgcggggcctcgaccctgtggagatcctgcaggagcgcgagtacaggctgcaggctcgcatcgcacaccgaattcaggaacttgaaaaccttcccgggtccctggccggggatttgcgaaccaaagcgaccattgagctcaaggccctcaggctgctgaacttccagaggcagctgcgccaggaggtggtggtgtgcatgcggagggacacagcgctggagacagccctcaatgctaaggcctacaagcgcagcaagcgccagtccctgcgcgaggcccgcatcactgagaagctggagaagcagcagaagatcgagcaggagcgcaagcgccggcagaagcaccaggaatacctcaatagcattctccagcatgccaaggatttcaaggaatatcacagatccgtcacaggcaaaatccagaagctgaccaaggcagtggccacgtaccatgccaacacggagcgggagcagaagaaagagaacgagcggatcgagaaggagcgcatgcggaggctcatggctgaagatgaggaggggtaccgcaagctcatcgaccagaagaaggacaagcgcctggcctacctcttgcagcagacagacgagtacgtggctaacctcacggagctggtgcggcagcacaaggctgcccaggtcgccaaggagaaaaagaagaaaaagaaaaagaagaaggcagaaaatgcagaaggacagacgcctgccattgggccggatggcgagcctctggacgagaccagccagatgagcgacctcccggtgaaggtgatccacgtggagagtgggaagatcctcacaggcacagatgcccccaaagccgggcagctggaggcctggctcgagatgaacccggggtatgaagtagctccgaggtctgatagtgaagaaagtggctcagaagaagaggaagaggaggaggaggaagagcagccgcaggcagcacagcctcccaccctgcccgtggaggagaagaagaagattccagatccagacagcgatgacgtctctgaggtggacgcgcggcacatcattgagaatgccaagcaagatgtcgatgatgaatatggcgtgtcccaggcccttgcacgtggcctgcagtcctactatgccgtggcccatgctgtcactgagagagtggacaagcagtcagcgcttatggtcaatggtgtcctcaaacagtaccagatcaaaggtttggagtggctggtgtccctgtacaacaacaacctgaacggcatcctggccgacgagatgggcctggggaagaccatccagaccatcgcgctcatcacgtacctcatggagcacaaacgcatcaatgggcccttcctcatcatcgtgcctctctcaacgctgtccaactgggcgtacgagtttgacaagtgggccccctccgtggtgaaggtgtcttacaagggatccccagcagcaagacgggcctttgtcccccagctccggagtgggaagttcaacgtcttgctgacgacgtacgagtacatcatcaaagacaagcacatcctcgccaagatccgttggaagtacatgattgtggacgaaggtcaccgcatgaagaaccaccactgcaagctgacgcaggtgctcaacacgcactatgtggcaccccgccgcctgctgctgacgggcacaccgctgcagaacaagcttcccgagctctgggcgctgctcaacttcctgctgcccaccatcttcaagagctgcagcaccttcgagcagtggtttaacgcaccctttgccatgaccggggaaaaggtggacctgaatgaggaggaaaccattctcatcatccggcgtctccacaaagtgctgcggcccttcttgctccgacgactcaagaaggaagtcgaggcccagttgcccgaaaaggtggagtacgtcatcaagtgcgacatgtctgcgctgcagcgagtgctctaccgccacatgcaggccaagggcgtgctgctgactgatggctccgagaaggacaagaagggcaaaggcggcaccaagaccctgatgaacaccatcatgcagctgcggaagatctgcaaccacccctacatgttccagcacatcgaggagtccttttccgagcacttggggttcactggcggcattgtccaagggctggacctgtaccgagcctcgggtaaatttgagcttcttgatagaattcttcccaaactccgagcaaccaaccacaaagtgctgctgttctgccaaatgacctccctcatgaccatcatggaagattactttgcgtatcgcggctttaaatacctcaggcttgatggaaccacgaaggcggaggaccggggcatgctgctgaaaaccttcaacgagcccggctctgagtacttcatcttcctgctcagcacccgggctggggggctcggcctgaacctccagtcggcagacactgtgatcatttttgacagcgactggaatcctcaccaggacctgcaagcgcaggaccgagcccaccgcatcgggcagcagaacgaggtgcgtgtgctccgcctctgcaccgtcaacagcgtggaggagaagatcctagctgcagccaagtacaagctcaacgtggaccagaaggtgatccaggccggcatgttcgaccagaagtcctccagccatgagcggcgcgccttcctgcaggccatcctggagcacgaggagcaggatgagagcagacactgcagcacgggcagcggcagtgccagcttcgcccacactgcccctccgccagcgggcgtcaaccccgacttggaggagccacctctaaaggaggaagacgaggtgcccgacgacgagaccgtcaaccagatgatcgcccggcacgaggaggagtttgatctgttcatgcgcatggacctggaccgcaggcgcgaggaggcccgcaaccccaagcggaagccgcgcctcatggaggaggacgagctcccctcgtggatcatcaaggacgacgcggaggtggagcggctgacctgtgaggaggaggaggagaagatgttcggccgtggctcccgccaccgcaaggaggtggactacagcgactcactgacggagaagcagtggctcaaggccatcgaggagggcacgctggaggagatcgaagaggaggtccggcagaagaaatcatcacggaagcgcaagcgagacagcgacgccggctcctccaccccgaccaccagcacccgcagccgcgacaaggacgacgagagcaagaagcagaagaagcgcgggcggccgcctgccgagaaactctcccctaacccacccaacctcaccaagaagatgaagaagattgtggatgccgtgatcaagtacaaggacagcagcagtggacgtcagctcagcgaggtcttcatccagctgccctcgcgaaaggagctgcccgagtactacgagctcatccgcaagcccgtggacttcaagaagataaaggagcgcattcgcaaccacaagtaccgcagcctcaacgacctagagaaggacgtcatgctcctgtgccagaacgcacagaccttcaacctggagggctccctgatctatgaagactccatcgtcttgcagtcggtcttcaccagcgtgcggcagaaaatcgagaaggaggatgacagtgaaggcgaggagagtgaggaggaggaagagggcgaggaggaaggctccgaatccgaatctcggtccgtcaaagtgaagatcaagcttggccggaaggagaaggcacaggaccggctgaagggcggccggcggcggccgagccgagggtcccgagccaagccggtcgtgagtgacgatgacagtgaggaggaacaagaggaggaccgctcaggaagtggcagcgaagaagactgagccccgacattccagtctcgaccccgagcccctcgttccagagctgagatggcataggccttagcagtaacgggtagcagcagatgtagtttcagacttggagtaaaactgtataaacaaaagaatcttccatatttatacagcagagaagctgtaggactgtttgtgactggccctgtcctggcatcagtagcatctgtaacagcattaactgtcttaaagagagagagagagaattccgaa

SEQ ID NO: 187837 - DNA, 4938 bp, Homo sapiens
  Payload ID: 16966
  Gene Symbol: SMARCA4
  Gene Name: SWI/SNF related, matrix associated, actin dependent regulator of chromatin, subfamily a, member 4
  Uniprot ID: P51532
  ENST ID: ENST00000444061
  CDS Start-End: 97-4938
tgcccccggccccgcgcggaggggcgggggaggcgccgggaagtcgacggcgccggcggctcctgcttgaggccactgtctgcagctcccgtgaagatgtccactccagacccacccctgggcggaactcctcggccaggtccttccccgggccctggcccttcccctggagccatgctgggccctagcccgggtccctcgccgggctccgcccacagcatgatggggcccagcccagggccgccctcagcaggacaccccatccccacccaggggcctggagggtaccctcaggacaacatgcaccagatgcacaagcccatggagtccatgcatgagaagggcatgtcggacgacccgcgctacaaccagatgaaaggaatggggatgcggtcagggggccatgctgggatggggcccccgcccagccccatggaccagcactcccaaggttacccctcgcccctgggtggctctgagcatgcctctagtccagttccagccagtggcccgtcttcggggccccagatgtcttccgggccaggaggtgccccgctggatggtgctgacccccaggccttggggcagcagaaccggggcccaaccccatttaaccagaaccagctgcaccagctcagagctcagatcatggcctacaagatgctggccagggggcagcccctccccgaccacctgcagatggcggtgcagggcaagcggccgatgcccgggatgcagcagcagatgccaacgctacctccaccctcggtgtccgcaacaggacccggccctggccctggccctggccccggcccgggtcccggcccggcacctccaaattacagcaggcctcatggtatgggagggcccaacatgcctcccccaggaccctcgggcgtgccccccgggatgccaggccagcctcctggagggcctcccaagccctggcctgaaggacccatggcgaatgctgctgcccccacgagcacccctcagaagctgattcccccgcagccaacgggccgcccttcccccgcgccccctgccgtcccacccgccgcctcgcccgtgatgccaccgcagacccagtcccccgggcagccggcccagcccgcgcccatggtgccactgcaccagaagcagagccgcatcacccccatccagaagccgcggggcctcgaccctgtggagatcctgcaggagcgcgagtacaggctgcaggctcgcatcgcacaccgaattcaggaacttgaaaaccttcccgggtccctggccggggatttgcgaaccaaagcgaccattgagctcaaggccctcaggctgctgaacttccagaggcagctgcgccaggaggtggtggtgtgcatgcggagggacacagcgctggagacagccctcaatgctaaggcctacaagcgcagcaagcgccagtccctgcgcgaggcccgcatcactgagaagctggagaagcagcagaagatcgagcaggagcgcaagcgccggcagaagcaccaggaatacctcaatagcattctccagcatgccaaggatttcaaggaatatcacagatccgtcacaggcaaaatccagaagctgaccaaggcagtggccacgtaccatgccaacacggagcgggagcagaagaaagagaacgagcggatcgagaaggagcgcatgcggaggctcatggctgaagatgaggaggggtaccgcaagctcatcgaccagaagaaggacaagcgcctggcctacctcttgcagcagacagacgagtacgtggctaacctcacggagctggtgcggcagcacaaggctgcccaggtcgccaaggagaaaaagaagaaaaagaaaaagaagaaggcagaaaatgcagaaggacagacgcctgccattgggccggatggcgagcctctggacgagaccagccagatgagcgacctcccggtgaaggtgatccacgtggagagtgggaagatcctcacaggcacagatgcccccaaagccgggcagctggaggcctggctcgagatgaacccggggtatgaagtagctccgaggtctgatagtgaagaaagtggctcagaagaagaggaagaggaggaggaggaagagcagccgcaggcagcacagcctcccaccctgcccgtggaggagaagaagaagattccagatccagacagcgatgacgtctctgaggtggacgcgcggcacatcattgagaatgccaagcaagatgtcgatgatgaatatggcgtgtcccaggcccttgcacgtggcctgcagtcctactatgccgtggcccatgctgtcactgagagagtggacaagcagtcagcgcttatggtcaatggtgtcctcaaacagtaccagatcaaaggtttggagtggctggtgtccctgtacaacaacaacctgaacggcatcctggccgacgagatgggcctggggaagaccatccagaccatcgcgctcatcacgtacctcatggagcacaaacgcatcaatgggcccttcctcatcatcgtgcctctctcaacgctgtccaactgggcgtacgagtttgacaagtgggccccctccgtggtgaaggtgtcttacaagggatccccagcagcaagacgggcctttgtcccccagctccggagtgggaagttcaacgtcttgctgacgacgtacgagtacatcatcaaagacaagcacatcctcgccaagatccgttggaagtacatgattgtggacgaaggtcaccgcatgaagaaccaccactgcaagctgacgcaggtgctcaacacgcactatgtggcaccccgccgcctgctgctgacgggcacaccgctgcagaacaagcttcccgagctctgggcgctgctcaacttcctgctgcccaccatcttcaagagctgcagcaccttcgagcagtggtttaacgcaccctttgccatgaccggggaaaaggtggacctgaatgaggaggaaaccattctcatcatccggcgtctccacaaagtgctgcggcccttcttgctccgacgactcaagaaggaagtcgaggcccagttgcccgaaaaggtggagtacgtcatcaagtgcgacatgtctgcgctgcagcgagtgctctaccgccacatgcaggccaagggcgtgctgctgactgatggctccgagaaggacaagaagggcaaaggcggcaccaagaccctgatgaacaccatcatgcagctgcggaagatctgcaaccacccctacatgttccagcacatcgaggagtccttttccgagcacttggggttcactggcggcattgtccaagggctggacctgtaccgagcctcgggtaaatttgagcttcttgatagaattcttcccaaactccgagcaaccaaccacaaagtgctgctgttctgccaaatgacctccctcatgaccatcatggaagattactttgcgtatcgcggctttaaatacctcaggcttgatggaaccacgaaggcggaggaccggggcatgctgctgaaaaccttcaacgagcccggctctgagtacttcatcttcctgctcagcacccgggctggggggctcggcctgaacctccagtcggcagacactgtgatcatttttgacagcgactggaatcctcaccaggacctgcaagcgcaggaccgagcccaccgcatcgggcagcagaacgaggtgcgtgtgctccgcctctgcaccgtcaacagcgtggaggagaagatcctagctgcagccaagtacaagctcaacgtggaccagaaggtgatccaggccggcatgttcgaccagaagtcctccagccatgagcggcgcgccttcctgcaggccatcctggagcacgaggagcaggatgaggaggaagacgaggtgcccgacgacgagaccgtcaaccagatgatcgcccggcacgaggaggagtttgatctgttcatgcgcatggacctggaccgcaggcgcgaggaggcccgcaaccccaagcggaagccgcgcctcatggaggaggacgagctcccctcgtggatcatcaaggacgacgcggaggtggagcggctgacctgtgaggaggaggaggagaagatgttcggccgtggctcccgccaccgcaaggaggtggactacagcgactcactgacggagaagcagtggctcaaggccatcgaggagggcacgctggaggagatcgaagaggaggtccggcagaagaaatcatcacggaagcgcaagcgagacagcgacgccggctcctccaccccgaccaccagcacccgcagccgcgacaaggacgacgagagcaagaagcagaagaagcgcgggcggccgcctgccgagaaactctcccctaacccacccaacctcaccaagaagatgaagaagattgtggatgccgtgatcaagtacaaggacagcagtggacgtcagctcagcgaggtcttcatccagctgccctcgcgaaaggagctgcccgagtactacgagctcatccgcaagcccgtggacttcaagaagataaaggagcgcattcgcaaccacaagtaccgcagcctcaacgacctagagaaggacgtcatgctcctgtgccagaacgcacagaccttcaacctggagggctccctgatctatgaagactccatcgtcttgcagtcggtcttcaccagcgtgcggcagaaaatcgagaaggaggatgacagtgaaggcgaggagagtgaggaggaggaagagggcgaggaggaaggctccgaatccgaatctcggtccgtcaaagtgaagatcaagcttggccggaaggagaaggcacaggaccggctgaagggcggccggcggcggccgagccgagggtcccgagccaagccggtcgtgagtgacgatgacagtgaggaggaacaagaggaggaccgctcaggaagtggcagcgaagaagactga

SEQ ID NO: 187838 - DNA, 5691 bp, Homo sapiens
  Payload ID: 16966
  Gene Symbol: SMARCA4
  Gene Name: SWI/SNF related, matrix associated, actin dependent regulator of chromatin, subfamily a, member 4
  Uniprot ID: P51532
  ENST ID: ENST00000429416
  CDS Start-End: 282-5225
gtgaagggggggcggtggccgaggcgggcgggcgcgcgcgcgaggcttcccctcgtttggcggcggcggcggcttctttgtttcgtgaagagaagcgagacgcccattctgcccccggccccgcgcggaggggcgggggaggcgccgggaagtcgacggcgccggcggctcctgcgtctcgcccttttgcccaggctagagtgcagtggtgcggtcatggttcactgcagcctcaacctcctggactcagcaggaggccactgtctgcagctcccgtgaagatgtccactccagacccacccctgggcggaactcctcggccaggtccttccccgggccctggcccttcccctggagccatgctgggccctagcccgggtccctcgccgggctccgcccacagcatgatggggcccagcccagggccgccctcagcaggacaccccatccccacccaggggcctggagggtaccctcaggacaacatgcaccagatgcacaagcccatggagtccatgcatgagaagggcatgtcggacgacccgcgctacaaccagatgaaaggaatggggatgcggtcagggggccatgctgggatggggcccccgcccagccccatggaccagcactcccaaggttacccctcgcccctgggtggctctgagcatgcctctagtccagttccagccagtggcccgtcttcggggccccagatgtcttccgggccaggaggtgccccgctggatggtgctgacccccaggccttggggcagcagaaccggggcccaaccccatttaaccagaaccagctgcaccagctcagagctcagatcatggcctacaagatgctggccagggggcagcccctccccgaccacctgcagatggcggtgcagggcaagcggccgatgcccgggatgcagcagcagatgccaacgctacctccaccctcggtgtccgcaacaggacccggccctggccctggccctggccccggcccgggtcccggcccggcacctccaaattacagcaggcctcatggtatgggagggcccaacatgcctcccccaggaccctcgggcgtgccccccgggatgccaggccagcctcctggagggcctcccaagccctggcctgaaggacccatggcgaatgctgctgcccccacgagcacccctcagaagctgattcccccgcagccaacgggccgcccttcccccgcgccccctgccgtcccacccgccgcctcgcccgtgatgccaccgcagacccagtcccccgggcagccggcccagcccgcgcccatggtgccactgcaccagaagcagagccgcatcacccccatccagaagccgcggggcctcgaccctgtggagatcctgcaggagcgcgagtacaggctgcaggctcgcatcgcacaccgaattcaggaacttgaaaaccttcccgggtccctggccggggatttgcgaaccaaagcgaccattgagctcaaggccctcaggctgctgaacttccagaggcagctgcgccaggaggtggtggtgtgcatgcggagggacacagcgctggagacagccctcaatgctaaggcctacaagcgcagcaagcgccagtccctgcgcgaggcccgcatcactgagaagctggagaagcagcagaagatcgagcaggagcgcaagcgccggcagaagcaccaggaatacctcaatagcattctccagcatgccaaggatttcaaggaatatcacagatccgtcacaggcaaaatccagaagctgaccaaggcagtggccacgtaccatgccaacacggagcgggagcagaagaaagagaacgagcggatcgagaaggagcgcatgcggaggctcatggctgaagatgaggaggggtaccgcaagctcatcgaccagaagaaggacaagcgcctggcctacctcttgcagcagacagacgagtacgtggctaacctcacggagctggtgcggcagcacaaggctgcccaggtcgccaaggagaaaaagaagaaaaagaaaaagaagaaggcagaaaatgcagaaggacagacgcctgccattgggccggatggcgagcctctggacgagaccagccagatgagcgacctcccggtgaaggtgatccacgtggagagtgggaagatcctcacaggcacagatgcccccaaagccgggcagctggaggcctggctcgagatgaacccggggtatgaagtagctccgaggtctgatagtgaagaaagtggctcagaagaagaggaagaggaggaggaggaagagcagccgcaggcagcacagcctcccaccctgcccgtggaggagaagaagaagattccagatccagacagcgatgacgtctctgaggtggacgcgcggcacatcattgagaatgccaagcaagatgtcgatgatgaatatggcgtgtcccaggcccttgcacgtggcctgcagtcctactatgccgtggcccatgctgtcactgagagagtggacaagcagtcagcgcttatggtcaatggtgtcctcaaacagtaccagatcaaaggtttggagtggctggtgtccctgtacaacaacaacctgaacggcatcctggccgacgagatgggcctggggaagaccatccagaccatcgcgctcatcacgtacctcatggagcacaaacgcatcaatgggcccttcctcatcatcgtgcctctctcaacgctgtccaactgggcgtacgagtttgacaagtgggccccctccgtggtgaaggtgtcttacaagggatccccagcagcaagacgggcctttgtcccccagctccggagtgggaagttcaacgtcttgctgacgacgtacgagtacatcatcaaagacaagcacatcctcgccaagatccgttggaagtacatgattgtggacgaaggtcaccgcatgaagaaccaccactgcaagctgacgcaggtgctcaacacgcactatgtggcaccccgccgcctgctgctgacgggcacaccgctgcagaacaagcttcccgagctctgggcgctgctcaacttcctgctgcccaccatcttcaagagctgcagcaccttcgagcagtggtttaacgcaccctttgccatgaccggggaaaaggtggacctgaatgaggaggaaaccattctcatcatccggcgtctccacaaagtgctgcggcccttcttgctccgacgactcaagaaggaagtcgaggcccagttgcccgaaaaggtggagtacgtcatcaagtgcgacatgtctgcgctgcagcgagtgctctaccgccacatgcaggccaagggcgtgctgctgactgatggctccgagaaggacaagaagggcaaaggcggcaccaagaccctgatgaacaccatcatgcagctgcggaagatctgcaaccacccctacatgttccagcacatcgaggagtccttttccgagcacttggggttcactggcggcattgtccaagggctggacctgtaccgagcctcgggtaaatttgagcttcttgatagaattcttcccaaactccgagcaaccaaccacaaagtgctgctgttctgccaaatgacctccctcatgaccatcatggaagattactttgcgtatcgcggctttaaatacctcaggcttgatggaaccacgaaggcggaggaccggggcatgctgctgaaaaccttcaacgagcccggctctgagtacttcatcttcctgctcagcacccgggctggggggctcggcctgaacctccagtcggcagacactgtgatcatttttgacagcgactggaatcctcaccaggacctgcaagcgcaggaccgagcccaccgcatcgggcagcagaacgaggtgcgtgtgctccgcctctgcaccgtcaacagcgtggaggagaagatcctagctgcagccaagtacaagctcaacgtggaccagaaggtgatccaggccggcatgttcgaccagaagtcctccagccatgagcggcgcgccttcctgcaggccatcctggagcacgaggagcaggatgagagcagacactgcagcacgggcagcggcagtgccagcttcgcccacactgcccctccgccagcgggcgtcaaccccgacttggaggagccacctctaaaggaggaagacgaggtgcccgacgacgagaccgtcaaccagatgatcgcccggcacgaggaggagtttgatctgttcatgcgcatggacctggaccgcaggcgcgaggaggcccgcaaccccaagcggaagccgcgcctcatggaggaggacgagctcccctcgtggatcatcaaggacgacgcggaggtggagcggctgacctgtgaggaggaggaggagaagatgttcggccgtggctcccgccaccgcaaggaggtggactacagcgactcactgacggagaagcagtggctcaaggccatcgaggagggcacgctggaggagatcgaagaggaggtccggcagaagaaatcatcacggaagcgcaagcgagacagcgacgccggctcctccaccccgaccaccagcacccgcagccgcgacaaggacgacgagagcaagaagcagaagaagcgcgggcggccgcctgccgagaaactctcccctaacccacccaacctcaccaagaagatgaagaagattgtggatgccgtgatcaagtacaaggacagcagcagtggacgtcagctcagcgaggtcttcatccagctgccctcgcgaaaggagctgcccgagtactacgagctcatccgcaagcccgtggacttcaagaagataaaggagcgcattcgcaaccacaagtaccgcagcctcaacgacctagagaaggacgtcatgctcctgtgccagaacgcacagaccttcaacctggagggctccctgatctatgaagactccatcgtcttgcagtcggtcttcaccagcgtgcggcagaaaatcgagaaggaggatgacagtgaaggcgaggagagtgaggaggaggaagagggcgaggaggaaggctccgaatccgaatctcggtccgtcaaagtgaagatcaagcttggccggaaggagaaggcacaggaccggctgaagggcggccggcggcggccgagccgagggtcccgagccaagccggtcgtgagtgacgatgacagtgaggaggaacaagaggaggaccgctcaggaagtggcagcgaagaagactgagccccgacattccagtctcgaccccgagcccctcgttccagagctgagatggcataggccttagcagtaacgggtagcagcagatgtagtttcagacttggagtaaaactgtataaacaaaagaatcttccatatttatacagcagagaagctgtaggactgtttgtgactggccctgtcctggcatcagtagcatctgtaacagcattaactgtcttaaagagagagagagagaattccgaattggggaacacacgatacctgtttttcttttccgttgctggcagtactgttgcgccgcagtttggagtcactgtagttaagtgtggatgcatgtgcgtcaccgtccactcctcctactgtattttattggacaggtcagactcgccgggggcccggcgagggtatgtcagtgtcactggatgtcaaacagtaataaattaaaccaacaacaaaacgcacagcc

SEQ ID NO: 187839 - DNA, 5506 bp, Homo sapiens
  Payload ID: 16966
  Gene Symbol: SMARCA4
  Gene Name: SWI/SNF related, matrix associated, actin dependent regulator of chromatin, subfamily a, member 4
  ENST ID: ENST00000450717
  CDS Start-End: 1-5040
atgtccactccagacccacccctgggcggaactcctcggccaggtccttccccgggccctggcccttcccctggagccatgctgggccctagcccgggtccctcgccgggctccgcccacagcatgatggggcccagcccagggccgccctcagcaggacaccccatccccacccaggggcctggagggtaccctcaggacaacatgcaccagatgcacaagcccatggagtccatgcatgagaagggcatgtcggacgacccgcgctacaaccagatgaaaggaatggggatgcggtcagggggccatgctgggatggggcccccgcccagccccatggaccagcactcccaaggttacccctcgcccctgggtggctctgagcatgcctctagtccagttccagccagtggcccgtcttcggggccccagatgtcttccgggccaggaggtgccccgctggatggtgctgacccccaggccttggggcagcagaaccggggcccaaccccatttaaccagaaccagctgcaccagctcagagctcagatcatggcctacaagatgctggccagggggcagcccctccccgaccacctgcagatggcggtgcagggcaagcggccgatgcccgggatgcagcagcagatgccaacgctacctccaccctcggtgtccgcaacaggacccggccctggccctggccctggccccggcccgggtcccggcccggcacctccaaattacagcaggcctcatggtatgggagggcccaacatgcctcccccaggaccctcgggcgtgccccccgggatgccaggccagcctcctggagggcctcccaagccctggcctgaaggacccatggcgaatgctgctgcccccacgagcacccctcagaagctgattcccccgcagccaacgggccgcccttcccccgcgccccctgccgtcccacccgccgcctcgcccgtgatgccaccgcagacccagtcccccgggcagccggcccagcccgcgcccatggtgccactgcaccagaagcagagccgcatcacccccatccagaagccgcggggcctcgaccctgtggagatcctgcaggagcgcgagtacaggctgcaggctcgcatcgcacaccgaattcaggaacttgaaaaccttcccgggtccctggccggggatttgcgaaccaaagcgaccattgagctcaaggccctcaggctgctgaacttccagaggcagctgcgccaggaggtggtggtgtgcatgcggagggacacagcgctggagacagccctcaatgctaaggcctacaagcgcagcaagcgccagtccctgcgcgaggcccgcatcactgagaagctggagaagcagcagaagatcgagcaggagcgcaagcgccggcagaagcaccaggaatacctcaatagcattctccagcatgccaaggatttcaaggaatatcacagatccgtcacaggcaaaatccagaagctgaccaaggcagtggccacgtaccatgccaacacggagcgggagcagaagaaagagaacgagcggatcgagaaggagcgcatgcggaggctcatggctgaagatgaggaggggtaccgcaagctcatcgaccagaagaaggacaagcgcctggcctacctcttgcagcagacagacgagtacgtggctaacctcacggagctggtgcggcagcacaaggctgcccaggtcgccaaggagaaaaagaagaaaaagaaaaagaagaaggcagaaaatgcagaaggacagacgcctgccattgggccggatggcgagcctctggacgagaccagccagatgagcgacctcccggtgaaggtgatccacgtggagagtgggaagatcctcacaggcacagatgcccccaaagccgggcagctggaggcctggctcgagatgaacccggggtatgaagtagctccgaggtctgatagtgaagaaagtggctcagaagaagaggaagaggaggaggaggaagagcagccgcaggcagcacagcctcccaccctgcccgtggaggagaagaagaagattccagatccagacagcgatgacgtctctgaggtggacgcgcggcacatcattgagaatgccaagcaagatgtcgatgatgaatatggcgtgtcccaggcccttgcacgtggcctgcagtcctactatgccgtggcccatgctgtcactgagagagtggacaagcagtcagcgcttatggtcaatggtgtcctcaaacagtaccagatcaaaggtttggagtggctggtgtccctgtacaacaacaacctgaacggcatcctggccgacgagatgggcctggggaagaccatccagaccatcgcgctcatcacgtacctcatggagcacaaacgcatcaatgggcccttcctcatcatcgtgcctctctcaacgctgtccaactgggcgtacgagtttgacaagtgggccccctccgtggtgaaggtgtcttacaagggatccccagcagcaagacgggcctttgtcccccagctccggagtgggaagttcaacgtcttgctgacgacgtacgagtacatcatcaaagacaagcacatcctcgccaagatccgttggaagtacatgattgtggacgaaggtcaccgcatgaagaaccaccactgcaagctgacgcaggtgctcaacacgcactatgtggcaccccgccgcctgctgctgacgggcacaccgctgcagaacaagcttcccgagctctgggcgctgctcaacttcctgctgcccaccatcttcaagagctgcagcaccttcgagcagtggtttaacgcaccctttgccatgaccggggaaaaggtggacctgaatgaggaggaaaccattctcatcatccggcgtctccacaaagtgctgcggcccttcttgctccgacgactcaagaaggaagtcgaggcccagttgcccgaaaaggtggagtacgtcatcaagtgcgacatgtctgcgctgcagcgagtgctctaccgccacatgcaggccaagggcgtgctgctgactgatggctccgagaaggacaagaagggcaaaggcggcaccaagaccctgatgaacaccatcatgcagctgcggaagatctgcaaccacccctacatgttccagcacatcgaggagtccttttccgagcacttggggttcactggcggcattgtccaagggctggacctgtaccgagcctcgggtaaatttgagcttcttgatagaattcttcccaaactccgagcaaccaaccacaaagtgctgctgttctgccaaatgacctccctcatgaccatcatggaagattactttgcgtatcgcggctttaaatacctcaggcttgatggaaccacgaaggcggaggaccggggcatgctgctgaaaaccttcaacgagcccggctctgagtacttcatcttcctgctcagcacccgggctggggggctcggcctgaacctccagtcggcagacactgtgatcatttttgacagcgactggaatcctcaccaggacctgcaagcgcaggaccgagcccaccgcatcgggcagcagaacgaggtgcgtgtgctccgcctctgcaccgtcaacagcgtggaggagaagatcctagctgcagccaagtacaagctcaacgtggaccagaaggtgatccaggccggcatgttcgaccagaagtcctccagccatgagcggcgcgccttcctgcaggccatcctggagcacgaggagcaggatgagagcagacactgcagcacgggcagcggcagtgccagcttcgcccacactgcccctccgccagcgggcgtcaaccccgacttggaggagccacctctaaaggaggaagacgaggtgcccgacgacgagaccgtcaaccagatgatcgcccggcacgaggaggagtttgatctgttcatgcgcatggacctggaccgcaggcgcgaggaggcccgcaaccccaagcggaagccgcgcctcatggaggaggacgagctcccctcgtggatcatcaaggacgacgcggaggtggagcggctgacctgtgaggaggaggaggagaagatgttcggccgtggctcccgccaccgcaaggaggtggactacagcgactcactgacggagaagcagtggctcaagaaaattacaggaaaagatatccatgacacagccagcagtgtggcacgtgggctacaattccagcgtggccttcagttctgcacacgtgcgtcaaaggccatcgaggagggcacgctggaggagatcgaagaggaggtccggcagaagaaatcatcacggaagcgcaagcgagacagcgacgccggctcctccaccccgaccaccagcacccgcagccgcgacaaggacgacgagagcaagaagcagaagaagcgcgggcggccgcctgccgagaaactctcccctaacccacccaacctcaccaagaagatgaagaagattgtggatgccgtgatcaagtacaaggacagcagcagtggacgtcagctcagcgaggtcttcatccagctgccctcgcgaaaggagctgcccgagtactacgagctcatccgcaagcccgtggacttcaagaagataaaggagcgcattcgcaaccacaagtaccgcagcctcaacgacctagagaaggacgtcatgctcctgtgccagaacgcacagaccttcaacctggagggctccctgatctatgaagactccatcgtcttgcagtcggtcttcaccagcgtgcggcagaaaatcgagaaggaggatgacagtgaaggcgaggagagtgaggaggaggaagagggcgaggaggaaggctccgaatccgaatctcggtccgtcaaagtgaagatcaagcttggccggaaggagaaggcacaggaccggctgaagggcggccggcggcggccgagccgagggtcccgagccaagccggtcgtgagtgacgatgacagtgaggaggaacaagaggaggaccgctcaggaagtggcagcgaagaagactgagccccgacattccagtctcgaccccgagcccctcgttccagagctgagatggcataggccttagcagtaacgggtagcagcagatgtagtttcagacttggagtaaaactgtataaacaaaagaatcttccatatttatacagcagagaagctgtaggactgtttgtgactggccctgtcctggcatcagtagcatctgtaacagcattaactgtcttaaagagagagagagagaattccgaattggggaacacacgatacctgtttttcttttccgttgctggcagtactgttgcgccgcagtttggagtcactgtagttaagtgtggatgcatgtgcgtcaccgtccactcctcctactgtattttattggacaggtcagactcgccgggggcccggcgagggtatgtcagtgtcactggatgtcaaacagtaataaattaaaccaacaacaaaacgcacagcc

SEQ ID NO: 187840 - DNA, 5512 bp, Homo sapiens
  Payload ID: 16966
  Gene Symbol: SMARCA4
  Gene Name: SWI/SNF related, matrix associated, actin dependent regulator of chromatin, subfamily a, member 4
  ENST ID: ENST00000413806
  CDS Start-End: 1-5046
atgtccactccagacccacccctgggcggaactcctcggccaggtccttccccgggccctggcccttcccctggagccatgctgggccctagcccgggtccctcgccgggctccgcccacagcatgatggggcccagcccagggccgccctcagcaggacaccccatccccacccaggggcctggagggtaccctcaggacaacatgcaccagatgcacaagcccatggagtccatgcatgagaagggcatgtcggacgacccgcgctacaaccagatgaaaggaatggggatgcggtcagggggccatgctgggatggggcccccgcccagccccatggaccagcactcccaaggttacccctcgcccctgggtggctctgagcatgcctctagtccagttccagccagtggcccgtcttcggggccccagatgtcttccgggccaggaggtgccccgctggatggtgctgacccccaggccttggggcagcagaaccggggcccaaccccatttaaccagaaccagctgcaccagctcagagctcagatcatggcctacaagatgctggccagggggcagcccctccccgaccacctgcagatggcggtgcagggcaagcggccgatgcccgggatgcagcagcagatgccaacgctacctccaccctcggtgtccgcaacaggacccggccctggccctggccctggccccggcccgggtcccggcccggcacctccaaattacagcaggcctcatggtatgggagggcccaacatgcctcccccaggaccctcgggcgtgccccccgggatgccaggccagcctcctggagggcctcccaagccctggcctgaaggacccatggcgaatgctgctgcccccacgagcacccctcagaagctgattcccccgcagccaacgggccgcccttcccccgcgccccctgccgtcccacccgccgcctcgcccgtgatgccaccgcagacccagtcccccgggcagccggcccagcccgcgcccatggtgccactgcaccagaagcagagccgcatcacccccatccagaagccgcggggcctcgaccctgtggagatcctgcaggagcgcgagtacaggctgcaggctcgcatcgcacaccgaattcaggaacttgaaaaccttcccgggtccctggccggggatttgcgaaccaaagcgaccattgagctcaaggccctcaggctgctgaacttccagaggcagctgcgccaggaggtggtggtgtgcatgcggagggacacagcgctggagacagccctcaatgctaaggcctacaagcgcagcaagcgccagtccctgcgcgaggcccgcatcactgagaagctggagaagcagcagaagatcgagcaggagcgcaagcgccggcagaagcaccaggaatacctcaatagcattctccagcatgccaaggatttcaaggaatatcacagatccgtcacaggcaaaatccagaagctgaccaaggcagtggccacgtaccatgccaacacggagcgggagcagaagaaagagaacgagcggatcgagaaggagcgcatgcggaggctcatgggacagagggaaaagagcaggcgcgggcttgggagtcagtcctgggctcggatatttgctgatctctctgatcatcagaatgactgtgtgacctcagtgactgagtcgctggttgggcagatattggcagcgtgttctggtgaggagggggaagtggagtggaaggggagggacagggtaagaaggcttcgggctgaagatgaggaggggtaccgcaagctcatcgaccagaagaaggacaagcgcctggcctacctcttgcagcagacagacgagtacgtggctaacctcacggagctggtgcggcagcacaaggctgcccaggtcgccaaggagaaaaagaagaaaaagaaaaagaagaaggcagaaaatgcagaaggacagacgcctgccattgggccggatggcgagcctctggacgagaccagccagatgagcgacctcccggtgaaggtgatccacgtggagagtgggaagatcctcacaggcacagatgcccccaaagccgggcagctggaggcctggctcgagatgaacccggggtatgaagtagctccgaggtctgatagtgaagaaagtggctcagaagaagaggaagaggaggaggaggaagagcagccgcaggcagcacagcctcccaccctgcccgtggaggagaagaagaagattccagatccagacagcgatgacgtctctgaggtggacgcgcggcacatcattgagaatgccaagcaagatgtcgatgatgaatatggcgtgtcccaggcccttgcacgtggcctgcagtcctactatgccgtggcccatgctgtcactgagagagtggacaagcagtcagcgcttatggtcaatggtgtcctcaaacagtaccagatcaaaggtttggagtggctggtgtccctgtacaacaacaacctgaacggcatcctggccgacgagatgggcctggggaagaccatccagaccatcgcgctcatcacgtacctcatggagcacaaacgcatcaatgggcccttcctcatcatcgtgcctctctcaacgctgtccaactgggcgtacgagtttgacaagtgggccccctccgtggtgaaggtgtcttacaagggatccccagcagcaagacgggcctttgtcccccagctccggagtgggaagttcaacgtcttgctgacgacgtacgagtacatcatcaaagacaagcacatcctcgccaagatccgttggaagtacatgattgtggacgaaggtcaccgcatgaagaaccaccactgcaagctgacgcaggtgctcaacacgcactatgtggcaccccgccgcctgctgctgacgggcacaccgctgcagaacaagcttcccgagctctgggcgctgctcaacttcctgctgcccaccatcttcaagagctgcagcaccttcgagcagtggtttaacgcaccctttgccatgaccggggaaaaggtggacctgaatgaggaggaaaccattctcatcatccggcgtctccacaaagtgctgcggcccttcttgctccgacgactcaagaaggaagtcgaggcccagttgcccgaaaaggtggagtacgtcatcaagtgcgacatgtctgcgctgcagcgagtgctctaccgccacatgcaggccaagggcgtgctgctgactgatggctccgagaaggacaagaagggcaaaggcggcaccaagaccctgatgaacaccatcatgcagctgcggaagatctgcaaccacccctacatgttccagcacatcgaggagtccttttccgagcacttggggttcactggcggcattgtccaagggctggacctgtaccgagcctcgggtaaatttgagcttcttgatagaattcttcccaaactccgagcaaccaaccacaaagtgctgctgttctgccaaatgacctccctcatgaccatcatggaagattactttgcgtatcgcggctttaaatacctcaggcttgatggaaccacgaaggcggaggaccggggcatgctgctgaaaaccttcaacgagcccggctctgagtacttcatcttcctgctcagcacccgggctggggggctcggcctgaacctccagtcggcagacactgtgatcatttttgacagcgactggaatcctcaccaggacctgcaagcgcaggaccgagcccaccgcatcgggcagcagaacgaggtgcgtgtgctccgcctctgcaccgtcaacagcgtggaggagaagatcctagctgcagccaagtacaagctcaacgtggaccagaaggtgatccaggccggcatgttcgaccagaagtcctccagccatgagcggcgcgccttcctgcaggccatcctggagcacgaggagcaggatgaggaggaagacgaggtgcccgacgacgagaccgtcaaccagatgatcgcccggcacgaggaggagtttgatctgttcatgcgcatggacctggaccgcaggcgcgaggaggcccgcaaccccaagcggaagccgcgcctcatggaggaggacgagctcccctcgtggatcatcaaggacgacgcggaggtggagcggctgacctgtgaggaggaggaggagaagatgttcggccgtggctcccgccaccgcaaggaggtggactacagcgactcactgacggagaagcagtggctcaagaccctgaaggccatcgaggagggcacgctggaggagatcgaagaggaggtccggcagaagaaatcatcacggaagcgcaagcgagacagcgacgccggctcctccaccccgaccaccagcacccgcagccgcgacaaggacgacgagagcaagaagcagaagaagcgcgggcggccgcctgccgagaaactctcccctaacccacccaacctcaccaagaagatgaagaagattgtggatgccgtgatcaagtacaaggacagcagcagtggacgtcagctcagcgaggtcttcatccagctgccctcgcgaaaggagctgcccgagtactacgagctcatccgcaagcccgtggacttcaagaagataaaggagcgcattcgcaaccacaagtaccgcagcctcaacgacctagagaaggacgtcatgctcctgtgccagaacgcacagaccttcaacctggagggctccctgatctatgaagactccatcgtcttgcagtcggtcttcaccagcgtgcggcagaaaatcgagaaggaggatgacagtgaaggcgaggagagtgaggaggaggaagagggcgaggaggaaggctccgaatccgaatctcggtccgtcaaagtgaagatcaagcttggccggaaggagaaggcacaggaccggctgaagggcggccggcggcggccgagccgagggtcccgagccaagccggtcgtgagtgacgatgacagtgaggaggaacaagaggaggaccgctcaggaagtggcagcgaagaagactgagccccgacattccagtctcgaccccgagcccctcgttccagagctgagatggcataggccttagcagtaacgggtagcagcagatgtagtttcagacttggagtaaaactgtataaacaaaagaatcttccatatttatacagcagagaagctgtaggactgtttgtgactggccctgtcctggcatcagtagcatctgtaacagcattaactgtcttaaagagagagagagagaattccgaattggggaacacacgatacctgtttttcttttccgttgctggcagtactgttgcgccgcagtttggagtcactgtagttaagtgtggatgcatgtgcgtcaccgtccactcctcctactgtattttattggacaggtcagactcgccgggggcccggcgagggtatgtcagtgtcactggatgtcaaacagtaataaattaaaccaacaacaaaacgcacagcc

SEQ ID NO: 187841 - DNA, 5139 bp, Homo sapiens
  Payload ID: 16966
  Gene Symbol: SMARCA4
  Gene Name: SWI/SNF related, matrix associated, actin dependent regulator of chromatin, subfamily a, member 4
  Uniprot ID: P51532
  ENST ID: ENST00000541122
  CDS Start-End: 286-5139
tttcgtgaagagaagcgagacgcccattctgcccccggccccgcgcggaggggcgggggaggcgccgggaagtcgacggcgccggcggctcctgggaaaggagcctctgcttcacattttgatgggagcatctgaggacctcatctgtgtgatgctcctagtgcgatacctttcacgtgctaagcagctgctcagtaaacctggggagagatggggcaccttggtttcaccagctgagcggctggcacttcctgcctgaggccactgtctgcagctcccgtgaagatgtccactccagacccacccctgggcggaactcctcggccaggtccttccccgggccctggcccttcccctggagccatgctgggccctagcccgggtccctcgccgggctccgcccacagcatgatggggcccagcccagggccgccctcagcaggacaccccatccccacccaggggcctggagggtaccctcaggacaacatgcaccagatgcacaagcccatggagtccatgcatgagaagggcatgtcggacgacccgcgctacaaccagatgaaaggaatggggatgcggtcagggggccatgctgggatggggcccccgcccagccccatggaccagcactcccaaggttacccctcgcccctgggtggctctgagcatgcctctagtccagttccagccagtggcccgtcttcggggccccagatgtcttccgggccaggaggtgccccgctggatggtgctgacccccaggccttggggcagcagaaccggggcccaaccccatttaaccagaaccagctgcaccagctcagagctcagatcatggcctacaagatgctggccagggggcagcccctccccgaccacctgcagatggcggtgcagggcaagcggccgatgcccgggatgcagcagcagatgccaacgctacctccaccctcggtgtccgcaacaggacccggccctggccctggccctggccccggcccgggtcccggcccggcacctccaaattacagcaggcctcatggtatgggagggcccaacatgcctcccccaggaccctcgggcgtgccccccgggatgccaggccagcctcctggagggcctcccaagccctggcctgaaggacccatggcgaatgctgctgcccccacgagcacccctcagaagctgattcccccgcagccaacgggccgcccttcccccgcgccccctgccgtcccacccgccgcctcgcccgtgatgccaccgcagacccagtcccccgggcagccggcccagcccgcgcccatggtgccactgcaccagaagcagagccgcatcacccccatccagaagccgcggggcctcgaccctgtggagatcctgcaggagcgcgagtacaggctgcaggctcgcatcgcacaccgaattcaggaacttgaaaaccttcccgggtccctggccggggatttgcgaaccaaagcgaccattgagctcaaggccctcaggctgctgaacttccagaggcagctgcgccaggaggtggtggtgtgcatgcggagggacacagcgctggagacagccctcaatgctaaggcctacaagcgcagcaagcgccagtccctgcgcgaggcccgcatcactgagaagctggagaagcagcagaagatcgagcaggagcgcaagcgccggcagaagcaccaggaatacctcaatagcattctccagcatgccaaggatttcaaggaatatcacagatccgtcacaggcaaaatccagaagctgaccaaggcagtggccacgtaccatgccaacacggagcgggagcagaagaaagagaacgagcggatcgagaaggagcgcatgcggaggctcatggctgaagatgaggaggggtaccgcaagctcatcgaccagaagaaggacaagcgcctggcctacctcttgcagcagacagacgagtacgtggctaacctcacggagctggtgcggcagcacaaggctgcccaggtcgccaaggagaaaaagaagaaaaagaaaaagaagaaggcagaaaatgcagaaggacagacgcctgccattgggccggatggcgagcctctggacgagaccagccagatgagcgacctcccggtgaaggtgatccacgtggagagtgggaagatcctcacaggcacagatgcccccaaagccgggcagctggaggcctggctcgagatgaacccggggtatgaagtagctccgaggtctgatagtgaagaaagtggctcagaagaagaggaagaggaggaggaggaagagcagccgcaggcagcacagcctcccaccctgcccgtggaggagaagaagaagattccagatccagacagcgatgacgtctctgaggtggacgcgcggcacatcattgagaatgccaagcaagatgtcgatgatgaatatggcgtgtcccaggcccttgcacgtggcctgcagtcctactatgccgtggcccatgctgtcactgagagagtggacaagcagtcagcgcttatggtcaatggtgtcctcaaacagtaccagatcaaaggtttggagtggctggtgtccctgtacaacaacaacctgaacggcatcctggccgacgagatgggcctggggaagaccatccagaccatcgcgctcatcacgtacctcatggagcacaaacgcatcaatgggcccttcctcatcatcgtgcctctctcaacgctgtccaactgggcgtacgagtttgacaagtgggccccctccgtggtgaaggtgtcttacaagggatccccagcagcaagacgggcctttgtcccccagctccggagtgggaagttcaacgtcttgctgacgacgtacgagtacatcatcaaagacaagcacatcctcgccaagatccgttggaagtacatgattgtggacgaaggtcaccgcatgaagaaccaccactgcaagctgacgcaggtgctcaacacgcactatgtggcaccccgccgcctgctgctgacgggcacaccgctgcagaacaagcttcccgagctctgggcgctgctcaacttcctgctgcccaccatcttcaagagctgcagcaccttcgagcagtggtttaacgcaccctttgccatgaccggggaaaaggtggacctgaatgaggaggaaaccattctcatcatccggcgtctccacaaagtgctgcggcccttcttgctccgacgactcaagaaggaagtcgaggcccagttgcccgaaaaggtggagtacgtcatcaagtgcgacatgtctgcgctgcagcgagtgctctaccgccacatgcaggccaagggcgtgctgctgactgatggctccgagaaggacaagaagggcaaaggcggcaccaagaccctgatgaacaccatcatgcagctgcggaagatctgcaaccacccctacatgttccagcacatcgaggagtccttttccgagcacttggggttcactggcggcattgtccaagggctggacctgtaccgagcctcgggtaaatttgagcttcttgatagaattcttcccaaactccgagcaaccaaccacaaagtgctgctgttctgccaaatgacctccctcatgaccatcatggaagattactttgcgtatcgcggctttaaatacctcaggcttgatggaaccacgaaggcggaggaccggggcatgctgctgaaaaccttcaacgagcccggctctgagtacttcatcttcctgctcagcacccgggctggggggctcggcctgaacctccagtcggcagacactgtgatcatttttgacagcgactggaatcctcaccaggacctgcaagcgcaggaccgagcccaccgcatcgggcagcagaacgaggtgcgtgtgctccgcctctgcaccgtcaacagcgtggaggagaagatcctagctgcagccaagtacaagctcaacgtggaccagaaggtgatccaggccggcatgttcgaccagaagtcctccagccatgagcggcgcgccttcctgcaggccatcctggagcacgaggagcaggatgaggaggaagacgaggtgcccgacgacgagaccgtcaaccagatgatcgcccggcacgaggaggagtttgatctgttcatgcgcatggacctggaccgcaggcgcgaggaggcccgcaaccccaagcggaagccgcgcctcatggaggaggacgagctcccctcgtggatcatcaaggacgacgcggaggtggagcggctgacctgtgaggaggaggaggagaagatgttcggccgtggctcccgccaccgcaaggaggtggactacagcgactcactgacggagaagcagtggctcaagaccctgaaggccatcgaggagggcacgctggaggagatcgaagaggaggtccggcagaagaaatcatcacggaagcgcaagcgagacagcgacgccggctcctccaccccgaccaccagcacccgcagccgcgacaaggacgacgagagcaagaagcagaagaagcgcgggcggccgcctgccgagaaactctcccctaacccacccaacctcaccaagaagatgaagaagattgtggatgccgtgatcaagtacaaggacagcagcagtggacgtcagctcagcgaggtcttcatccagctgccctcgcgaaaggagctgcccgagtactacgagctcatccgcaagcccgtggacttcaagaagataaaggagcgcattcgcaaccacaagtaccgcagcctcaacgacctagagaaggacgtcatgctcctgtgccagaacgcacagaccttcaacctggagggctccctgatctatgaagactccatcgtcttgcagtcggtcttcaccagcgtgcggcagaaaatcgagaaggaggatgacagtgaaggcgaggagagtgaggaggaggaagagggcgaggaggaaggctccgaatccgaatctcggtccgtcaaagtgaagatcaagcttggccggaaggagaaggcacaggaccggctgaagggcggccggcggcggccgagccgagggtcccgagccaagccggtcgtgagtgacgatgacagtgaggaggaacaagaggaggaccgctcaggaagtggcagcgaagaagactga

SEQ ID NO: 187842 - DNA, 5181 bp, Homo sapiens
  Payload ID: 16966
  Gene Symbol: SMARCA4
  Gene Name: SWI/SNF related, matrix associated, actin dependent regulator of chromatin, subfamily a, member 4
  Uniprot ID: P51532
  ENST ID: ENST00000589677
  CDS Start-End: 331-5181
cattctgcccccggccccgcgcggaggggcgggggaggcgccgggaagtcgacggcgccggcggctcctggcaggagtgcagtggtgcgatccgggctcaccgcgatctccgtctcccaagttcaagcgattctcctgcctcagcctccggagtagctgggaccacaggcgtgtgccaccatgtccagctgattttcgtatttttagtagagatggggttcgccttgttggccagactggtctcgaactcctgacctcaaatgatctgcccgcattggcctcccaaagttctgggattacaggaggccactgtctgcagctcccgtgaagatgtccactccagacccacccctgggcggaactcctcggccaggtccttccccgggccctggcccttcccctggagccatgctgggccctagcccgggtccctcgccgggctccgcccacagcatgatggggcccagcccagggccgccctcagcaggacaccccatccccacccaggggcctggagggtaccctcaggacaacatgcaccagatgcacaagcccatggagtccatgcatgagaagggcatgtcggacgacccgcgctacaaccagatgaaaggaatggggatgcggtcagggggccatgctgggatggggcccccgcccagccccatggaccagcactcccaaggttacccctcgcccctgggtggctctgagcatgcctctagtccagttccagccagtggcccgtcttcggggccccagatgtcttccgggccaggaggtgccccgctggatggtgctgacccccaggccttggggcagcagaaccggggcccaaccccatttaaccagaaccagctgcaccagctcagagctcagatcatggcctacaagatgctggccagggggcagcccctccccgaccacctgcagatggcggtgcagggcaagcggccgatgcccgggatgcagcagcagatgccaacgctacctccaccctcggtgtccgcaacaggacccggccctggccctggccctggccccggcccgggtcccggcccggcacctccaaattacagcaggcctcatggtatgggagggcccaacatgcctcccccaggaccctcgggcgtgccccccgggatgccaggccagcctcctggagggcctcccaagccctggcctgaaggacccatggcgaatgctgctgcccccacgagcacccctcagaagctgattcccccgcagccaacgggccgcccttcccccgcgccccctgccgtcccacccgccgcctcgcccgtgatgccaccgcagacccagtcccccgggcagccggcccagcccgcgcccatggtgccactgcaccagaagcagagccgcatcacccccatccagaagccgcggggcctcgaccctgtggagatcctgcaggagcgcgagtacaggctgcaggctcgcatcgcacaccgaattcaggaacttgaaaaccttcccgggtccctggccggggatttgcgaaccaaagcgaccattgagctcaaggccctcaggctgctgaacttccagaggcagctgcgccaggaggtggtggtgtgcatgcggagggacacagcgctggagacagccctcaatgctaaggcctacaagcgcagcaagcgccagtccctgcgcgaggcccgcatcactgagaagctggagaagcagcagaagatcgagcaggagcgcaagcgccggcagaagcaccaggaatacctcaatagcattctccagcatgccaaggatttcaaggaatatcacagatccgtcacaggcaaaatccagaagctgaccaaggcagtggccacgtaccatgccaacacggagcgggagcagaagaaagagaacgagcggatcgagaaggagcgcatgcggaggctcatggctgaagatgaggaggggtaccgcaagctcatcgaccagaagaaggacaagcgcctggcctacctcttgcagcagacagacgagtacgtggctaacctcacggagctggtgcggcagcacaaggctgcccaggtcgccaaggagaaaaagaagaaaaagaaaaagaagaaggcagaaaatgcagaaggacagacgcctgccattgggccggatggcgagcctctggacgagaccagccagatgagcgacctcccggtgaaggtgatccacgtggagagtgggaagatcctcacaggcacagatgcccccaaagccgggcagctggaggcctggctcgagatgaacccggggtatgaagtagctccgaggtctgatagtgaagaaagtggctcagaagaagaggaagaggaggaggaggaagagcagccgcaggcagcacagcctcccaccctgcccgtggaggagaagaagaagattccagatccagacagcgatgacgtctctgaggtggacgcgcggcacatcattgagaatgccaagcaagatgtcgatgatgaatatggcgtgtcccaggcccttgcacgtggcctgcagtcctactatgccgtggcccatgctgtcactgagagagtggacaagcagtcagcgcttatggtcaatggtgtcctcaaacagtaccagatcaaaggtttggagtggctggtgtccctgtacaacaacaacctgaacggcatcctggccgacgagatgggcctggggaagaccatccagaccatcgcgctcatcacgtacctcatggagcacaaacgcatcaatgggcccttcctcatcatcgtgcctctctcaacgctgtccaactgggcgtacgagtttgacaagtgggccccctccgtggtgaaggtgtcttacaagggatccccagcagcaagacgggcctttgtcccccagctccggagtgggaagttcaacgtcttgctgacgacgtacgagtacatcatcaaagacaagcacatcctcgccaagatccgttggaagtacatgattgtggacgaaggtcaccgcatgaagaaccaccactgcaagctgacgcaggtgctcaacacgcactatgtggcaccccgccgcctgctgctgacgggcacaccgctgcagaacaagcttcccgagctctgggcgctgctcaacttcctgctgcccaccatcttcaagagctgcagcaccttcgagcagtggtttaacgcaccctttgccatgaccggggaaaaggtggacctgaatgaggaggaaaccattctcatcatccggcgtctccacaaagtgctgcggcccttcttgctccgacgactcaagaaggaagtcgaggcccagttgcccgaaaaggtggagtacgtcatcaagtgcgacatgtctgcgctgcagcgagtgctctaccgccacatgcaggccaagggcgtgctgctgactgatggctccgagaaggacaagaagggcaaaggcggcaccaagaccctgatgaacaccatcatgcagctgcggaagatctgcaaccacccctacatgttccagcacatcgaggagtccttttccgagcacttggggttcactggcggcattgtccaagggctggacctgtaccgagcctcgggtaaatttgagcttcttgatagaattcttcccaaactccgagcaaccaaccacaaagtgctgctgttctgccaaatgacctccctcatgaccatcatggaagattactttgcgtatcgcggctttaaatacctcaggcttgatggaaccacgaaggcggaggaccggggcatgctgctgaaaaccttcaacgagcccggctctgagtacttcatcttcctgctcagcacccgggctggggggctcggcctgaacctccagtcggcagacactgtgatcatttttgacagcgactggaatcctcaccaggacctgcaagcgcaggaccgagcccaccgcatcgggcagcagaacgaggtgcgtgtgctccgcctctgcaccgtcaacagcgtggaggagaagatcctagctgcagccaagtacaagctcaacgtggaccagaaggtgatccaggccggcatgttcgaccagaagtcctccagccatgagcggcgcgccttcctgcaggccatcctggagcacgaggagcaggatgaggaggaagacgaggtgcccgacgacgagaccgtcaaccagatgatcgcccggcacgaggaggagtttgatctgttcatgcgcatggacctggaccgcaggcgcgaggaggcccgcaaccccaagcggaagccgcgcctcatggaggaggacgagctcccctcgtggatcatcaaggacgacgcggaggtggagcggctgacctgtgaggaggaggaggagaagatgttcggccgtggctcccgccaccgcaaggaggtggactacagcgactcactgacggagaagcagtggctcaagaccctgaaggccatcgaggagggcacgctggaggagatcgaagaggaggtccggcagaagaaatcatcacggaagcgcaagcgagacagcgacgccggctcctccaccccgaccaccagcacccgcagccgcgacaaggacgacgagagcaagaagcagaagaagcgcgggcggccgcctgccgagaaactctcccctaacccacccaacctcaccaagaagatgaagaagattgtggatgccgtgatcaagtacaaggacagcagtggacgtcagctcagcgaggtcttcatccagctgccctcgcgaaaggagctgcccgagtactacgagctcatccgcaagcccgtggacttcaagaagataaaggagcgcattcgcaaccacaagtaccgcagcctcaacgacctagagaaggacgtcatgctcctgtgccagaacgcacagaccttcaacctggagggctccctgatctatgaagactccatcgtcttgcagtcggtcttcaccagcgtgcggcagaaaatcgagaaggaggatgacagtgaaggcgaggagagtgaggaggaggaagagggcgaggaggaaggctccgaatccgaatctcggtccgtcaaagtgaagatcaagcttggccggaaggagaaggcacaggaccggctgaagggcggccggcggcggccgagccgagggtcccgagccaagccggtcgtgagtgacgatgacagtgaggaggaacaagaggaggaccgctcaggaagtggcagcgaagaagactga

SEQ ID NO: 187843 - DNA, 5282 bp, Homo sapiens
  Payload ID: 16966
  Gene Symbol: SMARCA4
  Gene Name: SWI/SNF related, matrix associated, actin dependent regulator of chromatin, subfamily a, member 4
  Uniprot ID: P51532
  ENST ID: ENST00000590574
  CDS Start-End: 438-5282
ccggcagccgcgcgcgtggggaaggccacagtgtcgcgaggccgtggcagcggcggcccccgcggagcggcggggtgggtggggggcccgggccgcgtggaggccgcgcgatcctctccgcgcgcgctctcgccggggtcgccggacaaagctcgcccccctcgcccggcacccctacagtcgccctcccaattacagcggctgcaacaataggcaggcgttggggcttttctggctgcgtggtaacgggtccgacccgaatgttgcgtttttggcgaagctgcgatcggggctcagccaaacctccagatatgtccggcgtcggccggacacgggcattagcggtccccttgggctagccgacctcaaattgtcttaaaaacgtgtcattccagattttcaaggaaaggaggccactgtctgcagctcccgtgaagatgtccactccagacccacccctgggcggaactcctcggccaggtccttccccgggccctggcccttcccctggagccatgctgggccctagcccgggtccctcgccgggctccgcccacagcatgatggggcccagcccagggccgccctcagcaggacaccccatccccacccaggggcctggagggtaccctcaggacaacatgcaccagatgcacaagcccatggagtccatgcatgagaagggcatgtcggacgacccgcgctacaaccagatgaaaggaatggggatgcggtcagggggccatgctgggatggggcccccgcccagccccatggaccagcactcccaaggttacccctcgcccctgggtggctctgagcatgcctctagtccagttccagccagtggcccgtcttcggggccccagatgtcttccgggccaggaggtgccccgctggatggtgctgacccccaggccttggggcagcagaaccggggcccaaccccatttaaccagaaccagctgcaccagctcagagctcagatcatggcctacaagatgctggccagggggcagcccctccccgaccacctgcagatggcggtgcagggcaagcggccgatgcccgggatgcagcagcagatgccaacgctacctccaccctcggtgtccgcaacaggacccggccctggccctggccctggccccggcccgggtcccggcccggcacctccaaattacagcaggcctcatggtatgggagggcccaacatgcctcccccaggaccctcgggcgtgccccccgggatgccaggccagcctcctggagggcctcccaagccctggcctgaaggacccatggcgaatgctgctgcccccacgagcacccctcagaagctgattcccccgcagccaacgggccgcccttcccccgcgccccctgccgtcccacccgccgcctcgcccgtgatgccaccgcagacccagtcccccgggcagccggcccagcccgcgcccatggtgccactgcaccagaagcagagccgcatcacccccatccagaagccgcggggcctcgaccctgtggagatcctgcaggagcgcgagtacaggctgcaggctcgcatcgcacaccgaattcaggaacttgaaaaccttcccgggtccctggccggggatttgcgaaccaaagcgaccattgagctcaaggccctcaggctgctgaacttccagaggcagctgcgccaggaggtggtggtgtgcatgcggagggacacagcgctggagacagccctcaatgctaaggcctacaagcgcagcaagcgccagtccctgcgcgaggcccgcatcactgagaagctggagaagcagcagaagatcgagcaggagcgcaagcgccggcagaagcaccaggaatacctcaatagcattctccagcatgccaaggatttcaaggaatatcacagatccgtcacaggcaaaatccagaagctgaccaaggcagtggccacgtaccatgccaacacggagcgggagcagaagaaagagaacgagcggatcgagaaggagcgcatgcggaggctcatggctgaagatgaggaggggtaccgcaagctcatcgaccagaagaaggacaagcgcctggcctacctcttgcagcagacagacgagtacgtggctaacctcacggagctggtgcggcagcacaaggctgcccaggtcgccaaggagaaaaagaagaaaaagaaaaagaagaaggcagaaaatgcagaaggacagacgcctgccattgggccggatggcgagcctctggacgagaccagccagatgagcgacctcccggtgaaggtgatccacgtggagagtgggaagatcctcacaggcacagatgcccccaaagccgggcagctggaggcctggctcgagatgaacccggggtatgaagtagctccgaggtctgatagtgaagaaagtggctcagaagaagaggaagaggaggaggaggaagagcagccgcaggcagcacagcctcccaccctgcccgtggaggagaagaagaagattccagatccagacagcgatgacgtctctgaggtggacgcgcggcacatcattgagaatgccaagcaagatgtcgatgatgaatatggcgtgtcccaggcccttgcacgtggcctgcagtcctactatgccgtggcccatgctgtcactgagagagtggacaagcagtcagcgcttatggtcaatggtgtcctcaaacagtaccagatcaaaggtttggagtggctggtgtccctgtacaacaacaacctgaacggcatcctggccgacgagatgggcctggggaagaccatccagaccatcgcgctcatcacgtacctcatggagcacaaacgcatcaatgggcccttcctcatcatcgtgcctctctcaacgctgtccaactgggcgtacgagtttgacaagtgggccccctccgtggtgaaggtgtcttacaagggatccccagcagcaagacgggcctttgtcccccagctccggagtgggaagttcaacgtcttgctgacgacgtacgagtacatcatcaaagacaagcacatcctcgccaagatccgttggaagtacatgattgtggacgaaggtcaccgcatgaagaaccaccactgcaagctgacgcaggtgctcaacacgcactatgtggcaccccgccgcctgctgctgacgggcacaccgctgcagaacaagcttcccgagctctgggcgctgctcaacttcctgctgcccaccatcttcaagagctgcagcaccttcgagcagtggtttaacgcaccctttgccatgaccggggaaaaggtggacctgaatgaggaggaaaccattctcatcatccggcgtctccacaaagtgctgcggcccttcttgctccgacgactcaagaaggaagtcgaggcccagttgcccgaaaaggtggagtacgtcatcaagtgcgacatgtctgcgctgcagcgagtgctctaccgccacatgcaggccaagggcgtgctgctgactgatggctccgagaaggacaagaagggcaaaggcggcaccaagaccctgatgaacaccatcatgcagctgcggaagatctgcaaccacccctacatgttccagcacatcgaggagtccttttccgagcacttggggttcactggcggcattgtccaagggctggacctgtaccgagcctcgggtaaatttgagcttcttgatagaattcttcccaaactccgagcaaccaaccacaaagtgctgctgttctgccaaatgacctccctcatgaccatcatggaagattactttgcgtatcgcggctttaaatacctcaggcttgatggaaccacgaaggcggaggaccggggcatgctgctgaaaaccttcaacgagcccggctctgagtacttcatcttcctgctcagcacccgggctggggggctcggcctgaacctccagtcggcagacactgtgatcatttttgacagcgactggaatcctcaccaggacctgcaagcgcaggaccgagcccaccgcatcgggcagcagaacgaggtgcgtgtgctccgcctctgcaccgtcaacagcgtggaggagaagatcctagctgcagccaagtacaagctcaacgtggaccagaaggtgatccaggccggcatgttcgaccagaagtcctccagccatgagcggcgcgccttcctgcaggccatcctggagcacgaggagcaggatgaggaggaagacgaggtgcccgacgacgagaccgtcaaccagatgatcgcccggcacgaggaggagtttgatctgttcatgcgcatggacctggaccgcaggcgcgaggaggcccgcaaccccaagcggaagccgcgcctcatggaggaggacgagctcccctcgtggatcatcaaggacgacgcggaggtggagcggctgacctgtgaggaggaggaggagaagatgttcggccgtggctcccgccaccgcaaggaggtggactacagcgactcactgacggagaagcagtggctcaaggccatcgaggagggcacgctggaggagatcgaagaggaggtccggcagaagaaatcatcacggaagcgcaagcgagacagcgacgccggctcctccaccccgaccaccagcacccgcagccgcgacaaggacgacgagagcaagaagcagaagaagcgcgggcggccgcctgccgagaaactctcccctaacccacccaacctcaccaagaagatgaagaagattgtggatgccgtgatcaagtacaaggacagcagcagtggacgtcagctcagcgaggtcttcatccagctgccctcgcgaaaggagctgcccgagtactacgagctcatccgcaagcccgtggacttcaagaagataaaggagcgcattcgcaaccacaagtaccgcagcctcaacgacctagagaaggacgtcatgctcctgtgccagaacgcacagaccttcaacctggagggctccctgatctatgaagactccatcgtcttgcagtcggtcttcaccagcgtgcggcagaaaatcgagaaggaggatgacagtgaaggcgaggagagtgaggaggaggaagagggcgaggaggaaggctccgaatccgaatctcggtccgtcaaagtgaagatcaagcttggccggaaggagaaggcacaggaccggctgaagggcggccggcggcggccgagccgagggtcccgagccaagccggtcgtgagtgacgatgacagtgaggaggaacaagaggaggaccgctcaggaagtggcagcgaagaagactga

SEQ ID NO: 187844 - DNA, 409 bp, Homo sapiens
  Payload ID: 16966
  Gene Symbol: SMARCA4
  Gene Name: SWI/SNF related, matrix associated, actin dependent regulator of chromatin, subfamily a, member 4
  ENST ID: ENST00000592158
  CDS Start-End: 1-409
acccgggctggggggctcggcctgaacctccagtcggcagacactgtgatcatttttgacagcgactggaatcctcaccaggacctgcaagcgcaggaccgagcccaccgcatcgggcagcagaacgaggtggagcggctgacctgtgaggaggaggaggagaagatgttcggccgtggctcccgccaccgcaaggaggtggactacagcgactcactgacggagaagcagtggctcaagaccctgaaggccatcgaggagggcacgctggaggagatcgaagaggaggtccggcagaagaaatcatcacggaagcgcaagcgagacagcgacgccggctcctccaccccgaccaccagcacccgcagccgcgacaaggacgacgagagcaagaagcagaagaagcgcg

SEQ ID NO: 187845 - DNA, 534 bp, Homo sapiens
  Payload ID: 16966
  Gene Symbol: SMARCA4
  Gene Name: SWI/SNF related, matrix associated, actin dependent regulator of chromatin, subfamily a, member 4
  ENST ID: ENST00000586985
  CDS Start-End: 1-340
ggacgtcatgctcctgtgccagaacgcacagaccttcaacctggagggctccctgatctatgaagactccatcgtcttgcagtcggtcttcaccagcgtgcggcagaaaatcgagaaggaggatgacagtgaaggcgaggagagtgaggaggaggaagagggcgaggaggaaggctccgaatccgaatctcggtccgtcaaagtgaagatcaagcttggccggaaggagaaggcacaggaccggctgaagggcggccggcggcggccgagccgagggtcccgagccaagccggtcgtgagtgacgatgacagtgaggaggaacaagaggaggccagctgatgaccttggccctctcctcccgagatccctgcagcttccaacagtgaggccctccagcagtgaggctgctgattttcatggcctggctggagctgggggcccaggccaggagcagccccaggcaaaaatcacctcccgctgctcttccctgccactcagtactttttctggaataaacatttcctcactgggtg

SEQ ID NO: 187846 - DNA, 7923 bp, Homo sapiens
  Payload ID: 16967
  Gene Symbol: SMARCA5
  Gene Name: SWI/SNF related, matrix associated, actin dependent regulator of chromatin, subfamily a, member 5
  Uniprot ID: O60264
  ENST ID: ENST00000283131
  CDS Start-End: 463-3621
gcgagtgttgaaagtcggtggcgtaggtcgtcgtcctggatgctggcgagatagatgttatcttccagaggaagaggaggaggcggcgaagcgttttcccagcctcagtctctctttcgttttccttttcccttcccccaaccctccgcccttctctaaatcagccggccttccttgacctcagtgacccgtctggccccgcccaccctcgtcgacgtgattcccgccgtgaggtaagcgccggtggaacctagagccccgcggaagagcagaacgtttgggagtgtgcagctcctgggcccggctcaggcccgtcgcggaggcgcggcgcaggggagcgctcgggtgggagtctcgctcctccaccagtttattgcgacgtagcatccaggcctaggcctccccgtccatccccgccggactcgggcctctggcagcagcgggtgacgcagacggaacatcatgtcgtccgcggccgagcctccgccacccccgcctcccgagagcgcgccttccaagcccgcagcctcgatcgccagcggcgggagcaacagcagcaacaaaggcggccccgaaggcgtcgcggcgcaggcggttgcgtctgcggccagcgctggtcccgcagacgccgagatggaggaaatatttgatgatgcgtcacctggaaagcaaaaggaaatccaagaaccagatcctacctatgaagaaaaaatgcaaactgaccgggcaaatagattcgagtatttattaaagcagacagaactttttgcacatttcattcaacctgctgctcagaagactccaacttcacctttgaagatgaaaccagggcgcccacgaataaaaaaagatgagaagcagaacttactatccgttggcgattaccgacaccgtagaacagagcaagaggaggatgaagagctattaacagaaagctccaaagcaaccaatgtttgcactcgatttgaagactctccatcgtatgtaaaatggggtaaactgagagattatcaggtccgaggattaaactggctcatttctttgtatgagaatggcatcaatggtatccttgcagatgaaatgggcctaggaaagactcttcaaacaatttctcttcttgggtacatgaaacattatagaaacattcctgggcctcatatggttttggttcctaagtctacattacacaactggatgagtgaattcaagagatgggtaccaacacttagatctgtttgtttgataggagataaagaacaaagagctgcttttgtcagagacgttttattaccgggagaatgggatgtatgtgtaacatcttatgaaatgcttattaaagagaagtctgtgttcaaaaaatttaattggagatacttagtaatagatgaagctcacaggatcaaaaatgaaaaatctaagttgtcagaaatagtgagggaattcaagactacaaatagactattattaactggaacacctcttcagaacaacttgcatgagctgtggtcacttcttaactttctgttgccagatgtgtttaattcagcagatgactttgattcctggtttgatacaaacaactgccttggggatcaaaaactagttgagaggcttcatatggttttgcgtccattcctccttcgtcgaattaaggctgatgttgaaaagagtttgcctccaaagaaggaagtaaaaatctatgtgggcctcagcaaaatgcaaagggaatggtatactcggatattaatgaaggatatagatatactcaactcagcaggcaagatggacaaaatgaggttattgaacatcctaatgcagttgagaaaatgttgtaatcatccatatctctttgatggagcagaacctggtccaccttatacaacagatatgcatctagtaaccaacagtggcaaaatggtggttttagacaagctgctccctaagttaaaagaacaaggttcacgagtactaatcttcagtcaaatgacaagggtattggacattttggaagattattgcatgtggagaaattatgagtactgcaggttggatggtcagacaccccatgatgagagacaagactccatcaatgcatacaatgaaccaaacagcacaaagtttgttttcatgttaagcacgcgtgctggtggtcttggcatcaatcttgcgactgctgatgtagtaattttgtatgattctgattggaatccccaagtagatcttcaggctatggaccgagcacatagaattgggcagactaagacagtcagagtgttccgctttataactgataacactgtagaagaaagaatagtagaacgtgctgagatgaaactcagactggattcaatagtcattcaacaagggaggcttgtggatcagaatctgaacaaaattgggaaagatgaaatgcttcaaatgattagacatggagcaacacatgtgtttgcttcaaaggaaagtgagatcactgatgaagatatcgatggtattttggaaagaggtgcaaagaagactgcagagatgaatgaaaagctctccaagatgggcgaaagttcacttagaaactttacaatggatacagagtcaagtgtttataacttcgaaggagaagactatagagaaaaacaaaagattgcattcacagagtggattgaaccacctaaacgagaaagaaaagccaactatgccgttgatgcatatttcagggaagctcttcgtgttagtgaacctaaagcacccaaggctcctcgacctccaaaacaacccaatgttcaggatttccagttctttcctccacgtttatttgaattactggaaaaagaaattctgttttacagaaaaactattgggtacaaggtacctcgaaatcctgagctgcctaatgcagcacaggcacaaaaagaagaacagcttaaaattgatgaagctgaatcccttaatgatgaagagttagaggaaaaagagaagcttctaacacagggatttaccaattggaataagagagattttaaccagtttatcaaagctaatgagaagtggggtcgtgatgatattgaaaatatagcaagagaagtagaaggcaaaactccagaagaagtcattgaatattcagctgtgttttgggaaaggtgcaacgagctccaggacatagagaagattatggctcagattgaaaggggagaggcgagaattcaaagaagaataagcatcaagaaagcacttgacacaaagattggacggtacaaagcaccttttcatcagctgagaatatcatatggtactaacaaaggaaaaaactatactgaagaagaagatcgttttctgatttgtatgcttcacaaacttggatttgacaaagaaaatgtttatgatgaattgcgacagtgtattcgcaactctcctcagttcagatttgactggtttcttaagtccagaactgcaatggagctccagaggagatgtaataccttaattactttgattgaaagagaaaacatggaactagaagaaaaggagaaggcagagaaaaagaaacgaggaccaaagccttcaacacagaaacgtaaaatggatggcgcacctgatggtcgaggaagaaaaaagaagctgaaactatgaatatgtttttgtttcataatcactaactttaaaccagtagttctttaatttacgggtcttcataagatgtactgtacaatgctcaattgttatgtcatttaaagacatcaggttcatctgtttactgagctagaaacatagtatgtagtttcacttttttaaatgcaacagctgtgctgaaatttttttatcattaacacttgaagtaataaaataggcttcatttattactaagtgtttcatttgatttatttttctattgtagttccatttgtgaagattgtgactttttgtttattagctataatttctacacttgtaaggcttaaaaacaagttaaaaagaaaattgcaaataacatttgtccctttcagtcttcacctagttgtgtaattattttaattcactttgcctttgcagaaatttgggtattttctttgtagtgctattgagtctcatctggaaagattatataaattgcattctccttgcttatgtgggtagaatgggaaaagaaggcaagacaaagtatacttaaattctatgcatatttctgttatgctttctgttttttttagttgattctgaaatgaatatgccctattcttttgaaagaatggccttttagttgtatagccaaagacatttagtattttccggttccttaaggtattactgtaccattttgtaaaaggaatattattattattatttttaattatttggtaaatattttgtcatatgaccttctgaagcagccacaacttagataatgtcagaactaaggtgattttttttttttaattttgaaagcccagccaaaatgaggtgtgaatttgtcatactgttacattgaaattggtaacaaaatatatcccctcccatttggacttttagggtaaatgaaaattttattgtattttaaagtagtttctaagtgttagcaagactgactataattccagtttctgttttctatggacagacctgataaactggagaccctaaagcaggaatacccaaattatagtgtcaggattttagctgtaccagaggcctttatgtgctacacataatttgtataaaattttatatgtgcagattgggtacataaacagttctccatttttctaagggaatgcaataaatgtagcatcgtgaataaatataacttttataatccgtaaagtggtcttttctttccatttctttaattgttttctcaatttttattcactttttcctttaggacacatttcccttaattggatatctttcccttaaatttctattagtagttgttttcatctgcccacatgtaattgaagatttaaaaaaaaaattttgatacctgcagtattactaatactgcttaatttcttgaaatgtggaattgctgctgttaatgtcaagcaaaacgcagtatttatggcaaattgtaaagtaatttgaatttagtgctacctcaaaattaactttttaaatactatgttagattcttaacagttaaaggtctaatacatgcatgaggaatggttacttatgaaaggaaaaagaatttgtaagagttatcacctcagtttggaagaaattgaaaaaatgtaaggctgaagaaaacttacggaggtcacaaaagtgatgttttcaagaggaggagaaactgggagggagatacacagtggaaatgcaaaatgaatcaagtatagtggtagccctgagagcttagggactcaaatggaaactgtgtgaagggaaactcacttgaaaaaaaagcatgaaccagctaggccctgccaccactgtgtttggccaagttcacaaatctgttttaacctgtcacttccctgtcacttctctggctttcctctcccgctaagcttttgtttcctggcagtaattaaaatcttctgtcagtgccacagctactactgctactggaactgccttaaccactactgctactggaactgccttagccaccttggtatcgtggtttggcaaagtattggcctctaccaccatagggcccagagcttctgcctccaaagtttcctcccttcatgggtccaaaatttgaagactgattgttgtcattgccaaaatcattgtagcttttaccacctccaaaattgcttcaatcattaccaaatctattatagcaatccccactgccaccatatccatcaccaccaccatggctgccaccaaagccaccacgatcacagaacttgatgactgtatttgtgactaattgtataatagtttctgttctgtggaaagtaaagcattccaacacagggtttcagtgtagattgttttgttttgtacccatgctgttgattgctaaatgttttaataatctgatcatgatactgaataaatgtctttttttttttttaacaacaaagcatgaaagattgcttaattgtacatctgacaaagtgctggaggctattataaagtgtaattattactacttttaagagacagggtcttgctctgtcacccaggctggagtgcagtggtgcaatcacagctcactgcaacctcaaacttcagggctcaagtgatcctcccacctcagcttcccaagtagctaggactacagataccacgcccagctaagtttttttagtttttgtagagatagggccttgctatgttgcccagtccggtctcaaacgccgacttcaggcaatcctcttgcgtcaacctctcaaagtgctgggattacatgtgtaagcctacattccaaagtgctgggatcatagttgtgagcctacaccacacctggcctacattttgtttttcataaagttgagagaagcaaatcctaagcatagagtacaagttgagcatccctaatcaaaaaatctaaaatcagaaatgctccataatttgaatgctcattagggcatttctgatttttggattagggatgctgaactgataagtataatgcaagtattctaaagtctggaaaatgctaaaaacacttctggttccaggcatttcagataaggattgctccatctgccctttgagtatttaatatatgccgattgtttgaactaatctggatttaattatataaatgattatataaatgatctttggcttagtacctttcttaatctcgatcttaaaaagcattgtaaaacacccctgtggtttttcagaaaaattctgagtaaaaaataaatttcatcttgttctatccctttgaatctaaaaaacaaatctttttgaaaggatgtgctactatatttcaaaccagtagttttggagtagaacattgctaaaaaaatgggtactaaggagggtaatttaaacaaagtagattaatgacacaaggtggattgatgaactcataaatccaaatgaatggaatgctagaagacatgtattaacggagtagctgttaccaaaatatatacatattttgtatatgtacatagctgttaccaaaatgtatctttgcctgttggaatctgatgtcaagatcaaaggtgagggcatccctcagatgacagataatgggcaaaatacattcttggtgtggagcagtgctgcagaattaacttcgctgtgtacatcccagaatcgttttggatctgttaaggtttttattagaatgattaaataggcttttgcagcattaactttacagtagttaccagaaaagactatgctacaagaaccaaaattgaagtaagaagaaaaagactgaaatgatatgattctaaatgaaaaaaatgaagaagtggaatagtttctccacaggcataagaggcaaagcattgtttcagaagtggactggcacctcacctgagatactcaagactggcaacatgggtctacattctttgttaccacagattcccttgtgtccggagagattccctagctctaatgacagcttttttggggggtaatgaggctatgagaagattgaggatctaggtacttgcctttaactctacagcatacaaggtgtgtggctcttatctctaggacaccaatatttaatgttgcatatcatgtatctccagtacaagaagaaagtttatcagaatttagttaatgttggaaactttgtaatataaacaatgtaaacactacattgacaaaaatattttattaatacaaagaatatgcatatagtttgcttactacagaaattcttgtttttgatgtagacaacccaaaggagtttttatgtatatagattgtgaataaattgggaaaagaaatagagataagtagagattatttcacttcattaaacttttgaagtcctaa

SEQ ID NO: 187847 - DNA, 3271 bp, Homo sapiens
  Payload ID: 16968
  Gene Symbol: SMARCAL1
  Gene Name: SWI/SNF related, matrix associated, actin dependent regulator of chromatin, subfamily a-like 1
  Uniprot ID: Q9NZC9
  ENST ID: ENST00000357276
  CDS Start-End: 331-3195
atcattcttacttttggaagcgaaactgcggccgcgttgcctgctgggaaatgtagttcagcggtggcctagcccttcaggcctggccgctacaataaggctggcgaactcgcagcgcttgaatacccgtggcctaaccgtccactcggaagaccggtcccgctcgggaggctctgcagtcgcgcctggggtcagggccgggggcgaatgtggctcgcgttctaggcctccctgggttggaaaaagactatgttagcaagtgtcacgccatgcttttgccaactttccaattaaaggttgacattcctgcataagcatttctctgtgaaaatgtccttgcctcttacagaggagcagaggaaaaagattgaagagaatcgacaaaaggctctggcccgcagagctgagaagttattggcagaacagcatcagaggactagctcgggcacctccattgctggcaacccattccaggccaagcaaggcccatcccaaaatttcccaagggagtcttgtaagccagtgagccatggtgtcattttcaagcaacagaatctcagtagctcatctaatgctgaccaaagacctcatgattcccacagttttcaggcaaagggaatatggaaaaagccagaagaaatgcccacagcctgcccaggccacagtccacgtagtcaaatggctctcactggaatctctcctcccttggcacaaagtcctccagaggtccctaaacaacagctcttgagttatgagttaggtcaaggtcatgctcaggcttcacctgagatcaggttcacaccctttgctaacccaactcataagcctctggccaaaccaaagagttcccaagagacaccagctcattcctctggacagcctcccagggatgctaagttagaggccaagacagcaaaagcctccccttcggggcagaacatttcttacatccattctagctcagagagtgtaacgcccaggacagaaggaagactccagcagaagtcagggtcctcagtccaaaaaggagtgaactctcagaagggaaagtgcgtaaggaacggcgatcgtttccaggtgttgattgggtacaatgcggaactcattgcagtgtttaagaccctgcccagcaagaattatgatcctgacaccaagacgtggaacttcagcatgaatgactatagtgccctgatgaaagcagcccagagcctccccacggtcaacctgcagcctctggaatgggcctatggcagcagcgagtcaccctccaccagcagtgagggacaggccggccttccatcagctccatccctttcatttgtcaaagggcgatgcatgctcatctccagggcctacttcgaggcagacatcagttattcacaggaccttattgcgctttttaaacagatggattccagaagatatgatgtcaagaccaggaagtggagctttctcttggaagagcacagtaaactaattgcaaaggtgcgctgcctcccacaagttcagctggaccctctgcccacgactctcaccctggcgtttgcttctcagctcaagaagacatctctcagtctcacgccagatgtcccagaggcagacctttctgaagtggaccccaagctcgtgtctaatctgatgccctttcagagagctggagtcaattttgccatagccaaaggaggccgcctgctgctcgctgacgacatgggcctggggaagaccatccaagccatctgcatcgcagccttttaccggaaggagtggccgctcctggtggtggtgccatcctccgtgcgcttcacctgggagcaggccttccttcggtggctgccatctctgagcccagattgcatcaacgtcgtggtgactgggaaggaccgcctgacagctggcctgatcaacattgtcagctttgaccttcttagcaagttggaaaaacagctaaaaaccccttttaaagttgtcatcattgatgaatctcacttcctcaaaaacagtaggactgcccgctgtcgagcagctatgccggtcctaaaggttgccaagagggtgatcctgttgtcgggcacaccagccatgtcccggcccgcagagctctacacgcagatcatcgcagtcaagccaactttcttcccccagtttcatgcctttggacttcgctactgtgatgccaaacggatgccttgggggtgggactactcaggttcctccaacctgggagagctgaagctcctgctggaggaagcagtcatgctgcggcgcctcaagtccgacgtcctttcccagctgcctgccaagcagcgcaagatagtggtgattgccccaggacggatcaatgccaggaccagagctgccctggatgctgcagccaaggaaatgaccaccaaggacaaaactaaacagcagcagaaagatgccctcattctcttcttcaacagaacagctgaagctaaaatcccatctgtcattgaatatatcttggacctactggaaagtggaagagagaagtttttagtatttgcacaccataaggtggtcctggacgcaattacgcaagagcttgagagaaagcacgtgcagcacatccgcatcgatggctccacctcatcagctgagcgggaggacctgtgccagcagttccaactgtcggagaggcatgctgtggccgtgctgtccatcaccgctgccaatatgggcctcaccttctcctcggctgacctggtggtgtttgctgagctgttttggaacccaggggtgctgatccaggctgaggaccgcgtgcaccgcattggacagaccagctccgtgggcattcactacctcgtggcaaagggcacagctgatgactacctttggcccctgattcaagagaagattaaagttctggcagaagccgggctttctgagaccaatttttcagaaatgacagaatccactgattacctctacaaggacccaaagcagcagaagatctacgacctattccagaagtcctttgagaaagaaggaagtgatatggagctcctggaagcagcagagtcctttgacccaggaagtgcttcaggaacatctggaagtagttcccagaacatgggagacaccctggatgaaagctcattgacagccagtccacagaagaaaaggagatttgaattttttgataactgggacagctttacgtctcccctgtaaaaggggcaaaaagaaaaaaataaaaagcattttaaaatcatggaattgaaataaaataatgtattttgttttaaaa

SEQ ID NO: 187848 - DNA, 3056 bp, Homo sapiens
  Payload ID: 16968
  Gene Symbol: SMARCAL1
  Gene Name: SWI/SNF related, matrix associated, actin dependent regulator of chromatin, subfamily a-like 1
  Uniprot ID: Q9NZC9
  ENST ID: ENST00000358207
  CDS Start-End: 152-3016
aagtggagatcgtaggggtgggagtggggcgtggcgcccgcttaccttgaggctgggttggaaaaagactatgttagcaagtgtcacgccatgcttttgccaactttccaattaaaggttgacattcctgcataagcatttctctgtgaaaatgtccttgcctcttacagaggagcagaggaaaaagattgaagagaatcgacaaaaggctctggcccgcagagctgagaagttattggcagaacagcatcagaggactagctcgggcacctccattgctggcaacccattccaggccaagcaaggcccatcccaaaatttcccaagggagtcttgtaagccagtgagccatggtgtcattttcaagcaacagaatctcagtagctcatctaatgctgaccaaagacctcatgattcccacagttttcaggcaaagggaatatggaaaaagccagaagaaatgcccacagcctgcccaggccacagtccacgtagtcaaatggctctcactggaatctctcctcccttggcacaaagtcctccagaggtccctaaacaacagctcttgagttatgagttaggtcaaggtcatgctcaggcttcacctgagatcaggttcacaccctttgctaacccaactcataagcctctggccaaaccaaagagttcccaagagacaccagctcattcctctggacagcctcccagggatgctaagttagaggccaagacagcaaaagcctccccttcggggcagaacatttcttacatccattctagctcagagagtgtaacgcccaggacagaaggaagactccagcagaagtcagggtcctcagtccaaaaaggagtgaactctcagaagggaaagtgcgtaaggaacggcgatcgtttccaggtgttgattgggtacaatgcggaactcattgcagtgtttaagaccctgcccagcaagaattatgatcctgacaccaagacgtggaacttcagcatgaatgactatagtgccctgatgaaagcagcccagagcctccccacggtcaacctgcagcctctggaatgggcctatggcagcagcgagtcaccctccaccagcagtgagggacaggccggccttccatcagctccatccctttcatttgtcaaagggcgatgcatgctcatctccagggcctacttcgaggcagacatcagttattcacaggaccttattgcgctttttaaacagatggattccagaagatatgatgtcaagaccaggaagtggagctttctcttggaagagcacagtaaactaattgcaaaggtgcgctgcctcccacaagttcagctggaccctctgcccacgactctcaccctggcgtttgcttctcagctcaagaagacatctctcagtctcacgccagatgtcccagaggcagacctttctgaagtggaccccaagctcgtgtctaatctgatgccctttcagagagctggagtcaattttgccatagccaaaggaggccgcctgctgctcgctgacgacatgggcctggggaagaccatccaagccatctgcatcgcagccttttaccggaaggagtggccgctcctggtggtggtgccatcctccgtgcgcttcacctgggagcaggccttccttcggtggctgccatctctgagcccagattgcatcaacgtcgtggtgactgggaaggaccgcctgacagctggcctgatcaacattgtcagctttgaccttcttagcaagttggaaaaacagctaaaaaccccttttaaagttgtcatcattgatgaatctcacttcctcaaaaacagtaggactgcccgctgtcgagcagctatgccggtcctaaaggttgccaagagggtgatcctgttgtcgggcacaccagccatgtcccggcccgcagagctctacacgcagatcatcgcagtcaagccaactttcttcccccagtttcatgcctttggacttcgctactgtgatgccaaacggatgccttgggggtgggactactcaggttcctccaacctgggagagctgaagctcctgctggaggaagcagtcatgctgcggcgcctcaagtccgacgtcctttcccagctgcctgccaagcagcgcaagatagtggtgattgccccaggacggatcaatgccaggaccagagctgccctggatgctgcagccaaggaaatgaccaccaaggacaaaactaaacagcagcagaaagatgccctcattctcttcttcaacagaacagctgaagctaaaatcccatctgtcattgaatatatcttggacctactggaaagtggaagagagaagtttttagtatttgcacaccataaggtggtcctggacgcaattacgcaagagcttgagagaaagcacgtgcagcacatccgcatcgatggctccacctcatcagctgagcgggaggacctgtgccagcagttccaactgtcggagaggcatgctgtggccgtgctgtccatcaccgctgccaatatgggcctcaccttctcctcggctgacctggtggtgtttgctgagctgttttggaacccaggggtgctgatccaggctgaggaccgcgtgcaccgcattggacagaccagctccgtgggcattcactacctcgtggcaaagggcacagctgatgactacctttggcccctgattcaagagaagattaaagttctggcagaagccgggctttctgagaccaatttttcagaaatgacagaatccactgattacctctacaaggacccaaagcagcagaagatctacgacctattccagaagtcctttgagaaagaaggaagtgatatggagctcctggaagcagcagagtcctttgacccaggaagtgcttcaggaacatctggaagtagttcccagaacatgggagacaccctggatgaaagctcattgacagccagtccacagaagaaaaggagatttgaattttttgataactgggacagctttacgtctcccctgtaaaaggggcaaaaagaaaaaaataaaaagcattttaaaatca

SEQ ID NO: 187849 - DNA, 2431 bp, Homo sapiens
  Payload ID: 16968
  Gene Symbol: SMARCAL1
  Gene Name: SWI/SNF related, matrix associated, actin dependent regulator of chromatin, subfamily a-like 1
  ENST ID: ENST00000392128
  CDS Start-End: 1-2391
cagctcttgagttatgagttaggtcaaggtcatgctcaggcttcacctgagatcaggttcacaccctttgctaacccaactcataagcctctggccaaaccaaagagttcccaagagacaccagctcattcctctggacagcctcccagggatgctaagttagaggccaagacagcaaaagcctccccttcggggcagaacatttcttacatccattctagctcagagagtgtaacgcccaggacagaaggaagactccagcagaagtcagggtcctcagtccaaaaaggagtgaactctcagaagggaaagtgcgtaaggaacggcgatcgtttccaggtgttgattgggtacaatgcggaactcattgcagtgtttaagaccctgcccagcaagaattatgatcctgacaccaagacgtggaacttcagcatgaatgactatagtgccctgatgaaagcagcccagagcctccccacggtcaacctgcagcctctggaatgggcctatggcagcagcgagtcaccctccaccagcagtgagggacaggccggccttccatcagctccatccctttcatttgtcaaagggcgatgcatgctcatctccagggcctacttcgaggcagacatcagttattcacaggaccttattgcgctttttaaacagatggattccagaagatatgatgtcaagaccaggaagtggagctttctcttggaagagcacagtaaactaattgcaaaggtgcgctgcctcccacaagttcagctggaccctctgcccacgactctcaccctggcgtttgcttctcagctcaagaagacatctctcagtctcacgccagatgtcccagaggcagacctttctgaagtggaccccaagctcgtgtctaatctgatgccctttcagagagctggagtcaattttgccatagccaaaggaggccgcctgctgctcgctgacgacatgggcctggggaagaccatccaagccatctgcatcgcagccttttaccggaaggagtggccgctcctggtggtggtgccatcctccgtgcgcttcacctgggagcaggccttccttcggtggctgccatctctgagcccagattgcatcaacgtcgtggtgactgggaaggaccgcctgacagctggcctgatcaacattgtcagctttgaccttcttagcaagttggaaaaacagctaaaaaccccttttaaagttgtcatcattgttgccaagagggtgatcctgttgtcgggcacaccagccatgtcccggcccgcagagctctacacgcagatcatcgcagtcaagccaactttcttcccccagtttcatgcctttggacttcgctactgtgatgccaaacggatgccttgggggtgggactactcaggttcctccaacctgggagagctgaagctcctgctggaggaagcagtcatgctgcggcgcctcaagtccgacgtcctttcccagctgcctgccaagcagcgcaagatagtggtgattgccccaggacggatcaatgccaggaccagagctgccctggatgctgcagccaaggaaatgaccaccaaggacaaaactaaacagcagcagaaagatgccctcattctcttcttcaacagaacagctgaagctaaaatcccatctgtcattgaatatatcttggacctactggaaagtggaagagagaagtttttagtatttgcacaccataaggtggtcctggacgcaattacgcaagagcttgagagaaagcacgtgcagcacatccgcatcgatggctccacctcatcagctgagcgggaggacctgtgccagcagttccaactgtcggagaggcatgctgtggccgtgctgtccatcaccgctgccaatatgggcctcaccttctcctcggctgacctggtggtgtttgctgagctgttttggaacccaggggtgctgatccaggctgaggaccgcgtgcaccgcattggacagaccagctccgtgggcattcactacctcgtggcaaagggcacagctgatgactacctttggcccctgattcaagagaagattaaagttctggcagaagccgggctttctgagaccaatttttcagaaatgacagaatccactgattacctctacaaggacccaaagcagcagaagatctacgacctattccagaagtcctttgagaaagaaggaagtgatatggagctcctggaagcagcagagtcctttgacccaggaagtgcttcaggaacatctggaagtagttcccagaacatgggagacaccctggatgaaagctcattgacagccagtccacagaagaaaaggagatttgaattttttgataactgggacagctttacgtctcccctgtaaaaggggcaaaaagaaaaaaataaaaagcattttaaaatca

SEQ ID NO: 187850 - DNA, 538 bp, Homo sapiens
  Payload ID: 16968
  Gene Symbol: SMARCAL1
  Gene Name: SWI/SNF related, matrix associated, actin dependent regulator of chromatin, subfamily a-like 1
  ENST ID: ENST00000412913
  CDS Start-End: 115-538
attactcctcatactgctttgcctgaccacactacgacctggagaacttggattctagtcctaactctgccctcagtcctcttagatcctgacaccaagacgtggaacttcagcatgaatgactatagtgccctgatgaaagcagcccagagcctccccacggtcaacctgcagcctctggaatgggcctatggcagcagcgagtcaccctccaccagcagtgagggacaggccggccttccatcagctccatccctttcatttgtcaaagggcgatgcatgctcatctccagggcctacttcgaggcagacatcagttattcacaggaccttattgcgctttttaaacagatggattccagaagatatgatgtcaagaccaggaagtggagctttctcttggaagagcacagtaaactaattgcaaaggtgcgctgcctcccacaagttcagctggaccctctgcccacgactctcaccctggcgtttgcttctcagctcaagaagacatctctcagtctcacgccagatgtcccag

SEQ ID NO: 187851 - DNA, 977 bp, Homo sapiens
  Payload ID: 16968
  Gene Symbol: SMARCAL1
  Gene Name: SWI/SNF related, matrix associated, actin dependent regulator of chromatin, subfamily a-like 1
  ENST ID: ENST00000427645
  CDS Start-End: 1-977
gaagaaatgcccacagcctgcccaggccacagtccacgtagtcaaatggctctcactggaatctctcctcccttggcacaaagtcctccagaggtccctaaacaacagctcttgagttatgagttaggtcaaggtcatgctcaggcttcacctgagatcaggttcacaccctttgctaacccaactcataagcctctggccaaaccaaagagttcccaagagacaccagctcattcctctggacagcctcccagggatgctaagttagaggccaagacagcaaaagcctccccttcggggcagaacatttcttacatccattctagctcagagagtgtaacgcccaggacagaaggaagactccagcagaagtcagggtcctcagtccaaaaaggagtgaactctcagaagggaaagtgcgtaaggaacggcgatcgtttccaggtgttgattgggtacaatgcggaactcattgcagtgtttaagaccctgcccagcaagaattatgatcctgacaccaagacgtggaacttcagcatgaatgactatagtgccctgatgaaagcagcccagagcctccccacggtcaacctgcagcctctggaatgggcctatggcagcagcgagtcaccctccaccagcagtgagggacaggccggccttccatcagctccatccctttcatttgtcaaagggcgatgcatgctcatctccagggcctacttcgaggcagacatcagttattcacaggaccttattgcgctttttaaacagatggattccagaagatatgttgcaaaggtgcgctgcctcccacaagttcagctggaccctctgcccacgactctcaccctggcgtttgcttctcagctcaagaagacatctctcagtctcacgccagatgtcccagaggcagacctttctgaagtggaccccaagctcgtgtctaatctgatgccctttcagagagctggagt

SEQ ID NO: 187852 - DNA, 310 bp, Homo sapiens
  Payload ID: 16968
  Gene Symbol: SMARCAL1
  Gene Name: SWI/SNF related, matrix associated, actin dependent regulator of chromatin, subfamily a-like 1
  ENST ID: ENST00000425815
  CDS Start-End: 253-310
ggaagaccggtcccgctcgggaggctctgcagtcgcgcctggggtcagggccgggggcgaatgtggctcgcgttctaggcctccctgggtgagaaagtggtagactggcaggaaggcggcggaggcggacgagaccaatgccagcctggaggaggaagttggaaaaagactatgttagcaagtgtcacgccatgcttttgccaactttccaattaaaggttgacattcctgcataagcatttctctgtgaaaatgtccttgcctcttacagaggagcagaggaaaaagattgaagagaatcgacaaaagg

SEQ ID NO: 187853 - DNA, 711 bp, Homo sapiens
  Payload ID: 16968
  Gene Symbol: SMARCAL1
  Gene Name: SWI/SNF related, matrix associated, actin dependent regulator of chromatin, subfamily a-like 1
  ENST ID: ENST00000444508
  CDS Start-End: 321-711
aaggctggcgaactcgcagcgcttgaatacccgtggcctaaccgtccactcggaagaccggtcccgctcgggaggctctgcagtcgcgcctggggtcagggccgggggcgaatgtggctcgcgttctaggcctccctgggtgagaaagtggtagactggcaggaaggcggcggaggcggacgagaccaatgccagcctggaggaggaagtgggccaatgggaagggttggaaaaagactatgttagcaagtgtcacgccatgcttttgccaactttccaattaaaggttgacattcctgcataagcatttctctgtgaaaatgtccttgcctcttacagaggagcagaggaaaaagattgaagagaatcgacaaaaggctctggcccgcagagctgagaagttattggcagaacagcatcagaggactagctcgggcacctccattgctggcaacccattccaggccaagcaaggcccatcccaaaatttcccaagggagtcttgtaagccagtgagccatggtgtcattttcaagcaacagaatctcagtagctcatctaatgctgaccaaagacctcatgattcccacagttttcaggcaaagggaatatggaaaaagccagaagaaatgcccacagcctgcccaggccacagtccacgtagtcaaatggctctcactggaatctctcctcccttggcacaaagtcctc

SEQ ID NO: 187854 - DNA, 484 bp, Homo sapiens
  Payload ID: 16968
  Gene Symbol: SMARCAL1
  Gene Name: SWI/SNF related, matrix associated, actin dependent regulator of chromatin, subfamily a-like 1
  ENST ID: ENST00000445153
  CDS Start-End: 1-484
gagtcaattttgccatagccaaaggaggccgcctgctgctcgctgacgacatgggcctggggaagaccatccaagccatctgcatcgcagccttttaccggaaggagtggccgctcctggtggtggtgccatcctccgtgcgcttcacctgggagcaggccttccttcggtggctgccatctctgagcccagattgcatcaacgtcgtggtgactgggaaggaccgcctgacagctggcctgatcaacattgtcagctttgaccttcttagcaagttggaaaaacagctaaaaaccccttttaaagttgtcatcattgatgaatctcacttcctcaaaaacagtaggactgcccgctgtcgagcagctatgccggtcctaaagcatacggtgaacatttattggttacttggcgtcaggcatatgctacagaaaataaaggttgccaagagggtgatcctgttgtcgggcacaccagccatgtc

SEQ ID NO: 187855 - DNA, 544 bp, Homo sapiens
  Payload ID: 16968
  Gene Symbol: SMARCAL1
  Gene Name: SWI/SNF related, matrix associated, actin dependent regulator of chromatin, subfamily a-like 1
  ENST ID: ENST00000434435
  CDS Start-End: 268-544
agtggggcgtggcgcccgcttaccttgaggctgggtgaggctcgccccgaaatgcggggcgtggggggcggggggcagaggtccctgcctagaggggaagaggggcgtccatgtggcggaatggatttatggtttggggctgatcagtgggtcttatggccgagtctctctggttggaaaaagactatgttagcaagtgtcacgccatgcttttgccaactttccaattaaaggttgacattcctgcataagcatttctctgtgaaaatgtccttgcctcttacagaggagcagaggaaaaagattgaagagaatcgacaaaaggctctggcccgcagagctgagaagttattggcagaacagcatcagaggactagctcgggcacctccattgctggcaacccattccaggccaagcaaggcccatcccaaaatttcccaagggagtcttgtaagccagtgagccatggtgtcattttcaagcaacagaatctcagtagctcatctaatgctgaccaaagacctcatgattcccacagttttc

SEQ ID NO: 187856 - DNA, 722 bp, Homo sapiens
  Payload ID: 16968
  Gene Symbol: SMARCAL1
  Gene Name: SWI/SNF related, matrix associated, actin dependent regulator of chromatin, subfamily a-like 1
  ENST ID: ENST00000430374
  CDS Start-End: 286-722
atcattcttacttttggaagcgaaactgcggccgcgttgcctgctgggaaatgtagttcagcggtggcctagcccttcaggcctggccgctacaataaggctggcgaactcgcagcgcttgaatacccgtggcctaaccgtccactcggaagaccggtcccgctcgggaggctctgcagtcgcgcctggggttggaaaaagactatgttagcaagtgtcacgccatgcttttgccaactttccaattaaaggttgacattcctgcataagcatttctctgtgaaaatgtccttgcctcttacagaggagcagaggaaaaagattgaagagaatcgacaaaaggctctggcccgcagagctgagaagttattggcagaacagcatcagaggactagctcgggcacctccattgctggcaacccattccaggccaagcaaggcccatcccaaaatttcccaagggagtcttgtaagccagtgagccatggtgtcattttcaagcaacagaatctcagtagctcatctaatgctgaccaaagacctcatgattcccacagttttcaggcaaagggaatatggaaaaagccagaagaaatgcccacagcctgcccaggccacagtccacgtagtcaaatggctctcactggaatctctcctcccttggcacaaagtcctccagaggtccctaaacaacagctcttgagttatgagttaggtcaagg

SEQ ID NO: 187857 - DNA, 1690 bp, Homo sapiens
  Payload ID: 16969
  Gene Symbol: SMARCB1
  Gene Name: SWI/SNF related, matrix associated, actin dependent regulator of chromatin, subfamily b, member 1
  Uniprot ID: Q12824
  ENST ID: ENST00000263121
  CDS Start-End: 197-1354
ctgcgcactgagggcggcctggtcgtcgtctgcggcggcggcggcggctgaggagcccggctgaggcgccagtacccggcccggtccgcatttcgccttccggcttcggtttccctcggcccagcacgccccggccccgccccagccctcctgatccctcgcagcccggctccggccgcccgcctctgccgccgcaatgatgatgatggcgctgagcaagaccttcgggcagaagcccgtgaagttccagctggaggacgacggcgagttctacatgatcggctccgaggtgggaaactacctccgtatgttccgaggttctctgtacaagagatacccctcactctggaggcgactagccactgtggaagagaggaagaaaatagttgcatcgtcacatggtaaaaaaacaaaacctaacactaaggatcacggatacacgactctagccaccagtgtgaccctgttaaaagcctcggaagtggaagagattctggatggcaacgatgagaagtacaaggctgtgtccatcagcacagagccccccacctacctcagggaacagaaggccaagaggaacagccagtgggtacccaccctgcccaacagctcccaccacttagatgccgtgccatgctccacaaccatcaacaggaaccgcatgggccgagacaagaagagaaccttccccctttgctttgatgaccatgacccagctgtgatccatgagaacgcatctcagcccgaggtgctggtccccatccggctggacatggagatcgatgggcagaagctgcgagacgccttcacctggaacatgaatgagaagttgatgacgcctgagatgttttcagaaatcctctgtgacgatctggatttgaacccgctgacgtttgtgccagccatcgcctctgccatcagacagcagatcgagtcctaccccacggacagcatcctggaggaccagtcagaccagcgcgtcatcatcaagctgaacatccatgtgggaaacatttccctggtggaccagtttgagtgggacatgtcagagaaggagaactcaccagagaagtttgccctgaagctgtgctcggagctggggttgggcggggagtttgtcaccaccatcgcatacagcatccggggacagctgagctggcatcagaagacctacgccttcagcgagaaccctctgcccacagtggagattgccatccggaacacgggcgatgcggaccagtggtgcccactgctggagactctgacagacgctgagatggagaagaagatccgcgaccaggacaggaacacgaggcggatgaggcgtcttgccaacacggccccggcctggtaaccagcccatcagcacacggctcccacggagcatctcagaagattgggccgcctctcctccatcttctggcaaggacagaggcgaggggacagcccagcgccatcctgaggatcgggtgggggtggagtgggggcttccaggtggcccttcccggcacacattccatttgttgagccccagtcctgccccccaccccaccctccctacccctccccagtctctggggtcaggaagaaaccttattttaggttgtgttttgtttttgtataggagccccaggcagggctagtaacagtttttaaataaaaggcaacaggtcatgttcaatttcttcaa

SEQ ID NO: 187858 - DNA, 1728 bp, Homo sapiens
  Payload ID: 16969
  Gene Symbol: SMARCB1
  Gene Name: SWI/SNF related, matrix associated, actin dependent regulator of chromatin, subfamily b, member 1
  ENST ID: ENST00000344921
  CDS Start-End: 208-1392
aacgccagcgcctgcgcactgagggcggcctggtcgtcgtctgcggcggcggcggcggctgaggagcccggctgaggcgccagtacccggcccggtccgcatttcgccttccggcttcggtttccctcggcccagcacgccccggccccgccccagccctcctgatccctcgcagcccggctccggccgcccgcctctgccgccgcaatgatgatgatggcgctgagcaagaccttcgggcagaagcccgtgaagttccagctggaggacgacggcgagttctacatgatcggctccgaggtgggaaactacctccgtatgttccgaggttctctgtacaagagatacccctcactctggaggcgactagccactgtggaagagaggaagaaaatagttgcatcgtcacatgatcacggatacacgactctagccaccagtgtgaccctgttaaaagcctcggaagtggaagagattctggatggcaacgatgagaagtacaaggctgtgtccatcagcacagagccccccacctacctcagggaacagaaggccaagaggaacagccagtgggtacccaccctgcccaacagctcccaccacttagatgccgtgccatgctccacaaccatcaacaggaaccgcatgggccgagacaagaagagaaccttccccctttggtgtggatgcatcgctgcactcaccctccgtgctgattccgccttagttctccactttgatgaccatgacccagctgtgatccatgagaacgcatctcagcccgaggtgctggtccccatccggctggacatggagatcgatgggcagaagctgcgagacgccttcacctggaacatgaatgagaagttgatgacgcctgagatgttttcagaaatcctctgtgacgatctggatttgaacccgctgacgtttgtgccagccatcgcctctgccatcagacagcagatcgagtcctaccccacggacagcatcctggaggaccagtcagaccagcgcgtcatcatcaagctgaacatccatgtgggaaacatttccctggtggaccagtttgagtgggacatgtcagagaaggagaactcaccagagaagtttgccctgaagctgtgctcggagctggggttgggcggggagtttgtcaccaccatcgcatacagcatccggggacagctgagctggcatcagaagacctacgccttcagcgagaaccctctgcccacagtggagattgccatccggaacacgggcgatgcggaccagtggtgcccactgctggagactctgacagacgctgagatggagaagaagatccgcgaccaggacaggaacacgaggcggatgaggcgtcttgccaacacggccccggcctggtaaccagcccatcagcacacggctcccacggagcatctcagaagattgggccgcctctcctccatcttctggcaaggacagaggcgaggggacagcccagcgccatcctgaggatcgggtgggggtggagtgggggcttccaggtggcccttcccggcacacattccatttgttgagccccagtcctgccccccaccccaccctccctacccctccccagtctctggggtcaggaagaaaccttattttaggttgtgttttgtttttgtataggagccccaggcagggctagtaacagtttttaaataaaaggcaacaggtcatgttcaatttcttcaa

SEQ ID NO: 187859 - DNA, 1643 bp, Homo sapiens
  Payload ID: 16969
  Gene Symbol: SMARCB1
  Gene Name: SWI/SNF related, matrix associated, actin dependent regulator of chromatin, subfamily b, member 1
  Uniprot ID: Q12824
  ENST ID: ENST00000407422
  CDS Start-End: 177-1307
ggtcgtcgtctgcggcggcggcggcggctgaggagcccggctgaggcgccagtacccggcccggtccgcatttcgccttccggcttcggtttccctcggcccagcacgccccggccccgccccagccctcctgatccctcgcagcccggctccggccgcccgcctctgccgccgcaatgatgatgatggcgctgagcaagaccttcgggcagaagcccgtgaagttccagctggaggacgacggcgagttctacatgatcggctccgaggtgggaaactacctccgtatgttccgaggttctctgtacaagagatacccctcactctggaggcgactagccactgtggaagagaggaagaaaatagttgcatcgtcacatgatcacggatacacgactctagccaccagtgtgaccctgttaaaagcctcggaagtggaagagattctggatggcaacgatgagaagtacaaggctgtgtccatcagcacagagccccccacctacctcagggaacagaaggccaagaggaacagccagtgggtacccaccctgcccaacagctcccaccacttagatgccgtgccatgctccacaaccatcaacaggaaccgcatgggccgagacaagaagagaaccttccccctttgctttgatgaccatgacccagctgtgatccatgagaacgcatctcagcccgaggtgctggtccccatccggctggacatggagatcgatgggcagaagctgcgagacgccttcacctggaacatgaatgagaagttgatgacgcctgagatgttttcagaaatcctctgtgacgatctggatttgaacccgctgacgtttgtgccagccatcgcctctgccatcagacagcagatcgagtcctaccccacggacagcatcctggaggaccagtcagaccagcgcgtcatcatcaagctgaacatccatgtgggaaacatttccctggtggaccagtttgagtgggacatgtcagagaaggagaactcaccagagaagtttgccctgaagctgtgctcggagctggggttgggcggggagtttgtcaccaccatcgcatacagcatccggggacagctgagctggcatcagaagacctacgccttcagcgagaaccctctgcccacagtggagattgccatccggaacacgggcgatgcggaccagtggtgcccactgctggagactctgacagacgctgagatggagaagaagatccgcgaccaggacaggaacacgaggcggatgaggcgtcttgccaacacggccccggcctggtaaccagcccatcagcacacggctcccacggagcatctcagaagattgggccgcctctcctccatcttctggcaaggacagaggcgaggggacagcccagcgccatcctgaggatcgggtgggggtggagtgggggcttccaggtggcccttcccggcacacattccatttgttgagccccagtcctgccccccaccccaccctccctacccctccccagtctctggggtcaggaagaaaccttattttaggttgtgttttgtttttgtataggagccccaggcagggctagtaacagtttttaaataaaaggcaacaggtcatgttcaatttcttcaa

SEQ ID NO: 187860 - DNA, 1182 bp, Homo sapiens
  Payload ID: 16969
  Gene Symbol: SMARCB1
  Gene Name: SWI/SNF related, matrix associated, actin dependent regulator of chromatin, subfamily b, member 1
  ENST ID: ENST00000407082
  CDS Start-End: 160-1179
gcggcggcggctgaggagcccggctgaggcgccagtacccggcccggtccgcatttcgccttccggcttcggtttccctcggcccagcacgccccggccccgccccagccctcctgatccctcgcagcccggctccggccgcccgcctctgccgccgcaatgatgatgatggcgctgagcaagaccttcgggcagaagcccgtgaagttccagctggaggacgacggcgagttctacatgatcggctccgaggtgggaaactacctccgtatgttccgaggttctctgtacaagagatacccctcactctggaggcgactagccactgtggaagagaggaagaaaatagttgcatcgtcacatggtaaaaaaacaaaacctaacactaaggatcacggatacacgactctagccaccagtgtgaccctgttaaaagcctcggaagtggaagagattctggatggcaacgatgagaagtacaaggctgtgtccatcagcacagagccccccacctacctcagctttgatgaccatgacccagctgtgatccatgagaacgcatctcagcccgaggtgctggtccccatccggctggacatggagatcgatgggcagaagctgcgagacgccttcacctggaacatgaatgagaagttgatgacgcctgagatgttttcagaaatcctctgtgacgatctggatttgaacccgctgacgtttgtgccagccatcgcctctgccatcagacagcagatcgagtcctaccccacggacagcatcctggaggaccagtcagaccagcgcgtcatcatcaagctgaacatccatgtgggaaacatttccctggtggaccagtttgagtgggacatgtcagagaaggagaactcaccagagaagtttgccctgaagctgtgctcggagctggggttgggcggggagtttgtcaccaccatcgcatacagcatccggggacagctgagctggcatcagaagacctacgccttcagcgagaaccctctgcccacagtggagattgccatccggaacacgggcgatgcggaccagtggtgcccactgctggagactctgacagacgctgagatggagaagaagatccgcgaccaggacaggaacacgaggcggatgaggcgtcttgccaacacggccccggcctggtaacca

SEQ ID NO: 187861 - DNA, 889 bp, Homo sapiens
  Payload ID: 16969
  Gene Symbol: SMARCB1
  Gene Name: SWI/SNF related, matrix associated, actin dependent regulator of chromatin, subfamily b, member 1
  ENST ID: ENST00000417137
  CDS Start-End: 208-889
aacgccagcgcctgcgcactgagggcggcctggtcgtcgtctgcggcggcggcggcggctgaggagcccggctgaggcgccagtacccggcccggtccgcatttcgccttccggcttcggtttccctcggcccagcacgccccggccccgccccagccctcctgatccctcgcagcccggctccggccgcccgcctctgccgccgcaatgatgatgatggcgctgagcaagaccttcgggcagaagcccgtgaagttccagctggaggacgacggcgagttctacatgatcggctccgaggtgggaaactacctccgtatgttccgaggttctctgtacaagagatacccctcactctggaggcgactagccactgtggaagagaggaagaaaatagttgcatcgtcacatggtaaaaaaacaaaacctaacactaaggatcacggatacacgactctagccaccagtgtgaccctgttaaaagcctcggaagtggaagagattctggatggcaacgatgagaagtacaaggctgtgtccatcagcacagagccccccacctacctcagggaacagaaggccaagaggaacagccagtgggtacccaccctgcccaacagctcccaccacttagatgccgtgccatgctccacaaccatcaacaggaaccgcatgggccgagacaagaagagaaccttccccctttggtgtggatgcatcgctgcactcaccctccgtgctgattccgccttagttctccactttgatgaccatgacccagctgtgatccatgagaacgcatctcagcccgaggtgctggtccccatccggctggacatggagatcgatgggcagaagctgcgagacgccttcacctggaacatgaatg

SEQ ID NO: 187862 - DNA, 1690 bp, Homo sapiens; identical to SEQ ID NO: 187857
  Payload ID: 16969
  Gene Symbol: SMARCB1
  Gene Name: SWI/SNF related, matrix associated, actin dependent regulator of chromatin, subfamily b, member 1
  Uniprot ID: Q12824
  ENST ID: ENST00000618915
  CDS Start-End: 197-1354

SEQ ID NO: 187863 - DNA, 1728 bp, Homo sapiens; identical to SEQ ID NO: 187858
  Payload ID: 16969
  Gene Symbol: SMARCB1
  Gene Name: SWI/SNF related, matrix associated, actin dependent regulator of chromatin, subfamily b, member 1
  ENST ID: ENST00000629690
  CDS Start-End: 208-1392

SEQ ID NO: 187864 - DNA, 1643 bp, Homo sapiens; identical to SEQ ID NO: 187859
  Payload ID: 16969
  Gene Symbol: SMARCB1
  Gene Name: SWI/SNF related, matrix associated, actin dependent regulator of chromatin, subfamily b, member 1
  Uniprot ID: Q12824
  ENST ID: ENST00000631333
  CDS Start-End: 177-1307

SEQ ID NO: 187865 - DNA, 1182 bp, Homo sapiens; identical to SEQ ID NO: 187860
  Payload ID: 16969
  Gene Symbol: SMARCB1
  Gene Name: SWI/SNF related, matrix associated, actin dependent regulator of chromatin, subfamily b, member 1
  ENST ID: ENST00000630853
  CDS Start-End: 160-1179

SEQ ID NO: 187866 - DNA, 889 bp, Homo sapiens; identical to SEQ ID NO: 187861
  Payload ID: 16969
  Gene Symbol: SMARCB1
  Gene Name: SWI/SNF related, matrix associated, actin dependent regulator of chromatin, subfamily b, member 1
  ENST ID: ENST00000629656
  CDS Start-End: 208-889

SEQ ID NO: 187867 - DNA, 242 bp, Homo sapiens
  Payload ID: 16969
  Gene Symbol: SMARCB1
  Gene Name: SWI/SNF related, matrix associated, actin dependent regulator of chromatin, subfamily b, member 1
  ENST ID: ENST00000635578
  CDS Start-End: 1-242
tctggaggcgactagccactgtggaagagaggaagaaaatagttgcatcgtcacatgatcacggatacacgactctagccaccagtgtgaccctgttaaaagcctcggaagtggaagagattctggatggcaacgatgagaagtacaaggctgtgtccatcagcacagagccccccacctacctcagggaacagaaggccaagaggaacagccactttgatgaccatgacccagctgtgatc

SEQ ID NO: 187868 - DNA, 269 bp, Homo sapiens
  Payload ID: 16969
  Gene Symbol: SMARCB1
  Gene Name: SWI/SNF related, matrix associated, actin dependent regulator of chromatin, subfamily b, member 1
  ENST ID: ENST00000634926
  CDS Start-End: 1-269
tctggaggcgactagccactgtggaagagaggaagaaaatagttgcatcgtcacatggtaaaaaaacaaaacctaacactaaggatcacggatacacgactctagccaccagtgtgaccctgttaaaagcctcggaagtggaagagattctggatggcaacgatgagaagtacaaggctgtgtccatcagcacagagccccccacctacctcagggaacagaaggccaagaggaacagccactttgatgaccatgacccagctgtgatc

SEQ ID NO: 187869 - DNA, 6375 bp, Homo sapiens
  Payload ID: 16970
  Gene Symbol: SMARCC1
  Gene Name: SWI/SNF related, matrix associated, actin dependent regulator of chromatin, subfamily c, member 1
  Uniprot ID: Q92922
  ENST ID: ENST00000254480
  CDS Start-End: 121-3438
ggctgggcggggccgggaagcggcagtggcggctacgcgcgcgggggtgcgcgcgggaacgaccgggaaacaccgcgagggccggggtgggccaggctgtggggacgacgggctgcgacgatggccgcagcggcgggcggcggcgggccggggacagcggtaggcgccacgggctcggggattgcggcggcagccgcaggcctagctgtttatcgacggaaggatgggggcccggccaccaagttttgggagagcccggagacggtgtcccagctggattcggtgcgggtctggctgggcaagcactacaagaagtatgttcatgcggatgctcctaccaataaaacactggctgggctggtggtgcagcttcttcagttccaggaagatgcctttgggaagcatgtcaccaacccggccttcaccaaactccctgcaaagtgtttcatggatttcaaagctggaggcgccttatgtcacattcttggggctgcttacaagtataaaaatgaacagggatggcggaggtttgacctacagaacccatctcgaatggatcgtaatgtggaaatgtttatgaacattgaaaaaacattggtgcagaacaattgtttgaccagacccaacatctacctcattccagacattgatctgaagttggctaacaaattgaaagatatcatcaaacgacatcagggaacatttacggatgagaagtcaaaagcttcccaccacatttacccatattcttcctcacaagacgatgaagaatggttgagaccggtgatgagaaaagagaagcaagtgttagtgcattggggcttttacccagacagctatgatacttgggtccatagtaatgatgttgatgctgaaattgaagatccaccaattccagaaaaaccatggaaggttcatgtgaaatggattttggacactgatattttcaatgaatggatgaatgaggaggattatgaggtggatgaaaataggaagcctgtgagttttcgtcagcggatttcaaccaagaatgaagagccagtcagaagtccagaaagaagagatagaaaagcatcagctaatgctcgaaagaggaaacattcgccttcgcctccccctccgacaccaacagaatcacggaagaagagtgggaagaaaggccaagctagcctttatgggaagcgcagaagtcagaaagaggaagatgagcaagaagatctaaccaaggatatggaagacccaacacctgtacccaatatagaagaagtagtacttcccaaaaatgtgaacctaaagaaagatagtgaaaatacacctgttaaaggaggaactgtagcggatctagatgagcaggatgaagaaacagtcacagcaggaggaaaggaagatgaagatcctgccaaaggtgatcagagtcgatcagttgaccttggggaagataatgtgacagagcagaccaatcacattattattcctagttatgcatcatggtttgattataactgtattcatgtgattgaacggcgtgctcttcctgagttcttcaatggaaaaaacaaatccaagactccagaaatatacttggcatatcgaaattttatgattgacacgtatcgtctaaacccccaagagtatttaactagcactgcttgtcggaggaacttgactggagatgtgtgtgctgtgatgagggtccatgcctttttagagcagtggggactcgttaattaccaagttgacccggaaagtagacccatggcaatgggacctcctcctactcctcattttaatgtattagctgataccccctctgggcttgtgcctctgcatcttcgatcacctcaggttcctgctgctcaacagatgctaaattttcctgagaaaaacaaggaaaaaccagttgatttgcagaactttggtctccgtactgacatttactccaagaaaacattagcaaagagtaaaggtgctagtgctggaagagaatggactgaacaggagacccttctactcctggaggccctggagatgtacaaggatgattggaacaaagtgtcggaacatgttggaagtcgtactcaggatgaatgcatcctccactttttgagacttcccattgaggacccataccttgagaattcagatgcttcccttgggcctttggcctaccagcctgtccccttcagtcagtcaggaaatccagttatgagtactgttgcttttttggcatctgtggtggaccctcgcgtggcatctgctgcagcaaaagcggctttggaggagttttctcgggtccgggaggaggtaccactggaattggttgaagctcatgtcaagaaagtacaagaagcagcacgagcctctgggaaagtggatcccacctacggtctggagagcagctgcattgcaggcacagggcccgatgagccagagaagcttgaaggagctgaagaggaaaaaatggaagccgaccctgatggtcagcagcctgaaaaggcagaaaataaagtggaaaatgaaacggatgaaggtgataaagcacaagatggagaaaatgaaaaaaatagtgaaaaggaacaggatagtgaagtgagtgaggataccaaatcagaagaaaaggagactgaagagaacaaagaactcactgatacatgtaaagaaagagaaagtgatactgggaagaagaaagtagaacatgaaatttccgaaggaaatgttgccacagccgcagcagctgctcttgcctcagcggctaccaaagccaagcacctggctgcagtggaagaaagaaagatcaagtccctggtagctctcttggttgagacacaaatgaagaaactagagatcaaacttcgacattttgaagagctggaaactatcatggacagagagaaagaagctctagaacaacagaggcagcagttgcttactgaacgccaaaacttccacatggaacagctgaagtatgctgaattacgagcacgacagcaaatggaacagcagcagcatggccagaaccctcaacaggcacaccagcactcaggaggacctggcctggccccacttggagcagcagggcaccctggcatgatgcctcatcaacagccccctccctaccctctgatgcaccaccagatgccaccacctcatccaccccagccaggtcagataccaggcccaggttccatgatgcccgggcagcacatgccaggccgcatgattcccactgttgcagccaacatccacccctctgggagtggccctacccctcctggcatgccaccaatgccaggaaacatcttaggaccccgggtacccctgacagcacctaacggcatgtatccccctccaccacagcagcagccaccgccaccaccacctgcagatggggtccctccgcctcctgctcctggcccgccagcctcagctgctccttagcctggaagatgcagggaacctccacgcccaccaccatgagctggagtggggatgacaagacttgtgttcctcaactttcttgggtttctttcaggatttttcttctcacagctccaagcacgtgtcccgtgcctccccactcctcttaccacccctctctctgacactttttgtgttgggtcctcagccaacactcaaggggaaacctgtagtgacagtgtgccctggtcatccttaaaataacctgcatctcccctgtcctggtgtgggagtaagctgacagtttctctgcaggtcctgtcaactttagcatgctatgtctttaccatttttgctctcttgcagttttttgctttgtcttatgcttctatggataatgctatataatcattatctttttatctttctgttattattgttttaaaggagagcatcctaagttaataggaaccaaaaaataatgatgggcagaagggggggaatagccacaggggacaaaccttaaggcattataagtgaccttatttctgcttttctgagctaagaatggtgctgatggtaaagtttgagacttttgccacacacaaatttgtgaaaattaaacgagatgtggaaggagaacctcagtgattttattccctagtgaggcctctgagggcctccacactgcctggcagaacataccactgaactagtatgtgctagaggagggcacaaacatccgctccttccctaggcctgctggctctggttttctatgcagatgattcattggattgggggtgagtgttttgtttttctgggggcagtgtgagctttgagggttggaatattgggaggcattccttagtttcctcaactagcctggaaagttaggagtctagggtaattacccccaatgagtctagcctactattcactgctttgtgtgcatttttttctccctctttaaaaaaccctttaaaagaaaaaaaaaagtagatagtgctaaatattttagctcatgaaacttggttaggatggctgggggtacaagtccccaaactacctcttgttacagtagccagggagtggaatttcgtcaaccggtacttttaaggttaggatgggacgggaaaagtgaagcaggatattagctccttataccttctcccttccatttctgagatctcacattccatctatcacagggttttcaaagagatgctgagggtaacaaggaactcacttggcagtcagagcatcatgctttgaggtttggggtgctcaggctgggagggtagaatgccattccagaggacaagccacaaaaatgccttaatttgagctcgtatttacccctgctgataagtgacttgagagttcccggttttttcctcttgtccttccctcccttctgtccttccatgtgtggggaaagggtgtttttggtagagcttggtttccaaagcgcctggctttctcacttcacattctcaagtggcagtttcattatttagaatgcaaggtggacatcttttggatatctttttctatatattttctaaagctttacatatgagagggtatagggaggtgtttataaaacacttgagaacttttttccttaatatcagaaagcaaaaaaataaaaccacaattgagatttgcctttcaaaccctcaggtttgcctctaaccaggtgtccctggtcaccatcagagtactggaatacgggaaccgaggagaccttggtccttttgtttttgttctggactcttgggagtggaaatgagaatgagtttattcctactggagcttagttccaatgcatttggctccagaaagaccccagtgccttttgacaatggccagggttttacctacttcctgccagtctttcccaaaggaaactcattccaaatacttcttttttcccctggagtccgagaaggaaaatggaattctggttcatactgtggtcccttgtaacctcaggtctttaatgtgatcactttcaaatttaaaagatccaggtggaaatatttttactatagtaataattctacaaaatacctgaattcttaacactgttatatttcagtataagtggtggctttttcttttcatgtctttgatctggttttattcctgtaattcagccacctgattttgtgaggggggggaataatatgtggtttttgtacaaacatgtttctcagtgtgttgttattttggaaaaaatgaggggagggagtttggcaagaatggagaaaatgaatgaagaaggcctaatctctctctttttcagtgaataaatggaacaccatttctggattctagtcccattctctgcattcatacaccagtttcttcatatatcctatgaagaacctaaacatttggccccacctggtcttggtttgatcagcagttaaaattctgtgactcgggcttccttcccgactgcccaccttcatgatgtgtaaggaacatacattttgagggtacctcacccactgttcatttgcatggtcaaagtgaaaatgagtggaagttctccaaaaatgatggccaacatcctggcacctccaggtgtgagaaatagctttgcttggtgaatgggataatgtttgtcaggatgcagtttagacagtcccaagttggaggcaggccttgagggcagaagattctgtgaaccttgggggacagcttttgggtactcacagatataaaccctgtgcagaaaaaaagaagtgattgttttcaggatgcttataaatcgagtgaagcaaaagaagaggattctgtgtctgccatgagatgaacgccctgctcttcacgaaggtgtgcctctaataaagagagccaaagccagctgggtctcaccagattcctatactttctcaaggatgttgggggaggttaatcctttatcgaaactaaagactggtttat

SEQ ID NO: 187870 - DNA, 636 bp, Homo sapiens
  Payload ID: 16970
  Gene Symbol: SMARCC1
  Gene Name: SWI/SNF related, matrix associated, actin dependent regulator of chromatin, subfamily c, member 1
  ENST ID: ENST00000454240
  CDS Start-End: 85-486
gcgcgcgggggtgcgcgcgggaacgaccgggaaacaccgcgagggccggggtgggccaggctgtggggacgacgggctgcgacgatggccgcagcggcgggcggcggcgggccggggacagcggtaggcgccacgggctcggggattgcggcggcagccgcaggcctagctgtttatcgacggaaggatgggggcccggccaccaagttttgggagagcccggagacggtgtcccagctggattcggtgcgggtctggctgggcaagcactacaagaagtatgttcatgcggatgctcctaccaataaaacactggctgggctggtggtgcagcttcttcagttccaggaagatgcctttgggaagcatgtcaccaacccggccttcaccaaactccctgcaaagtgtttcatggatttcaaagctggaggcgccttatgtcacattcttggggctgcttacaagtataaaaatgaacagggatgaacaattgtttgaccagacccaacatctacctcattccagacattgatctgaagttggctaacaaattgaaagatatcatcaaacgacatcagggaacatttacggatgagaagtcaaaagcttcccaccacatttacccatattcttcct

SEQ ID NO: 187871 - DNA, 4076 bp, Homo sapiens
  Payload ID: 16971
  Gene Symbol: SMARCC2
  Gene Name: SWI/SNF related, matrix associated, actin dependent regulator of chromatin, subfamily c, member 2
  Uniprot ID: Q8TAQ2
  ENST ID: ENST00000267064
  CDS Start-End: 88-3732
gcggcgggaggcgggcggaggaggaggcggaggaggcgggagctgagctgagtggggcgggcggcggcggggcccgagccggagaagatggcggtgcggaagaaggacggcggccccaacgtgaagtactacgaggccgcggacaccgtgacccagttcgacaacgtgcggctgtggctcggcaagaactacaagaagtatatacaagctgaaccacccaccaacaagtccctgtctagcctggttgtacagttgctacaatttcaggaagaagtttttggcaaacatgtcagcaatgcaccgctcactaaactgccgatcaaatgtttcctagatttcaaagcgggaggctccttgtgccacattcttgcagctgcctacaaattcaagagtgaccagggatggcggcgttacgatttccagaatccatcacgcatggaccgcaatgtggaaatgtttatgaccattgagaagtccttggtgcagaataattgcctgtctcgacctaacatttttctgtgcccagaaattgagcccaaactactagggaaattaaaggacattatcaagagacaccagggaacagtcactgaggataagaacaatgcctcccatgttgtgtatcctgtcccggggaatctagaagaagaggaatgggtacgaccagtcatgaagagggataagcaggttcttctgcactggggctactatcctgacagttacgacacgtggatcccagcgagtgaaattgaggcatctgtggaagatgctccaactcctgagaaacctaggaaggttcatgcaaagtggatcctggacaccgacaccttcaatgaatggatgaatgaggaagactatgaagtaaatgatgacaaaaaccctgtctcccgccgaaagaagatttcagccaagacactgacagatgaggtgaacagcccagattcagatcgacgggacaagaaggggggaaactataagaagaggaagcgctccccctctccttcaccaaccccagaagcaaagaagaaaaatgctaagaaaggtccctcaacaccttacactaagtcaaagcgtggccacagagaagaggagcaagaagacctgacaaaggacatggacgagccctcaccagtccccaatgtagaagaggtgacacttcccaaaacagtcaacacaaagaaagactcagagtcggccccagtcaaaggcggcaccatgaccgacctggatgaacaggaagatgaaagcatggagacgacgggcaaggatgaggatgagaacagtacggggaacaagggagagcagaccaagaatccagacctgcatgaggacaatgtgactgaacagacccaccacatcatcattcccagctacgctgcctggtttgactacaatagtgttcatgccattgagcggagggctctccccgagttcttcaacggcaagaacaagtccaagactccagagatctacctggcctatcgaaactttatgattgacacttaccgactgaacccccaagagtatcttacctctaccgcctgccgccgaaacctagcgggtgatgtctgtgccatcatgagggtccatgccttcctagaacagtggggtcttattaactaccaggtggatgctgagagtcgaccaaccccaatggggcctccgcctacctctcacttccatgtcttggctgacacaccatcagggctggtgcctctgcagcccaagacacctcagcagacctctgcttcccaacaaatgctcaactttcctgacaaaggcaaagagaaaccaacagacatgcaaaactttgggctgcgcacagacatgtacacaaaaaagaatgttccctccaagagcaaggctgcagccagtgccactcgtgagtggacagaacaggaaaccctgcttctcctggaggcactggaaatgtacaaagatgactggaacaaagtgtccgagcatgtgggaagccgcacacaggacgagtgcatcttgcattttcttcgtcttcccattgaagacccatacctggaggactcagaggcctccctaggccccctggcctaccaacccatccccttcagtcagtcgggcaaccctgttatgagcactgttgccttcctggcctctgtcgtcgatccccgagtcgcctctgctgctgcaaagtcagccctagaggagttctccaaaatgaaggaagaggtacccacggccttggtggaggcccatgttcgaaaagtggaagaagcagccaaagtaacaggcaaggcggaccctgccttcggtctggaaagcagtggcattgcaggaaccacctctgatgagcctgagcggattgaggagagcgggaatgacgaggctcgggtggaaggccaggccacagatgagaagaaggagcccaaggaaccccgagaaggagggggtgctatagaggaggaagcaaaagagaaaaccagcgaggctcccaagaaggatgaggagaaagggaaagaaggcgacagtgagaaggagtccgagaagagtgatggagacccaatagtcgatcctgagaaggagaaggagccaaaggaagggcaggaggaagtgctgaaggaagtggtggagtctgagggggaaaggaagacaaaggtggagcgggacattggcgagggcaacctctccaccgctgctgccgccgccctggccgccgccgcagtgaaagctaagcacttggctgctgttgaggaaaggaagatcaaatctttggtggccctgctggtggagacccagatgaaaaagttggagatcaaacttcggcactttgaggagctggagactatcatggaccgggagcgagaagcactggagtatcagaggcagcagctcctggccgacagacaagccttccacatggagcagctgaagtatgcggagatgagggctcggcagcagcacttccaacagatgcaccaacagcagcagcagccaccaccagccctgcccccaggctcccagcctatccccccaacaggggctgctgggccacccgcagtccatggcttggctgtggctccagcctctgtagtccctgctcctgctggcagtggggcccctccaggaagtttgggcccttctgaacagattgggcaggcagggtcaactgcagggccacagcagcagcaaccagctggagccccccagcctggggcagtcccaccaggggttcccccccctggaccccatggcccctcaccgttccccaaccaacaaactcctccctcaatgatgccaggggcagtgccaggcagcgggcacccaggcgtggcgggtaatgctcctttgggtttgccttttggcatgccgcctcctcctcctcctcctgctccatccatcatcccatttggtagtctagctgactccatcagtattaacctccccgctcctcctaacctgcatgggcatcaccaccatctcccgttcgccccgggcactctccccccacctaacctgcctgtgtccatggcgaaccctctacatcctaacctgccggcgaccaccaccatgccatcttccttgcctctcgggccggggctcggatccgccgcagcccaaagccctgccattgtggcagctgttcagggcaacctcctgcccagtgccagcccactgccagacccaggcacccccctgcctccagaccccacagccccgagcccaggcacggtcacccctgtgccacctccacagtgaggagccagccagacatctctccccctcaccccctgtggacatcacggttccaggaacagcccttcccccaccactgggaccctccccagcctggagagttcatcactacgtaaggaaagctccttccgcccctccaaagccctcaccatgcctaacagaggcatgcatttttatatcagattattcaaggacttctgtttaaaagatgtttataatgtctgggagagaggataggatgggaatgctgccctaaaggaagggctggtgaaaggtgtttatacaaggttctattaaccacttctaagggtacacctccctccaaactactgcattttctatggatt

SEQ ID NO: 187872 - DNA, 3839 bp, Homo sapiens
  Payload ID: 16971
  Gene Symbol: SMARCC2
  Gene Name: SWI/SNF related, matrix associated, actin dependent regulator of chromatin, subfamily c, member 2
  Uniprot ID: Q8TAQ2
  ENST ID: ENST00000347471
  CDS Start-End: 88-3480
gcggcgggaggcgggcggaggaggaggcggaggaggcgggagctgagctgagtggggcgggcggcggcggggcccgagccggagaagatggcggtgcggaagaaggacggcggccccaacgtgaagtactacgaggccgcggacaccgtgacccagttcgacaacgtgcggctgtggctcggcaagaactacaagaagtatatacaagctgaaccacccaccaacaagtccctgtctagcctggttgtacagttgctacaatttcaggaagaagtttttggcaaacatgtcagcaatgcaccgctcactaaactgccgatcaaatgtttcctagatttcaaagcgggaggctccttgtgccacattcttgcagctgcctacaaattcaagagtgaccagggatggcggcgttacgatttccagaatccatcacgcatggaccgcaatgtggaaatgtttatgaccattgagaagtccttggtgcagaataattgcctgtctcgacctaacatttttctgtgcccagaaattgagcccaaactactagggaaattaaaggacattatcaagagacaccagggaacagtcactgaggataagaacaatgcctcccatgttgtgtatcctgtcccggggaatctagaagaagaggaatgggtacgaccagtcatgaagagggataagcaggttcttctgcactggggctactatcctgacagttacgacacgtggatcccagcgagtgaaattgaggcatctgtggaagatgctccaactcctgagaaacctaggaaggttcatgcaaagtggatcctggacaccgacaccttcaatgaatggatgaatgaggaagactatgaagtaaatgatgacaaaaaccctgtctcccgccgaaagaagatttcagccaagacactgacagatgaggtgaacagcccagattcagatcgacgggacaagaaggggggaaactataagaagaggaagcgctccccctctccttcaccaaccccagaagcaaagaagaaaaatgctaagaaaggtccctcaacaccttacactaagtcaaagcgtggccacagagaagaggagcaagaagacctgacaaaggacatggacgagccctcaccagtccccaatgtagaagaggtgacacttcccaaaacagtcaacacaaagaaagactcagagtcggccccagtcaaaggcggcaccatgaccgacctggatgaacaggaagatgaaagcatggagacgacgggcaaggatgaggatgagaacagtacggggaacaagggagagcagaccaagaatccagacctgcatgaggacaatgtgactgaacagacccaccacatcatcattcccagctacgctgcctggtttgactacaatagtgttcatgccattgagcggagggctctccccgagttcttcaacggcaagaacaagtccaagactccagagatctacctggcctatcgaaactttatgattgacacttaccgactgaacccccaagagtatcttacctctaccgcctgccgccgaaacctagcgggtgatgtctgtgccatcatgagggtccatgccttcctagaacagtggggtcttattaactaccaggtggatgctgagagtcgaccaaccccaatggggcctccgcctacctctcacttccatgtcttggctgacacaccatcagggctggtgcctctgcagcccaagacacctcagggccgccaggttgatgctgataccaaggctgggcgaaagggcaaagagctggatgacctggtgccagagacggctaagggcaagccagagctgcagacctctgcttcccaacaaatgctcaactttcctgacaaaggcaaagagaaaccaacagacatgcaaaactttgggctgcgcacagacatgtacacaaaaaagaatgttccctccaagagcaaggctgcagccagtgccactcgtgagtggacagaacaggaaaccctgcttctcctggaggcactggaaatgtacaaagatgactggaacaaagtgtccgagcatgtgggaagccgcacacaggacgagtgcatcttgcattttcttcgtcttcccattgaagacccatacctggaggactcagaggcctccctaggccccctggcctaccaacccatccccttcagtcagtcgggcaaccctgttatgagcactgttgccttcctggcctctgtcgtcgatccccgagtcgcctctgctgctgcaaagtcagccctagaggagttctccaaaatgaaggaagaggtacccacggccttggtggaggcccatgttcgaaaagtggaagaagcagccaaagtaacaggcaaggcggaccctgccttcggtctggaaagcagtggcattgcaggaaccacctctgatgagcctgagcggattgaggagagcgggaatgacgaggctcgggtggaaggccaggccacagatgagaagaaggagcccaaggaaccccgagaaggagggggtgctatagaggaggaagcaaaagagaaaaccagcgaggctcccaagaaggatgaggagaaagggaaagaaggcgacagtgagaaggagtccgagaagagtgatggagacccaatagtcgatcctgagaaggagaaggagccaaaggaagggcaggaggaagtgctgaaggaagtggtggagtctgagggggaaaggaagacaaaggtggagcgggacattggcgagggcaacctctccaccgctgctgccgccgccctggccgccgccgcagtgaaagctaagcacttggctgctgttgaggaaaggaagatcaaatctttggtggccctgctggtggagacccagatgaaaaagttggagatcaaacttcggcactttgaggagctggagactatcatggaccgggagcgagaagcactggagtatcagaggcagcagctcctggccgacagacaagccttccacatggagcagctgaagtatgcggagatgagggctcggcagcagcacttccaacagatgcaccaacagcagcagcagccaccaccagccctgcccccaggctcccagcctatccccccaacaggggctgctgggccacccgcagtccatggcttggctgtggctccagcctctgtagtccctgctcctgctggcagtggggcccctccaggaagtttgggcccttctgaacagattgggcaggcagggtcaactgcagggccacagcagcagcaaccagctggagccccccagcctggggcagtcccaccaggggttcccccccctggaccccatggcccctcaccgttccccaaccaacaaactcctccctcaatgatgccaggggcagtgccaggcagcgggcacccaggcgtggcggacccaggcacccccctgcctccagaccccacagccccgagcccaggcacggtcacccctgtgccacctccacagtgaggagccagccagacatctctccccctcaccccctgtggacatcacggttccaggaacagcccttcccccaccactgggaccctccccagcctggagagttcatcactacgtaaggaaagctccttccgcccctccaaagccctcaccatgcctaacagaggcatgcatttttatatcagattattcaaggacttctgtttaaaagatgtttataatgtctgggagagaggataggatgggaatgctgccctaaaggaagggctggtgaaaggtgtttatacaaggttctattaaccacttctaagggtacacctccctccaaactactgcattttctatggattaaaaaaaaaaaaaaa

SEQ ID NO: 187873 - DNA, 4271 bp, Homo sapiens
  Payload ID: 16971
  Gene Symbol: SMARCC2
  Gene Name: SWI/SNF related, matrix associated, actin dependent regulator of chromatin, subfamily c, member 2
  Uniprot ID: Q8TAQ2
  ENST ID: ENST00000394023
  CDS Start-End: 107-3565
gcggccgcggcggcgggaggcggcgggaggcgggcggaggaggaggcggaggaggcgggagctgagctgagtggggcgggcggcggcggggcccgagccggagaagatggcggtgcggaagaaggacggcggccccaacgtgaagtactacgaggccgcggacaccgtgacccagttcgacaacgtgcggctgtggctcggcaagaactacaagaagtatatacaagctgaaccacccaccaacaagtccctgtctagcctggttgtacagttgctacaatttcaggaagaagtttttggcaaacatgtcagcaatgcaccgctcactaaactgccgatcaaatgtttcctagatttcaaagcgggaggctccttgtgccacattcttgcagctgcctacaaattcaagagtgaccagggatggcggcgttacgatttccagaatccatcacgcatggaccgcaatgtggaaatgtttatgaccattgagaagtccttggtgcagaataattgcctgtctcgacctaacatttttctgtgcccagaaattgagcccaaactactagggaaattaaaggacattatcaagagacaccagggaacagtcactgaggataagaacaatgcctcccatgttgtgtatcctgtcccggggaatctagaagaagaggaatgggtacgaccagtcatgaagagggataagcaggttcttctgcactggggctactatcctgacagttacgacacgtggatcccagcgagtgaaattgaggcatctgtggaagatgctccaactcctgagaaacctaggaaggttcatgcaaagtggatcctggacaccgacaccttcaatgaatggatgaatgaggaagactatgaagtaaatgatgacaaaaaccctgtctcccgccgaaagaagatttcagccaagacactgacagatgaggtgaacagcccagattcagatcgacgggacaagaaggggggaaactataagaagaggaagcgctccccctctccttcaccaaccccagaagcaaagaagaaaaatgctaagaaaggtccctcaacaccttacactaagtcaaagcgtggccacagagaagaggagcaagaagacctgacaaaggacatggacgagccctcaccagtccccaatgtagaagaggtgacacttcccaaaacagtcaacacaaagaaagactcagagtcggccccagtcaaaggcggcaccatgaccgacctggatgaacaggaagatgaaagcatggagacgacgggcaaggatgaggatgagaacagtacggggaacaagggagagcagaccaagaatccagacctgcatgaggacaatgtgactgaacagacccaccacatcatcattcccagctacgctgcctggtttgactacaatagtgttcatgccattgagcggagggctctccccgagttcttcaacggcaagaacaagtccaagactccagagatctacctggcctatcgaaactttatgattgacacttaccgactgaacccccaagagtatcttacctctaccgcctgccgccgaaacctagcgggtgatgtctgtgccatcatgagggtccatgccttcctagaacagtggggtcttattaactaccaggtggatgctgagagtcgaccaaccccaatggggcctccgcctacctctcacttccatgtcttggctgacacaccatcagggctggtgcctctgcagcccaagacacctcagggccgccaggttgatgctgataccaaggctgggcgaaagggcaaagagctggatgacctggtgccagagacggctaagggcaagccagagctgcagacctctgcttcccaacaaatgctcaactttcctgacaaaggcaaagagaaaccaacagacatgcaaaactttgggctgcgcacagacatgtacacaaaaaagaatgttccctccaagagcaaggctgcagccagtgccactcgtgagtggacagaacaggaaaccctgcttctcctggaggcactggaaatgtacaaagatgactggaacaaagtgtccgagcatgtgggaagccgcacacaggacgagtgcatcttgcattttcttcgtcttcccattgaagacccatacctggaggactcagaggcctccctaggccccctggcctaccaacccatccccttcagtcagtcgggcaaccctgttatgagcactgttgccttcctggcctctgtcgtcgatccccgagtcgcctctgctgctgcaaagtcagccctagaggagttctccaaaatgaaggaagaggtacccacggccttggtggaggcccatgttcgaaaagtggaagaagcagccaaagtaacaggcaaggcggaccctgccttcggtctggaaagcagtggcattgcaggaaccacctctgatgagcctgagcggattgaggagagcgggaatgacgaggctcgggtggaaggccaggccacagatgagaagaaggagcccaaggaaccccgagaaggagggggtgctatagaggaggaagcaaaagagaaaaccagcgaggctcccaagaaggatgaggagaaagggaaagaaggcgacagtgagaaggagtccgagaagagtgatggagacccaatagtcgatcctgagaaggagaaggagccaaaggaagggcaggaggaagtgctgaaggaagtggtggagtctgagggggaaaggaagacaaaggtggagcgggacattggcgagggcaacctctccaccgctgctgccgccgccctggccgccgccgcagtgaaagctaagcacttggctgctgttgaggaaaggaagatcaaatctttggtggccctgctggtggagacccagatgaaaaagttggagatcaaacttcggcactttgaggagctggagactatcatggaccgggagcgagaagcactggagtatcagaggcagcagctcctggccgacagacaagccttccacatggagcagctgaagtatgcggagatgagggctcggcagcagcacttccaacagatgcaccaacagcagcagcagccaccaccagccctgcccccaggctcccagcctatccccccaacaggggctgctgggccacccgcagtccatggcttggctgtggctccagcctctgtagtccctgctcctgctggcagtggggcccctccaggaagtttgggcccttctgaacagattgggcaggcagggtcaactgcagggccacagcagcagcaaccagctggagccccccagcctggggcagtcccaccaggggttcccccccctggaccccatggcccctcaccgttccccaaccaacaaactcctccctcaatgatgccaggggcagtgccaggcagcgggcacccaggcgtggcggcccaaagccctgccattgtggcagctgttcagggcaacctcctgcccagtgccagcccactgccagacccaggcacccccctgcctccagaccccacagccccgagcccaggcacggtcacccctgtgccacctccacagtgaggagccagccagacatctctccccctcaccccctgtggacatcacggttccaggaacagcccttcccccaccactgggaccctccccagcctggagagttcatcactacgtaaggaaagctccttccgcccctccaaagccctcaccatgcctaacagaggcatgcatttttatatcagattattcaaggacttctgtttaaaagatgtttataatgtctgggagagaggataggatgggaatgctgccctaaaggaagggctggtgaaaggtgtttatacaaggttctattaaccacttctaagggtacacctccctccaaactactgcattttctatggattaaaaaaaaaaaaaaaaagtagattttaaaaagccacattggagctcccttctacccactaaaaaataaccaatttttacattttttgagggggagtgagttttaggaaaggggaattaagattccagggagagctctggggatagaacagggcgcagattccatctctccccaagcccctttttagtgactaagtcaaggccccaactcccctcccccaccctacgctgagcttattcgagttcattcgtactaataatccctcctgcggcttcctcattgttgctgttttaggccaccccagctcagccaatgattcctttccctctgaatgtcagttttgtttttaaaagtcacttgctt

SEQ ID NO: 187874 - DNA, 3730 bp, Homo sapiens
  Payload ID: 16971
  Gene Symbol: SMARCC2
  Gene Name: SWI/SNF related, matrix associated, actin dependent regulator of chromatin, subfamily c, member 2
  ENST ID: ENST00000552674
  CDS Start-End: 13-330
gagccggagaagatggcggtgcggaagaaggacggcggccccaacgtgaagtactacgaggccgcggacaccgtgacccagttcgacaacgtgcggctgtggctcggcaagaactacaagaagtatatacaagctgaaccacccaccaacaagtccctgtctagcctggttgtacagttgctacaatttcaggaagaagtttttggcaaacatgtcagcaatgcaccgctcactaaactgccgatcaaatgtttcctagatttcaaagcgggaggctccttgtgccacattcttgcagctgcctacaaattcaagagtgaccagggatgaatccatcacgcatggaccgcaatgtggaaatgtttatgaccattgagaagtccttggtgcagaataattgcctgtctcgacctaacatttttctgtgcccagaaattgagcccaaactactagggaaattaaaggacattatcaagagacaccagggaacagtcactgaggataagaacaatgcctcccatgttgtgtatcctgtcccggggaatctagaagaagaggaatgggtacgaccagtcatgaagagggataagcaggttcttctgcactggggctactatcctgacagttacgacacgtggatcccagcgagtgaaattgaggcatctgtggaagatgctccaactcctgagaaacctaggaaggttcatgcaaagtggatcctggacaccgacaccttcaatgaatggatgaatgaggaagactatgaagtaaatgatgacaaaaaccctgtctcccgccgaaagaagatttcagccaagacactgacagatgaggtgaacagcccagattcagatcgacgggacaagaaggggggaaactataagaagaggaagcgctccccctctccttcaccaaccccagaagcaaagaagaaaaatgctaagaaaggtccctcaacaccttacactaagtcaaagcgtggccacagagaagaggagcaagaagacctgacaaaggacatggacgagccctcaccagtccccaatgtagaagaggtgacacttcccaaaacagtcaacacaaagaaagactcagagtcggccccagtcaaaggcggcaccatgaccgacctggatgaacaggaagatgaaagcatggagacgacgggcaaggatgaggatgagaacagtacggggaacaagggagagcagaccaagaatccagacctgcatgaggacaatgtgactgaacagacccaccacatcatcattcccagctacgctgcctggtttgactacaatagtgttcatgccattgagcggagggctctccccgagttcttcaacggcaagaacaagtccaagactccagagatctacctggcctatcgaaactttatgattgacacttaccgactgaacccccaagagtatcttacctctaccgcctgccgccgaaacctagcgggtgatgtctgtgccatcatgagggtccatgccttcctagaacagtggggtcttattaactaccaggtggatgctgagagtcgaccaaccccaatggggcctccgcctacctctcacttccatgtcttggctgacacaccatcagggctggtgcctctgcagcccaagacacctcagggccgccaggttgatgctgataccaaggctgggcgaaagggcaaagagctggatgacctggtgccagagacggctaagggcaagccagagctgcagacctctgcttcccaacaaatgctcaactttcctgacaaaggcaaagagaaaccaacagacatgcaaaactttgggctgcgcacagacatgtacacaaaaaagaatgttccctccaagagcaaggctgcagccagtgccactcgtgagtggacagaacaggaaaccctgcttctcctggaggcactggaaatgtacaaagatgactggaacaaagtgtccgagcatgtgggaagccgcacacaggacgagtgcatcttgcattttcttcgtcttcccattgaagacccatacctggaggactcagaggcctccctaggccccctggcctaccaacccatccccttcagtcagtcgggcaaccctgttatgagcactgttgccttcctggcctctgtcgtcgatccccgagtcgcctctgctgctgcaaagtcagccctagaggagttctccaaaatgaaggaagaggtacccacggccttggtggaggcccatgttcgaaaagtggaagaagcagccaaagtaacaggcaaggcggaccctgccttcggtctggaaagcagtggcattgcaggaaccacctctgatgagcctgagcggattgaggagagcgggaatgacgaggctcgggtggaaggccaggccacagatgagaagaaggagcccaaggaaccccgagaaggagggggtgctatagaggaggaagcaaaagagaaaaccagcgaggctcccaagaaggatgaggagaaagggaaagaaggcgacagtgagaaggagtccgagaagagtgatggagacccaatagtcgatcctgagaaggagaaggagccaaaggaagggcaggaggaagtgctgaaggaagtggtggagtctgagggggaaaggaagacaaaggtggagcgggacattggcgagggcaacctctccaccgctgctgccgccgccctggccgccgccgcagtgaaagctaagcacttggctgctgttgaggaaaggaagatcaaatctttggtggccctgctggtggagacccagatgaaaaagttggagatcaaacttcggcactttgaggagctggagactatcatggaccgggagcgagaagcactggagtatcagaggcagcagctcctggccgacagacaagccttccacatggagcagctgaagtatgcggagatgagggctcggcagcagcacttccaacagatgcaccaacagcagcagcagccaccaccagccctgcccccaggctcccagcctatccccccaacaggggctgctgggccacccgcagtccatggcttggctgtggctccagcctctgtagtccctgctcctgctggcagtggggcccctccaggaagtttgggcccttctgaacagattgggcaggcagggtcaactgcagggccacagcagcagcaaccagctggagccccccagcctggggcagtcccaccaggggttcccccccctggaccccatggcccctcaccgttccccaaccaacaaactcctccctcaatgatgccaggggcagtgccaggcagcgggcacccaggcgtggcggacccaggcacccccctgcctccagaccccacagccccgagcccaggcacggtcacccctgtgccacctccacagtgaggagccagccagacatctctccccctcaccccctgtggacatcacggttccaggaacagcccttcccccaccactgggaccctccccagcctggagagttcatcactacgtaaggaaagctccttccgcccctccaaagccctcaccatgcctaacagaggcatgcatttttatatcagattattcaaggacttctgtttaaaagatgtttataatgtctgggagagaggataggatgggaatgctgccctaaaggaagggctggtgaaaggtgtttatacaaggttctattaaccacttctaagggtacacctccctccaaactactgcattttctatggatt

SEQ ID NO: 187875 - DNA, 4114 bp, Homo sapiens
  Payload ID: 16971
  Gene Symbol: SMARCC2
  Gene Name: SWI/SNF related, matrix associated, actin dependent regulator of chromatin, subfamily c, member 2
  ENST ID: ENST00000550164
  CDS Start-End: 16-3753
cccgagccggagaagatggcggtgcggaagaaggacggcggccccaacgtgaagtactacgaggccgcggacaccgtgacccagttcgacaacgtgcggctgtggctcggcaagaactacaagaagtatatacaagctgaaccacccaccaacaagtccctgtctagcctggttgtacagttgctacaatttcaggaagaagtttttggcaaacatgtcagcaatgcaccgctcactaaactgccgatcaaatgtttcctagatttcaaagcgggaggctccttgtgccacattcttgcagctgcctacaaattcaagagtgaccagggatggcggcgttacgatttccagaatccatcacgcatggaccgcaatgtggaaatgtttatgaccattgagaagtccttggtgcagaataattgcctgtctcgacctaacatttttctgtgcccagaaattgagcccaaactactagggaaattaaaggacattatcaagagacaccagggaacagtcactgaggataagaacaatgcctcccatgttgtgtatcctgtcccggggaatctagaagaagaggaatgggtacgaccagtcatgaagagggataagcaggttcttctgcactggggctactatcctgacagttacgacacgtggatcccagcgagtgaaattgaggcatctgtggaagatgctccaactcctgagaaacctaggaaggttcatgcaaagtggatcctggacaccgacaccttcaatgaatggatgaatgaggaagactatgaagtaaatgatgacaaaaaccctgtctcccgccgaaagaagatttcagccaagacactgacagatgaggtgaacagcccagattcagatcgacgggacaagaaggggggaaactataagaagaggaagcgctccccctctccttcaccaaccccagaagcaaagaagaaaaatgctaagaaaggtccctcaacaccttacactaagtcaaagcgtggccacagagaagaggagcaagaagacctgacaaaggacatggacgagccctcaccagtccccaatgtagaagaggtgacacttcccaaaacagtcaacacaaagaaagactcagagtcggccccagtcaaaggcggcaccatgaccgacctggatgaacaggaagatgaaagcatggagacgacgggcaaggatgaggatgagaacagtacggggaacaagggagagcagaccaagaatccagacctgcatgaggacaatgtgactgaacagacccaccacatcatcattcccagctacgctgcctggtttgactacaatagtgttcatgccattgagcggagggctctccccgagttcttcaacggcaagaacaagtccaagactccagagatctacctggcctatcgaaactttatgattgacacttaccgactgaacccccaagagtatcttacctctaccgcctgccgccgaaacctagcgggtgatgtctgtgccatcatgagggtccatgccttcctagaacagtggggtcttattaactaccaggtggatgctgagagtcgaccaaccccaatggggcctccgcctacctctcacttccatgtcttggctgacacaccatcagggctggtgcctctgcagcccaagacacctcagggccgccaggttgatgctgataccaaggctgggcgaaagggcaaagagctggatgacctggtgccagagacggctaagggcaagccagagctgcagacctctgcttcccaacaaatgctcaactttcctgacaaaggcaaagagaaaccaacagacatgcaaaactttgggctgcgcacagacatgtacacaaaaaagaatgttccctccaagagcaaggctgcagccagtgccactcgtgagtggacagaacaggaaaccctgcttctcctggaggcactggaaatgtacaaagatgactggaacaaagtgtccgagcatgtgggaagccgcacacaggacgagtgcatcttgcattttcttcgtcttcccattgaagacccatacctggaggactcagaggcctccctaggccccctggcctaccaacccatccccttcagtcagtcgggcaaccctgttatgagcactgttgccttcctggcctctgtcgtcgatccccgagtcgcctctgctgctgcaaagtcagccctagaggagttctccaaaatgaaggaagaggtacccacggccttggtggaggcccatgttcgaaaagtggaagaagcagccaaagtaacaggcaaggcggaccctgccttcggtctggaaagcagtggcattgcaggaaccacctctgatgagcctgagcggattgaggagagcgggaatgacgaggctcgggtggaaggccaggccacagatgagaagaaggagcccaaggaaccccgagaaggagggggtgctatagaggaggaagcaaaagagaaaaccagcgaggctcccaagaaggatgaggagaaagggaaagaaggcgacagtgagaaggagtccgagaagagtgatggagacccaatagtcgatcctgagaaggagaaggagccaaaggaagggcaggaggaagtgctgaaggaagtggtggagtctgagggggaaaggaagacaaaggtggagcgggacattggcgagggcaacctctccaccgctgctgccgccgccctggccgccgccgcagtgaaagctaagcacttggctgctgttgaggaaaggaagatcaaatctttggtggccctgctggtggagacccagatgaaaaagttggagatcaaacttcggcactttgaggagctggagactatcatggaccgggagcgagaagcactggagtatcagaggcagcagctcctggccgacagacaagccttccacatggagcagctgaagtatgcggagatgagggctcggcagcagcacttccaacagatgcaccaacagcagcagcagccaccaccagccctgcccccaggctcccagcctatccccccaacaggggctgctgggccacccgcagtccatggcttggctgtggctccagcctctgtagtccctgctcctgctggcagtggggcccctccaggaagtttgggcccttctgaacagattgggcaggcagggtcaactgcagggccacagcagcagcaaccagctggagccccccagcctggggcagtcccaccaggggttcccccccctggaccccatggcccctcaccgttccccaaccaacaaactcctccctcaatgatgccaggggcagtgccaggcagcgggcacccaggcgtggcgggtaatgctcctttgggtttgccttttggcatgccgcctcctcctcctcctcctgctccatccatcatcccatttggtagtctagctgactccatcagtattaacctccccgctcctcctaacctgcatgggcatcaccaccatctcccgttcgccccgggcactctccccccacctaacctgcctgtgtccatggcgaaccctctacatcctaacctgccggcgaccaccaccatgccatcttccttgcctctcgggccggggctcggatccgccgcagcccaaagccctgccattgtggcagctgttcagggcaacctcctgcccagtgccagcccactgccagacccaggcacccccctgcctccagaccccacagccccgagcccaggcacggtcacccctgtgccacctccacagtgaggagccagccagacatctctccccctcaccccctgtggacatcacggttccaggaacagcccttcccccaccactgggaccctccccagcctggagagttcatcactacgtaaggaaagctccttccgcccctccaaagccctcaccatgcctaacagaggcatgcatttttatatcagattattcaaggacttctgtttaaaagatgtttataatgtctgggagagaggataggatgggaatgctgccctaaaggaagggctggtgaaaggtgtttatacaaggttctattaaccacttctaagggtacacctccctccaaactactgcattttctatggattaaaaaaaaaaaaaaaaa

SEQ ID NO: 187876 - DNA, 789 bp, Homo sapiens
  Payload ID: 16971
  Gene Symbol: SMARCC2
  Gene Name: SWI/SNF related, matrix associated, actin dependent regulator of chromatin, subfamily c, member 2
  ENST ID: ENST00000550519
  CDS Start-End: 83-400
gggaggcgggcggaggaggaggcggaggaggcgggagctgagctgagtggggcgggcggcggcggggcccgagccggagaagatggcggtgcggaagaaggacggcggccccaacgtgaagtactacgaggccgcggacaccgtgacccagttcgacaacgtgcggctgtggctcggcaagaactacaagaagtatatacaagctgaaccacccaccaacaagtccctgtctagcctggttgtacagttgctacaatttcaggaagaagtttttggcaaacatgtcagcaatgcaccgctcactaaactgccgatcaaatgtttcctagatttcaaagcgggaggctccttgtgccacattcttgcagctgcctacaaattcaagagtgaccagggatgaatccatcacgcatggaccgcaatgtggaaatgtttatgaccattgagaagtccttggtgcagaataattgcctgtctcgacctaacatttttctgtgcccagaaattgagcccaaactactagggaaattaaaggacattatcaagagacaccagggaacagtcactgaggataagaacaatgcctcccatgttgtgtatcctgtcccggggaatctagaagaagttacgacacgtggatcccagcgagtgaaattgaggcatctgtggaagatgctccaactcctgagaaacctaggaaggttcatgcaaagtggatcctggacaccgacaccttcaatgaatggatgaatgaggaagactatgaagtaaatgatgacaaaaaccctg

SEQ ID NO: 187877 - DNA, 3237 bp, Homo sapiens
  Payload ID: 16972
  Gene Symbol: SMARCD1
  Gene Name: SWI/SNF related, matrix associated, actin dependent regulator of chromatin, subfamily d, member 1
  Uniprot ID: Q96GM5
  ENST ID: ENST00000381513
  CDS Start-End: 171-1595
agcacgccttttccgctagtcgccccgctctatcccatagtctcgctgccctgagcctcccgtgccggccggccggccgggggaacaggcgggcgctcggggggcgctcggggggcggggggagttccggttccggttctttgtgcggctgcatcggcggctccgggaagatggcggcccgggcgggtttccagtctgtggctccaagcggcggcgccggagcctcaggaggggcgggcgcggctgctgccttgggcccgggcggaactccggggcctcctgtgcgaatgggcccggctccgggtcaagggctgtaccgctccccgatgcccggagcggcctatccgagaccaggtatgttgccaggcagccgaatgacacctcagggaccttccatgggaccccctggctatggggggaacccttcagtccgacctggcctggcccagtcagggatggatcagtcccgcaagagacctgcccctcagcagatccagcaggtccagcagcaggcggtccaaaatcgaaaccacaatgcaaagaaaaagaagatggctgacaaaattctacctcaaaggattcgtgaactggtaccagaatcccaggcctatatggatctcttggcttttgaaaggaaactggaccagactatcatgaggaaacggctagatatccaagaggccttgaaacgtcccatcaagcaaaaacggaagctgcgaattttcatttctaacactttcaatccggctaagtcagatgccgaggatggggaagggacggtggcttcctgggagcttcgggtagaaggacggctcctggaggattcagccttgtccaaatatgatgccactaaacaaaagaggaagttctcttccttttttaagtccttggtgattgaactggacaaagacctgtatgggccagacaaccatctggtagaatggcacaggaccgccactacccaggagaccgatggctttcaggtgaagcggccgggagacgtgaatgtacggtgtactgtcctactgatgctggattaccagcctccccagtttaaattagacccccgcctagctcgactcctgggcatccatacccagactcgtccagtgatcatccaagcactgtggcaatatattaagacacataagctccaggaccctcacgagcgggagtttgtcatctgtgacaagtacctgcagcagatctttgagtctcaacgtatgaagttttcagagatccctcagcggctccatgccttgcttatgccaccagaacctatcatcattaatcatgtcatcagtgttgacccgaatgatcagaaaaagacagcttgttatgacattgatgttgaagtggatgacaccttgaagacccagatgaattcttttctgctgtccactgccagccaacaggagattgctactctagacaacaagacaatgactgatgtggtgggtaacccagaggaggagcgccgagctgagttctacttccagccctgggctcaggaggctgtgtgccgatacttctactccaaggtgcagcagagacgacaagaattagagcaagccctgggaatccggaatacatagggcctctcccacagccctgattcgactgcaccaattcttgatttgggccctgtgctgcctgcctcatagtatctgccttggtcttgcttggggcgttccaggggatgctgttggttcaaggacaacaccagaatgaagagggtctcacaagacacctgttatcctcttctttcaccctatctcttcccacccccagcttccctttgccccacaaagttcccatgtgcctgtaccctcccctggtctacataggacctctagatagtgttagagagagaacatgtagtggtaatgagtgcttggaatggattgggcctcaggccaggtggtcttcaaggggaccagctaactgatcctgcccttcagagacccaggagttgggagctttcgctccttctccaagactcaggcctgtgggcactctataagctagttgatcttggctctcctgataacagaatccaatttccttccttccctccacaggtttggaacaaactctcccttcacttgttgccctgtagcactacagaaaccctggttcttgggctccactgagccccaggtcagtccccagccctctgggttggcctgctgtcagtgcttctctcactccttagttggggtccacatcagtattggagttttgttctttattgctccctcccagacactccctgtggctgccctttgtgattccctcagatctgccctaatcccgggcatttgggtgggggaatcttgcctttccctttcagagccccagggatctcatctggggaactgtcattgccagcagaggctgttccttcctgctgtttggagatgtgactcattcattcactcactccaccctgcctctgcatcccttaatggagaaacgggcctaaaaccaaacgggtaaaaagccctgggccatccctgtcttcctgtcccttgtctgcccagttgacacctactggtgacttctagggcactgaggagtgaaagcgcctagggctggagaatagcgctgagttgggtttgtgactcttccctctccctgcctcacaggattgtgactccccagcccctgccctcaaagcttcagacccctcaggtagcagcaggaccttgtgatcttggccccttggatctgagatggtttttgcatctttccaggagagcctcacattcttcttccaggttgtatcacccccgagttagcatatcccaggctcgcagactcaacacagcaagggtgggagacagctgggcacaaagggggaattccgttcagcatgggctctaaacccacagaactgacaaagcccctgcttccccaccccctcctcaggctcctgcgagcacacccccacccccaaatccctccctgttctacactggggacagcagaattttctccccgtcttccccttcctgccattttccctcccttgaaaggttgacactggacaaccttggggcagctgagccctggccgcctcctggctggaaccatgagaaggaagctcagtacttcccacagtgtccctgttgataactgtttttattaactgaattgtttttttcatggaccaaacttttttttgtactgtccccttattgatgttacccagttttaataaaagaatcttctgaa

SEQ ID NO: 187878 - DNA, 3658 bp, Homo sapiens
  Payload ID: 16972
  Gene Symbol: SMARCD1
  Gene Name: SWI/SNF related, matrix associated, actin dependent regulator of chromatin, subfamily d, member 1
  Uniprot ID: Q96GM5
  ENST ID: ENST00000394963
  CDS Start-End: 399-1946
ttggaaagttaacgccatgcgccaagatgaagctattactccaagcccctcttcatcagagggctcgagttggggttgagactggggctgaggctgtggtccgtccccctttccaggtccttgtcttcctcccgtcggcctgggggcgcccgctcacgcggcctctctattgcagagctcttctctatggttttccctcccggaccgtgaaggcgggagggcgtggccagcacgccttttccgctagtcgccccgctctatcccatagtctcgctgccctgagcctcccgtgccggccggccggccgggggaacaggcgggcgctcggggggcgctcggggggcggggggagttccggttccggttctttgtgcggctgcatcggcggctccgggaagatggcggcccgggcgggtttccagtctgtggctccaagcggcggcgccggagcctcaggaggggcgggcgcggctgctgccttgggcccgggcggaactccggggcctcctgtgcgaatgggcccggctccgggtcaagggctgtaccgctccccgatgcccggagcggcctatccgagaccaggtatgttgccaggcagccgaatgacacctcagggaccttccatgggaccccctggctatggggggaacccttcagtccgacctggcctggcccagtcagggatggatcagtcccgcaagagacctgcccctcagcagatccagcaggtccagcagcaggcggtccaaaatcgaaaccacaatgcaaagaaaaagaagatggctgacaaaattctacctcaaaggattcgtgaactggtaccagaatcccaggcctatatggatctcttggcttttgaaaggaaactggaccagactatcatgaggaaacggctagatatccaagaggccttgaaacgtcccatcaagcaaaaacggaagctgcgaattttcatttctaacactttcaatccggctaagtcagatgccgaggatggggaagggacggtggcttcctgggagcttcgggtagaaggacggctcctggaggattcagccttgtccaaatatgatgccactaaacaaaagaggaagttctcttccttttttaagtccttggtgattgaactggacaaagacctgtatgggccagacaaccatctggtagaatggcacaggaccgccactacccaggagaccgatggctttcaggtgaagcggccgggagacgtgaatgtacggtgtactgtcctactgatgctggattaccagcctccccagtttaaattagacccccgcctagctcgactcctgggcatccatacccagactcgtccagtgatcatccaagcactgtggcaatatattaagacacataagctccaggaccctcacgagcgggagtttgtcatctgtgacaagtacctgcagcagatctttgagtctcaacgtatgaagttttcagagatccctcagcggctccatgccttgcttatgccaccagaacctatcatcattaatcatgtcatcagtgttgacccgaatgatcagaaaaagacagcttgttatgacattgatgttgaagtggatgacaccttgaagacccagatgaattcttttctgctgtccactgccagccaacaggagattgctactctagacaacaagatccatgagacaatagaaaccatcaaccagctgaagactcagcgggagttcatgctgagctttgccagagaccctcagggtttcatcaatgactggcttcagtcccagtgcagggacctcaagacaatgactgatgtggtgggtaacccagaggaggagcgccgagctgagttctacttccagccctgggctcaggaggctgtgtgccgatacttctactccaaggtgcagcagagacgacaagaattagagcaagccctgggaatccggaatacatagggcctctcccacagccctgattcgactgcaccaattcttgatttgggccctgtgctgcctgcctcatagtatctgccttggtcttgcttggggcgttccaggggatgctgttggttcaaggacaacaccagaatgaagagggtctcacaagacacctgttatcctcttctttcaccctatctcttcccacccccagcttccctttgccccacaaagttcccatgtgcctgtaccctcccctggtctacataggacctctagatagtgttagagagagaacatgtagtggtaatgagtgcttggaatggattgggcctcaggccaggtggtcttcaaggggaccagctaactgatcctgcccttcagagacccaggagttgggagctttcgctccttctccaagactcaggcctgtgggcactctataagctagttgatcttggctctcctgataacagaatccaatttccttccttccctccacaggtttggaacaaactctcccttcacttgttgccctgtagcactacagaaaccctggttcttgggctccactgagccccaggtcagtccccagccctctgggttggcctgctgtcagtgcttctctcactccttagttggggtccacatcagtattggagttttgttctttattgctccctcccagacactccctgtggctgccctttgtgattccctcagatctgccctaatcccgggcatttgggtgggggaatcttgcctttccctttcagagccccagggatctcatctggggaactgtcattgccagcagaggctgttccttcctgctgtttggagatgtgactcattcattcactcactccaccctgcctctgcatcccttaatggagaaacgggcctaaaaccaaacgggtaaaaagccctgggccatccctgtcttcctgtcccttgtctgcccagttgacacctactggtgacttctagggcactgaggagtgaaagcgcctagggctggagaatagcgctgagttgggtttgtgactcttccctctccctgcctcacaggattgtgactccccagcccctgccctcaaagcttcagacccctcaggtagcagcaggaccttgtgatcttggccccttggatctgagatggtttttgcatctttccaggagagcctcacattcttcttccaggttgtatcacccccgagttagcatatcccaggctcgcagactcaacacagcaagggtgggagacagctgggcacaaagggggaattccgttcagcatgggctctaaacccacagaactgacaaagcccctgcttccccaccccctcctcaggctcctgcgagcacacccccacccccaaatccctccctgttctacactggggacagcagaattttctccccgtcttccccttcctgccattttccctcccttgaaaggttgacactggacaaccttggggcagctgagccctggccgcctcctggctggaaccatgagaaggaagctcagtacttcccacagtgtccctgttgataactgtttttattaactgaattgtttttttcatggaccaaacttttttttgtactgtccccttattgatgttacccagttttaataaaagaatcttctgaaggatgggtcctcctacctactgtgagagagctcttccctgagctcttcttccttcaataccattagccac

SEQ ID NO: 187879 - DNA, 881 bp, Homo sapiens
  Payload ID: 16972
  Gene Symbol: SMARCD1
  Gene Name: SWI/SNF related, matrix associated, actin dependent regulator of chromatin, subfamily d, member 1
  ENST ID: ENST00000551966
  CDS Start-End: 46-881
tccggttccggttctttgtgcggctgcatcggcggctccgggaagatggcggcccgggcgggtttccagtctgtggctccaagcggcggcgccggagcctcaggaggggcgggcgcggctgctgccttgggcccgggcggaactccggggcctcctgtgcgaatgggcccggctccgggtcaagggctgtaccgctccccgatgcccggagcggcctatccgagaccaggtatgttgccaggcagccgaatgacacctcagggaccttccatgggaccccctggctatggggggaacccttcagtccgacctggcctggcccagtcagggatggatcagtcccgcaagagacctgcccctcagcagatccagcaggtccagcagcaggcggtccaaaatcgaaaccacaatgcaaagaaaaagaagatggctgacaaaattctacctcaaaggattcgtgaactggtaccagaatcccaggcctatatggatctcttggcttttgaaaggaaactggaccagactatcatgaggaaacggctagatatccaagaggccttgaaacgtcccatcaagtcagccttgtccaaatatgatgccactaaacaaaagaggaagttctcttccttttttaagtccttggtgattgaactggacaaagacctgtatgggccagacaaccatctggtagaatggcacaggaccgccactacccaggagaccgatggctttcaggtgaagcggccgggagacgtgaatgtacggtgtactgtcctactgatgctggattaccagcctccccagtttaaattagacccccgcctagctcgactcctgggcatccatacccagactcgtccagtgatcatccaagcactgtg

SEQ ID NO: 187880 - DNA, 611 bp, Homo sapiens
  Payload ID: 16972
  Gene Symbol: SMARCD1
  Gene Name: SWI/SNF related, matrix associated, actin dependent regulator of chromatin, subfamily d, member 1
  ENST ID: ENST00000549274
  CDS Start-End: 1-346
gacccagatgaattcttttctgctgtccactgccagccaacaggagattgctactctagacaacaagatccatgagacaatagaaaccatcaaccagctgaagactcagcgggagttcatgctgagctttgccagagaccctcagggtttcatcaatgactggcttcagtcccagtgcagggacctcaagacaatgactgatgtggtgggtaacccagaggaggagcgccgagctgagttctacttccagccctgggctcaggaggctgtgtgccgatacttctactccaaggtgcagcagagacgacaagaattagagcaagccctgggaatccggaatacatagggcctctcccacagccctgattcgactgcaccaattcttgatttgggccctgtgctgcctgcctcatagtatctgccttggtcttgcttggggcgttccaggggatgctgttggttcaaggacaacaccagaatgaagagggtttggaacaaactctcccttcacttgttgccctgtagcactacagaaaccctggttcttgggctccactgagccccagaggctgttccttcctgctgtttggagatgtgactcattcattcac

SEQ ID NO: 187881 - DNA, 911 bp, Homo sapiens
  Payload ID: 16972
  Gene Symbol: SMARCD1
  Gene Name: SWI/SNF related, matrix associated, actin dependent regulator of chromatin, subfamily d, member 1
  ENST ID: ENST00000550477
  CDS Start-End: 43-911
ggttccggttctttgtgcggctgcatcggcggctccgggaagatggcggcccgggcgggtttccagtctgtggctccaagcggcggcgccggagcctcaggaggggcgggcgcggctgctgccttgggcccgggcggaactccggggcctcctgtgcgaatgggcccggctccgggtcaagggctgtaccgctccccgatgcccggagcggcctatccgagaccaggtatgttgccaggcagccgaatgacacctcagggaccttccatgggaccccctggctatggggggaacccttcagtccgacctggcctggcccagtcagggatggatcagtcccgcaagagacctgcccctcagcagatccagcaggtccagcagcaggcggtccaaaatcgaaaccacaatgcaaagaaaaagaagatggctgacaaaattctacctcaaaggattcgtgaactggtaccagaatcccaggcctatatggatctcttggcttttgaaaggaaactggaccagactatcatgaggaaacggctagatatccaagaggccttgaaacgtcccatcaagtggcacaggaccgccactacccaggagaccgatggctttcaggtgaagcggccgggagacgtgaatgtacggtgtactgtcctactgatgctggattaccagcctccccagtttaaattagacccccgcctagctcgactcctgggcatccatacccagactcgtccagtgatcatccaagcactgtggcaatatattaagacacataagctccaggaccctcacgagcgggagtttgtcatctgtgacaagtacctgcagcagatctttgagtctcaacgtatgaagttttcagagatccctcagcggctccatgccttgcttatgccaccagaacc

SEQ ID NO: 187882 - DNA, 2095 bp, Homo sapiens
  Payload ID: 16972
  Gene Symbol: SMARCD1
  Gene Name: SWI/SNF related, matrix associated, actin dependent regulator of chromatin, subfamily d, member 1
  ENST ID: ENST00000548573
  CDS Start-End: 5-946
agttatgtgcaatggtttgcttaacttgcctcatttcccttgggcaaatgagatggccttgtccaaatatgatgccactaaacaaaagaggaagttctcttccttttttaagtccttggtgattgaactggacaaagacctgtatgggccagacaaccatctggtagaatggcacaggaccgccactacccaggagaccgatggctttcaggtgaagcggccgggagacgtgaatgtacggtgtactgtcctactgatgctggattaccagcctccccagtttaaattagacccccgcctagctcgactcctgggcatccatacccagactcgtccagtgatcatccaagcactgtggcaatatattaagacacataagctccaggaccctcacgagcgggagtttgtcatctgtgacaagtacctgcagcagatctttgagtctcaacgtatgaagttttcagagatccctcagcggctccatgccttgcttatgccaccagaacctatcatcattaatcatgtcatcagtgttgacccgaatgatcagaaaaagacagcttgttatgacattgatgttgaagtggatgacaccttgaagacccagatgaattcttttctgctgtccactgccagccaacaggagattgctactctagacaacaagatccatgagacaatagaaaccatcaaccagctgaagactcagcgggagttcatgctgagctttgccagagaccctcagggtttcatcaatgactggcttcagtcccagtgcagggacctcaagacaatgactgatgtggtgggtaacccagaggaggagcgccgagctgagttctacttccagccctgggctcaggaggctgtgtgccgatacttctactccaaggtgcagcagagacgacaagaattagagcaagccctgggaatccggaatacatagggcctctcccacagccctgattcgactgcaccaattcttgatttgggccctgtgctgcctgcctcatagtatctgccttggtcttgcttggggcgttccaggggatgctgttggttcaaggacaacaccagaatgaagagggtctcacaagacacctgttatcctcttctttcaccctatctcttcccacccccagcttccctttgccccacaaagttcccatgtgcctgtaccctcccctggtctacataggacctctagatagtgttagagagagaacatgtagtggtaatgagtgcttggaatggattgggcctcaggccaggtggtcttcaaggggaccagctaactgatcctgcccttcagagacccaggagttgggagctttcgctccttctccaagactcaggcctgtgggcactctataagctagttgatcttggctctcctgataacagaatccaatttccttccttccctccacaggtttggaacaaactctcccttcacttgttgccctgtagcactacagaaaccctggttcttgggctccactgagccccaggtcagtccccagccctctgggttggcctgctgtcagtgcttctctcactccttagttggggtccacatcagtattggagttttgttctttattgctccctcccagacactccctgtggctgccctttgtgattccctcagatctgccctaatcccgggcatttgggtgggggaatcttgcctttccctttcagagccccagggatctcatctggggaactgtcattgccagcagaggctgttccttcctgctgtttggagatgtgactcattcattcactcactccaccctgcctctgcatcccttaatggagaaacgggcctaaaaccaaacgggtaaaaagccctgggccatccctgtcttcctgtcccttgtctgcccagttgacacctactggtgacttctagggcactgaggagtgaaagcgcctagggctggagaatagcgctgagttgggtttgtgactcttccctctccctgcctcacaggattgtgactccccagcccctgccctcaaagcttcagacccctcaggtagcagcaggaccttgtgatcttggccccttggatctgagatggttttt

SEQ ID NO: 187883 - DNA, 536 bp, Homo sapiens
  Payload ID: 16972
  Gene Symbol: SMARCD1
  Gene Name: SWI/SNF related, matrix associated, actin dependent regulator of chromatin, subfamily d, member 1
  ENST ID: ENST00000551497
  CDS Start-End: 198-536
agtgcgcagaaagagagggggaggcagttacacacctgctcctaggggcattgtttccctggggagtcggtagagaacctgggtgggtgaagtgggtccagggatacctgtatgagggccggagtgcaaaggggcttgagcagctccagtgatcagaggaacacagaacgtgtagctgacaaattgagagaccaggtatgttgccaggcagccgaatgacacctcagggaccttccatgggaccccctggctatggggggaacccttcagtccgacctggcctggcccagtcagggatggatcagtcccgcaagagacctgcccctcagcagatccagcaggtccagcagcaggcggtccaaaatcgaaaccacaatgcaaagaaaaagaagatggctgacaaaattctacctcaaaggattcgtgaactggtaccagaatcccaggcctatatggatctcttggcttttgaaaggaaactggaccagactatcatgaggaaacggctagatatccaagaggccttgaaacgtccc

SEQ ID NO: 187884 - DNA, 1800 bp, Homo sapiens
  Payload ID: 16973
  Gene Symbol: SMARCD2
  Gene Name: SWI/SNF related, matrix associated, actin dependent regulator of chromatin, subfamily d, member 2
  ENST ID: ENST00000225742
  CDS Start-End: 96-1466
agtaccaggtgagcaaggaggacgcgagcggacgggggcgagaggcgctgcgagggcgcccgggccggcggctgaaggggcctcgacgacctggcatgtcaccagggaaccggatgcccatggctggcttgcaggtgggaccccctgctggctccccatttggtgcagcagctccgcttcgacctggcatgccacccaccatgatggatccattccgaaaacgcctgcttgtgccccaggcgcagcctcccatgcctgcccagcgccgggggttaaagaggaggaagatggcagataaggttctacctcagcgaatccgggagcttgttccagagtctcaggcgtacatggatctcttggcttttgagcggaagctggaccagaccattgctcgcaagcggatggagatccaggaggccatcaaaaagcctctgacacaaaagcgaaagcttcggatctacatttccaatacgttcagtcccagcaaggcggaaggcgatagtgcaggaactgcagggacccctgggggaaccccagcaggggacaaggtggcttcctgggaactccgagtggaaggaaaactgctggatgatcctagcaaacagaagaggaagttttcttcattctttaagagcctcgtcattgagctggacaaggagctgtacgggcctgacaatcacctggtggagtggcaccggatgcccaccacccaggagacagatggcttccaagtaaaacggcctggagacctcaacgtcaagtgcaccctcctgctcatgctggatcatcagcctccccagtacaaattggacccccgattggcaaggctgctgggagtgcacacgcagacgagggccgccatcatgcaggccctgtggctttacatcaagcacaaccagctgcaggatgggcacgagcgggagtacatcaactgcaaccgttacttccgccagatcttcagttgtggccgactccgtttctccgagattcccatgaagctggcagggttgctgcagcatccagaccccattgtcatcaaccatgtcattagtgtcgaccctaacgaccagaagaagacagcctgttacgacatcgatgtggaggtggacgacccactgaaggcccaaatgagcaattttctggcctctaccaccaatcagcaggagatcgcctcccttgatgtcaagatccatgagaccattgagtccatcaaccagctgaagacccagagagatttcatgctcagttttagcaccgacccccaggacttcatccaggaatggctccgttcccagcgccgagacctcaagatcatcactgatgtgattggaaatcctgaggaggagagacgagctgctttctaccaccagccctgggcccaggaagcagtaggcaggcacatctttgccaaggtgcagcagcgaaggcaggaactggaacaggtgctgggaattcgcctgacctaactgctcagggatctttcttcccagccctggagcctggagggagaccaccctctgggtccttgctggggccgcagacacgtaggctggggtgaggagtgtctgctgtcaccctctactctccagctttagtcttataaatgtagtgataggattccttgttgcttggtccccaaagccttatactttttgcattggctttaattgggttcagcagatgcctcctctgcccccctgcaggcaggcccaagtaggactgctggaggctgtgctttgacattgtaagacatttccgaaccaaaggctgctgggtttgcatgtttacagactccccctg

SEQ ID NO: 187885 - DNA, 1935 bp, Homo sapiens
  Payload ID: 16973
  Gene Symbol: SMARCD2
  Gene Name: SWI/SNF related, matrix associated, actin dependent regulator of chromatin, subfamily d, member 2
  Uniprot ID: Q92925
  ENST ID: ENST00000323347
  CDS Start-End: 48-1499
agtgtgtgcaaggcagagctgccaaacaggccttgcaggcagcagccatggggaggcgggtgggggtggaggtgactcccagatgggctccacagaaatgtcagggagcaaggcctcagcgacctggcatgtcaccagggaaccggatgcccatggctggcttgcaggtgggaccccctgctggctccccatttggtgcagcagctccgcttcgacctggcatgccacccaccatgatggatccattccgaaaacgcctgcttgtgccccaggcgcagcctcccatgcctgcccagcgccgggggttaaagaggaggaagatggcagataaggttctacctcagcgaatccgggagcttgttccagagtctcaggcgtacatggatctcttggcttttgagcggaagctggaccagaccattgctcgcaagcggatggagatccaggaggccatcaaaaagcctctgacacaaaagcgaaagcttcggatctacatttccaatacgttcagtcccagcaaggcggaaggcgatagtgcaggaactgcagggacccctgggggaaccccagcaggggacaaggtggcttcctgggaactccgagtggaaggaaaactgctggatgatcctagcaaacagaagaggaagttttcttcattctttaagagcctcgtcattgagctggacaaggagctgtacgggcctgacaatcacctggtggagtggcaccggatgcccaccacccaggagacagatggcttccaagtaaaacggcctggagacctcaacgtcaagtgcaccctcctgctcatgctggatcatcagcctccccagtacaaattggacccccgattggcaaggctgctgggagtgcacacgcagacgagggccgccatcatgcaggccctgtggctttacatcaagcacaaccagctgcaggatgggcacgagcgggagtacatcaactgcaaccgttacttccgccagatcttcagttgtggccgactccgtttctccgagattcccatgaagctggcagggttgctgcagcatccagaccccattgtcatcaaccatgtcattagtgtcgaccctaacgaccagaagaagacagcctgttacgacatcgatgtggaggtggacgacccactgaaggcccaaatgagcaattttctggcctctaccaccaatcagcaggagatcgcctcccttgatgtcaagatccatgagaccattgagtccatcaaccagctgaagacccagagagatttcatgctcagttttagcaccgacccccaggacttcatccaggaatggctccgttcccagcgccgagacctcaagatcatcactgatgtgattggaaatcctgaggaggagagacgagctgctttctaccaccagccctgggcccaggaagcagtaggcaggcacatctttgccaaggtgcagcagcgaaggcaggaactggaacaggtgctgggaattcgcctgacctaactgctcagggatctttcttcccagccctggagcctggagggagaccaccctctgggtccttgctggggccgcagacacgtaggctggggtgaggagtgtctgctgtcaccctctactctccagctttagtcttataaatgtagtgataggattccttgttgcttggtccccaaagccttatactttttgcattggctttaattgggttcagcagatgcctcctctgcccccctgcaggcaggcccaagtaggactgctggaggctgtgctttgacattgtaagacatttccgaaccaaaggctgctgggtttgcatgtttacagactccccctggggcgagggtcagagctggctctggggagctgggctaggaagaggaggtgcagcccagactcttcctagcctttctaaaccaaagttctttgccattcctac

SEQ ID NO: 187886 - DNA, 2716 bp, Homo sapiens
  Payload ID: 16973
  Gene Symbol: SMARCD2
  Gene Name: SWI/SNF related, matrix associated, actin dependent regulator of chromatin, subfamily d, member 2
  Uniprot ID: Q92925
  ENST ID: ENST00000448276
  CDS Start-End: 267-1862
ggccaaacctccggaggccggggacggaaggcgggcccgcagcagatcctggatccggaatctcccgggcaggagcggaatctgtcccgaaccgggtctgtgaggaactcgcgaacttggattaggaaatcccggagcccggatcgacaaatcccggaacccggaattaagatcgccaagtcccggatcgcggagcacagagcacggagtggactcgacgcggagcccggagtccggatcgcggcaccgcgggacgggacggagcgatgtcgggccgaggcgcgggcgggttcccgctgcccccgctaagccctggcggcggcgccgtggctgcggccctgggagcgccgcctccccccgcgggacccggcatgctgcccggaccggcgctccggggaccgggtccggcaggaggcgtggggggccccggggccgccgccttccgccccatgggccccgcgggccccgcggcgcagtaccagcgacctggcatgtcaccagggaaccggatgcccatggctggcttgcaggtgggaccccctgctggctccccatttggtgcagcagctccgcttcgacctggcatgccacccaccatgatggatccattccgaaaacgcctgcttgtgccccaggcgcagcctcccatgcctgcccagcgccgggggttaaagaggaggaagatggcagataaggttctacctcagcgaatccgggagcttgttccagagtctcaggcgtacatggatctcttggcttttgagcggaagctggaccagaccattgctcgcaagcggatggagatccaggaggccatcaaaaagcctctgacacaaaagcgaaagcttcggatctacatttccaatacgttcagtcccagcaaggcggaaggcgatagtgcaggaactgcagggacccctgggggaaccccagcaggggacaaggtggcttcctgggaactccgagtggaaggaaaactgctggatgatcctagcaaacagaagaggaagttttcttcattctttaagagcctcgtcattgagctggacaaggagctgtacgggcctgacaatcacctggtggagtggcaccggatgcccaccacccaggagacagatggcttccaagtaaaacggcctggagacctcaacgtcaagtgcaccctcctgctcatgctggatcatcagcctccccagtacaaattggacccccgattggcaaggctgctgggagtgcacacgcagacgagggccgccatcatgcaggccctgtggctttacatcaagcacaaccagctgcaggatgggcacgagcgggagtacatcaactgcaaccgttacttccgccagatcttcagttgtggccgactccgtttctccgagattcccatgaagctggcagggttgctgcagcatccagaccccattgtcatcaaccatgtcattagtgtcgaccctaacgaccagaagaagacagcctgttacgacatcgatgtggaggtggacgacccactgaaggcccaaatgagcaattttctggcctctaccaccaatcagcaggagatcgcctcccttgatgtcaagatccatgagaccattgagtccatcaaccagctgaagacccagagagatttcatgctcagttttagcaccgacccccaggacttcatccaggaatggctccgttcccagcgccgagacctcaagatcatcactgatgtgattggaaatcctgaggaggagagacgagctgctttctaccaccagccctgggcccaggaagcagtaggcaggcacatctttgccaaggtgcagcagcgaaggcaggaactggaacaggtgctgggaattcgcctgacctaactgctcagggatctttcttcccagccctggagcctggagggagaccaccctctgggtccttgctggggccgcagacacgtaggctggggtgaggagtgtctgctgtcaccctctactctccagctttagtcttataaatgtagtgataggattccttgttgcttggtccccaaagccttatactttttgcattggctttaattgggttcagcagatgcctcctctgcccccctgcaggcaggcccaagtaggactgctggaggctgtgctttgacattgtaagacatttccgaaccaaaggctgctgggtttgcatgtttacagactccccctggggcgagggtcagagctggctctggggagctgggctaggaagaggaggtgcagcccagactcttcctagcctttctaaaccaaagttctttgccattcctacaagcccagccttgctgctggttttttcctttcctttgggtatttgcactattttgggagcaagttttctatgtgggagccactttttttgtacaggggtaagttgggggttttcagggagcctgttaggtgcctccttcttttctttcctcaatctatgcaagcggctctggccgccatcatctcctgggatgccagagggctgcctctccagcggcttgggccggggaggggacactccagttctctagcatggcctgaggtatggggtatgtgcatgtggaggccagggtaaggtgaatggggaggctgggaggactggtgttgccctttggagcttggtgaggagggtgggcctagggcttggcgagtgccacatctggcaggtttggaaatttccaaataaatccttttgtcta

SEQ ID NO: 187887 - DNA, 993 bp, Homo sapiens
  Payload ID: 16973
  Gene Symbol: SMARCD2
  Gene Name: SWI/SNF related, matrix associated, actin dependent regulator of chromatin, subfamily d, member 2
  ENST ID: ENST00000450364
  CDS Start-End: 1-694
ggacaaggagctgtacgggcctgacaatcacctggtggagtggcaccggatgcccaccacccaggagacagatggcttccaagtaaaacggcctggagacctcaacgtcaagtgcaccctcctgctcatgctggatcatcagcctccccagtacaaattggacccccgattggcaaggctgctgggagtgcacacgcagacgagggccgccatcatgcaggccctgtggctttacatcaagcacaaccagctgcaggatgggcacgagcgggagtacatcaactgcaaccgttacttccgccagatcttcagttgtggccgactccgtttctccgagattcccatgaagctggcagggttgctgcagcatccagaccccattgtcatcaaccatgtcattagtgtcgaccctaacgaccagaagaagacagcctgttacgacatcgatgtggaggtggacgacccactgaaggcccaaatgagcaattttctggcctctaccaccaatcagcaggagatcgcctcccttgatgtcaagatcatcactgatgtgattggaaatcctgaggaggagagacgagctgctttctaccaccagccctgggcccaggaagcagtaggcaggcacatctttgccaaggtgcagcagcgaaggcaggaactggaacaggtgctgggaattcgcctgacctaactgctcagggatctttcttcccagccctggagcctggagggagaccaccctctgggtccttgctggggccgcagacacgtaggctggggtgaggagtgtctgctgtcaccctctactctccagctttagtcttataaatgtagtgataggattccttgttgcttggtccccaaagccttatactttttgcattggctttaattgggttcagcagatgcctcctctgcccccctgcaggcaggcccaagtaggactgctggaggctgtgctttgacattgtaagacatttccgaaccaaa

SEQ ID NO: 187888 - DNA, 449 bp, Homo sapiens
  Payload ID: 16973
  Gene Symbol: SMARCD2
  Gene Name: SWI/SNF related, matrix associated, actin dependent regulator of chromatin, subfamily d, member 2
  ENST ID: ENST00000577990
  CDS Start-End: 241-449
tcgcgaggggcaggattcgaggaggcactcgagcattgggcaccaggagcggaatctgtcccgaaccgggtctgtgaggaactcgcgaacttggattaggaaatcccggagcccggatcgacaaatcccggaacccggaattaagatcgccaagtcccggatcgcggagcacagagcacggagtggactcgacgcggagcccggagtccggatcgcggcaccgcgggacgggacggagcgatgtcgggccgaggcgcgggcgggttcccgctgcccccgctaagccctggcggcggcgccgtggctgcggccctgggagcgccgcctccccccgcgggacccggcatgctgcccggaccggcgctccggggaccgggtccggcaggaggcgtggggggccccggggccgccgccttccgccccatgggccccgcgggccccgcggcgca

SEQ ID NO: 187889 - DNA, 477 bp, Homo sapiens
  Payload ID: 16973
  Gene Symbol: SMARCD2
  Gene Name: SWI/SNF related, matrix associated, actin dependent regulator of chromatin, subfamily d, member 2
  ENST ID: ENST00000580054
  CDS Start-End: 1-330
cgacctggcatgtcaccagggaaccggatgcccatggctggcttgcaggtgggaccccctgctggctccccatttggtgcagcagctccgcttcgacctggcatgccacccaccatgatggatccattccgaaaacgcctgcttgtgccccaggcgcagcctcccatgcctgcccagcgccgggggttaaagaggaggaagatggcagataaggttctacctcagcgagtaagtgttaagaggacacctgggaggcctgcccagtggccaccttgggatccgggagcttgttccagagtctcaggcgtacatggatctcttggcttttgagcggaagctggaccagaccattgctcgcaagcggatggagatccaggaggccatcaaaaagcctctgacacaaaagcgaaagcttcggatctacatttccaatacgttcagtcccagcaaggcggaaggcgatagtgcaggaactgc

SEQ ID NO: 187890 - DNA, 1017 bp, Homo sapiens
  Payload ID: 16973
  Gene Symbol: SMARCD2
  Gene Name: SWI/SNF related, matrix associated, actin dependent regulator of chromatin, subfamily d, member 2
  ENST ID: ENST00000584400
  CDS Start-End: 25-267
ggcaccgcgggacgggacggagcgatgtcgggccgaggcgcgggcgggttcccgctgcccccgctaagccctggcggcggcgccgtggctgcggccctgggagcgccgcctccccccgcgggacccggcatgctgcccggaccggcgctccggggaccgggtccggcaggaggcgtggggggccccggggccgccgccttccgccccatgggccccgcgggccccgcggcgcagtaccaggttaaagaggaggaagatggcagataaggttctacctcagcgaatccgggagcttgttccagagtctcaggcgtacatggatctcttggcttttgagcggaagctggaccagaccattgctcgcaagcggatggagatccaggaggccatcaaaaagcctctgacacaaaagcgaaagcttcggatctacatttccaatacgttcagtcccagcaaggcggaaggcgatagtgcaggaactgcagggacccctgggggaaccccagcaggggacaaggtggcttcctgggaactccgagtggaaggaaaactgctggatgatcctagcaaacagaagaggaagttttcttcattctttaagagcctcgtcattgagctggacaaggagctgtacgggcctgacaatcacctggtggagtggcaccggatgcccaccacccaggagacagatggcttccaagtaaaacggcctggagacctcaacgtcaagtgcaccctcctgctcatgctggatcatcagcctccccagtacaaattggacccccgattggcaaggctgctgggagtgcacacgcagacgagggccgccatcatgcaggccctgtggctttacatcaagcacaaccagctgcaggatgggcacgagcgggagtacatcaactgcaaccgttacttccgccagatcttcagttgtggccgactccgtttctccgagattcccatgaagctggcagggttgctgcagcatccagaccccattgtcatcaaccatgtcat

SEQ ID NO: 187891 - DNA, 2342 bp, Homo sapiens
  Payload ID: 16973
  Gene Symbol: SMARCD2
  Gene Name: SWI/SNF related, matrix associated, actin dependent regulator of chromatin, subfamily d, member 2
  ENST ID: ENST00000613943
  CDS Start-End: 1-1485
atgtcgggccgaggcgcgggcgggttcccgctgcccccgctaagccctggcggcggcgccgccttccgccccatgggccccgcgggccccgcggcgcagtaccagcgacctggcatgtcaccagggaaccggatgcccatggctggcttgcaggtgggaccccctgctggctccccatttggtgcagcagctccgcttcgacctggcatgccacccaccatgatggatccattccgaaaacgcctgcttgtgccccaggcgcagcctcccatgcctgcccagcgccgggggttaaagaggaggaagatggcagataaggttctacctcagcgaatccgggagcttgttccagagtctcaggcgtacatggatctcttggcttttgagcggaagctggaccagaccattgctcgcaagcggatggagatccaggaggccatcaaaaagcctctgacacaaaagcgaaagcttcggatctacatttccaatacgttcagtcccagcaaggcggaaggcgatagtgcaggaactgcagggacccctgggggaaccccagcaggggacaaggtggcttcctgggaactccgagtggaaggaaaactgctggatgatcctagcaaacagaagaggaagttttcttcattctttaagagcctcgtcattgagctggacaaggagctgtacgggcctgacaatcacctggtggagtggcaccggatgcccaccacccaggagacagatggcttccaagtaaaacggcctggagacctcaacgtcaagtgcaccctcctgctcatgctggatcatcagcctccccagtacaaattggacccccgattggcaaggctgctgggagtgcacacgcagacgagggccgccatcatgcaggccctgtggctttacatcaagcacaaccagctgcaggatgggcacgagcgggagtacatcaactgcaaccgttacttccgccagatcttcagttgtggccgactccgtttctccgagattcccatgaagctggcagggttgctgcagcatccagaccccattgtcatcaaccatgtcattagtgtcgaccctaacgaccagaagaagacagcctgttacgacatcgatgtggaggtggacgacccactgaaggcccaaatgagcaattttctggcctctaccaccaatcagcaggagatcgcctcccttgatgtcaagatccatgagaccattgagtccatcaaccagctgaagacccagagagatttcatgctcagttttagcaccgacccccaggacttcatccaggaatggctccgttcccagcgccgagacctcaagatcatcactgatgtgattggaaatcctgaggaggagagacgagctgctttctaccaccagccctgggcccaggaagcagtaggcaggcacatctttgccaaggtgcagcagcgaaggcaggaactggaacaggtgctgggaattcgcctgacctaactgctcagggatctttcttcccagccctggagcctggagggagaccaccctctgggtccttgctggggccgcagacacgtaggctggggtgaggagtgtctgctgtcaccctctactctccagctttagtcttataaatgtagtgataggattccttgttgcttggtccccaaagccttatactttttgcattggctttaattgggttcagcagatgcctcctctgcccccctgcaggcaggcccaagtaggactgctggaggctgtgctttgacattgtaagacatttccgaaccaaaggctgctgggtttgcatgtttacagactccccctggggcgagggtcagagctggctctggggagctgggctaggaagaggaggtgcagcccagactcttcctagcctttctaaaccaaagttctttgccattcctacaagcccagccttgctgctggttttttcctttcctttgggtatttgcactattttgggagcaagttttctatgtgggagccactttttttgtacaggggtaagttgggggttttcagggagcctgttaggtgcctccttcttttctttcctcaatctatgcaagcggctctggccgccatcatctcctgggatgccagagggctgcctctccagcggcttgggccggggaggggacactccagttctctagcatggcctgaggtatggggtatgtgcatgtggaggccagggtaaggtgaatggggaggctgggaggactggtgttgccctttggagcttggtgaggagggtgggcctagggcttggcgagtgccacatctggcaggtttggaaatttccaaataaatccttttgtctattg

SEQ ID NO: 187892 - DNA, 1993 bp, Homo sapiens
  Payload ID: 16974
  Gene Symbol: SMARCD3
  Gene Name: SWI/SNF related, matrix associated, actin dependent regulator of chromatin, subfamily d, member 3
  Uniprot ID: Q6STE5
  ENST ID: ENST00000262188
  CDS Start-End: 412-1863
cgcgggcctcggcggcttcgggctgcagcactgctgcccagcgcccgcggccgggctggtcggcgcgcctcgccgcttatctgcgctgtttggacagcgggcttggaaaggcaggcggccccgtccccgccgagtcaacaggcagaccccgggccgccggactatttctgtcttatcagtgcaggaatgcggcagccgcggcggcggcggcggcggcgggcgggcggcggcggcgtgggccgtgggccgtcagggcagccctgaaggggccccctccccactccgctcgagtagaagtgtgagagagcccagcaggactcagaggggagagttggaggaaaaaaaaaggcagaaaagggaaagaaagaggaagagagagagagagtgagaggagccgctgagcccaccccgatggccgcggacgaagttgccggaggggcgcgcaaagccacgaaaagcaaactttttgagtttctggtccatggggtgcgccccgggatgccgtctggagcccggatgccccaccagggggcgcccatgggccccccgggctccccgtacatgggcagccccgccgtgcgacccggcctggcccccgcgggcatggagcccgcccgcaagcgagcagcgcccccgcccgggcagagccaggcacagagccagggccagccggtgcccaccgcccccgcgcggagccgcagtgccaagaggaggaagatggctgacaaaatcctccctcaaaggattcgggagctggtccccgagtcccaggcttacatggacctcttggcatttgagaggaaactggatcaaaccatcatgcggaagcgggtggacatccaggaggctctgaagaggcccatgaagcaaaagcggaagctgcgactctatatctccaacacttttaaccctgcgaagcctgatgctgaggattccgacggcagcattgcctcctgggagctacgggtggaggggaagctcctggatgatcccagcaaacagaagcggaagttctcttctttcttcaagagtttggtcatcgagctggacaaagatctttatggccctgacaaccacctcgttgagtggcatcggacacccacgacccaggagacggacggcttccaggtgaaacggcctggggacctgagtgtgcgctgcacgctgctcctcatgctggactaccagcctccccagttcaaactggatccccgcctagcccggctgctggggctgcacacacagagccgctcagccattgtccaggccctgtggcagtatgtgaagaccaacaggctgcaggactcccatgacaaggaatacatcaatggggacaagtatttccagcagatttttgattgtccccggctgaagttttctgagattccccagcgcctcacagccctgctattgccccctgacccaattgtcatcaaccatgtcatcagcgtggacccttcagaccagaagaagacggcgtgctatgacattgacgtggaggtggaggagccattaaaggggcagatgagcagcttcctcctatccacggccaaccagcaggagatcagtgctctggacagtaagatccatgagacgattgagtccataaaccagctcaagatccagagggacttcatgctaagcttctccagagaccccaaaggctatgtccaagacctgctccgctcccagagccgggacctcaaggtgatgacagatgtagccggcaaccctgaagaggagcgccgggctgagttctaccaccagccctggtcccaggaggccgtcagtcgctacttctactgcaagatccagcagcgcaggcaggagctggagcagtcgctggttgtgcgcaacacctaggagcccaaaaataagcagcacgacggaactttcagccgtgtcccgggccccagcattttgccccgggctccagcatcactcctctgccaccttggggtgtggggctggattaaaagtcattcatctgaca

SEQ ID NO: 187893 - DNA, 1669 bp, Homo sapiens
  Payload ID: 16974
  Gene Symbol: SMARCD3
  Gene Name: SWI/SNF related, matrix associated, actin dependent regulator of chromatin, subfamily d, member 3
  Uniprot ID: Q6STE5
  ENST ID: ENST00000356800
  CDS Start-End: 130-1542
ctggcatcttcctcccctcctcctttccagatcctcagaatggcccttggtgctgcaggcgcggtgggctccgggcccaggcaccgagggggcactggatgactctccaggtgcaggaccctgccatctatgactccaggtcttcagcacccacccaccgtggtacagcgccccgggatgccgtctggagcccggatgccccaccagggggcgcccatgggccccccgggctccccgtacatgggcagccccgccgtgcgacccggcctggcccccgcgggcatggagcccgcccgcaagcgagcagcgcccccgcccgggcagagccaggcacagagccagggccagccggtgcccaccgcccccgcgcggagccgcagtgccaagaggaggaagatggctgacaaaatcctccctcaaaggattcgggagctggtccccgagtcccaggcttacatggacctcttggcatttgagaggaaactggatcaaaccatcatgcggaagcgggtggacatccaggaggctctgaagaggcccatgaagcaaaagcggaagctgcgactctatatctccaacacttttaaccctgcgaagcctgatgctgaggattccgacggcagcattgcctcctgggagctacgggtggaggggaagctcctggatgatcccagcaaacagaagcggaagttctcttctttcttcaagagtttggtcatcgagctggacaaagatctttatggccctgacaaccacctcgttgagtggcatcggacacccacgacccaggagacggacggcttccaggtgaaacggcctggggacctgagtgtgcgctgcacgctgctcctcatgctggactaccagcctccccagttcaaactggatccccgcctagcccggctgctggggctgcacacacagagccgctcagccattgtccaggccctgtggcagtatgtgaagaccaacaggctgcaggactcccatgacaaggaatacatcaatggggacaagtatttccagcagatttttgattgtccccggctgaagttttctgagattccccagcgcctcacagccctgctattgccccctgacccaattgtcatcaaccatgtcatcagcgtggacccttcagaccagaagaagacggcgtgctatgacattgacgtggaggtggaggagccattaaaggggcagatgagcagcttcctcctatccacggccaaccagcaggagatcagtgctctggacagtaagatccatgagacgattgagtccataaaccagctcaagatccagagggacttcatgctaagcttctccagagaccccaaaggctatgtccaagacctgctccgctcccagagccgggacctcaaggtgatgacagatgtagccggcaaccctgaagaggagcgccgggctgagttctaccaccagccctggtcccaggaggccgtcagtcgctacttctactgcaagatccagcagcgcaggcaggagctggagcagtcgctggttgtgcgcaacacctaggagcccaaaaataagcagcacgacggaactttcagccgtgtcccgggccccagcattttgccccgggctccagcatcactcctctgccaccttggggtgtggggctggattaaaagtcattcatctg

SEQ ID NO: 187894 - DNA, 2018 bp, Homo sapiens
  Payload ID: 16974
  Gene Symbol: SMARCD3
  Gene Name: SWI/SNF related, matrix associated, actin dependent regulator of chromatin, subfamily d, member 3
  Uniprot ID: Q6STE5
  ENST ID: ENST00000392811
  CDS Start-End: 476-1888
gtgcgcgcccacgtgcatgcgcgtgtgtggtcctagtgtaggtgatgtctgcggccacacaggatgctgactgcgtgtgtgactcgtgggcgtgcagatgcaagcacaggcctacgacacatctgtgtacaggctgaagatcacaacgggtctggccagggcccgccgagggcctccgagctggcgagcacaccgacggctggatggggcgacgcttcctgctccggtccctaactcattattaagctcctcgctctttgcagacgctccctgcgcctcccccgctccgggctgcagcggcgcaggcgccgggccgagccgagcgccgagcagggagcgggcggccgcgctccgggccggggtcccgggggagcagatcctcagaatggcccttggtgctgcaggcgcggtgggctccgggcccaggcaccgagggggcactggatgactctccaggtgcaggaccctgccatctatgactccaggtcttcagcacccacccaccgtggtacagcgccccgggatgccgtctggagcccggatgccccaccagggggcgcccatgggccccccgggctccccgtacatgggcagccccgccgtgcgacccggcctggcccccgcgggcatggagcccgcccgcaagcgagcagcgcccccgcccgggcagagccaggcacagagccagggccagccggtgcccaccgcccccgcgcggagccgcagtgccaagaggaggaagatggctgacaaaatcctccctcaaaggattcgggagctggtccccgagtcccaggcttacatggacctcttggcatttgagaggaaactggatcaaaccatcatgcggaagcgggtggacatccaggaggctctgaagaggcccatgaagcaaaagcggaagctgcgactctatatctccaacacttttaaccctgcgaagcctgatgctgaggattccgacggcagcattgcctcctgggagctacgggtggaggggaagctcctggatgatcccagcaaacagaagcggaagttctcttctttcttcaagagtttggtcatcgagctggacaaagatctttatggccctgacaaccacctcgttgagtggcatcggacacccacgacccaggagacggacggcttccaggtgaaacggcctggggacctgagtgtgcgctgcacgctgctcctcatgctggactaccagcctccccagttcaaactggatccccgcctagcccggctgctggggctgcacacacagagccgctcagccattgtccaggccctgtggcagtatgtgaagaccaacaggctgcaggactcccatgacaaggaatacatcaatggggacaagtatttccagcagatttttgattgtccccggctgaagttttctgagattccccagcgcctcacagccctgctattgccccctgacccaattgtcatcaaccatgtcatcagcgtggacccttcagaccagaagaagacggcgtgctatgacattgacgtggaggtggaggagccattaaaggggcagatgagcagcttcctcctatccacggccaaccagcaggagatcagtgctctggacagtaagatccatgagacgattgagtccataaaccagctcaagatccagagggacttcatgctaagcttctccagagaccccaaaggctatgtccaagacctgctccgctcccagagccgggacctcaaggtgatgacagatgtagccggcaaccctgaagaggagcgccgggctgagttctaccaccagccctggtcccaggaggccgtcagtcgctacttctactgcaagatccagcagcgcaggcaggagctggagcagtcgctggttgtgcgcaacacctaggagcccaaaaataagcagcacgacggaactttcagccgtgtcccgggccccagcattttgccccgggctccagcatcactcctctgccaccttggggtgtggggctggattaaaagtcattcatctgaca

SEQ ID NO: 187895 - DNA, 820 bp, Homo sapiens
  Payload ID: 16974
  Gene Symbol: SMARCD3
  Gene Name: SWI/SNF related, matrix associated, actin dependent regulator of chromatin, subfamily d, member 3
  ENST ID: ENST00000485592
  CDS Start-End: 1-206
ccaggcacagagccagggccagccggtgcccaccgcccccgcgcggagccgcagtgccaagaggaggaagatggctgacaaaatcctccctcaaaggattcgggagctggtccccgagtcccaggcttacatggacctcttggcatttgagaggaaactggatcaaaccatcatgcggaagcgggtggacatccaggaggctctgaagaggcccatgaaggtgccttagttcggggcaaaagcggaagctgcgactctatatctccaacacttttaaccctgcgaagcctgatgctgaggattccgacggcagcattgcctcctgggagctacgggtggaggggaagctcctggatgatcccagcaaacagaagcggaagttctcttctttcttcaagagtttggtcatcgagctggacaaagatctttatggccctgacaaccacctcgttgagtggcatcggacacccacgacccaggagacggacggcttccaggtgaaacggcctggggacctgagtgtgcgctgcacgctgctcctcatgctggactaccagcctccccagttcaaactggatccccgcctagcccggctgctggggctgcacacacagagccgctcagccattgtccaggccctgtggcagtatgtgaagaccaacaggctgcaggactcccatgacaaggaatacatcaatggggacaagtatttccagcagatttttgattgtccccggctgaagttttctgagattccccagcgcctcacagccctgctattgccccctgacccaattgtcatcaaccatgtcatcaggtg

SEQ ID NO: 187896 - DNA, 2415 bp, Homo sapiens
  Payload ID: 16974
  Gene Symbol: SMARCD3
  Gene Name: SWI/SNF related, matrix associated, actin dependent regulator of chromatin, subfamily d, member 3
  ENST ID: ENST00000469154
  CDS Start-End: 70-291
gatcctcagaatggcccttggtgctgcaggcgcggtgggctccgggcccaggcaccgagggggcactggatgactctccaggtgcaggaccctgccatctatgactccaggtcttcagcacccacccaccgtggtacagtgccaagaggaggaagatggctgacaaaatcctccctcaaaggattcgggagctggtccccgagtcccaggcttacatggacctcttggcatttgagaggaaactggatcaaaccatcatgcggaagcgggtggacatccaggaggctctgaagaggcccatgaaggtgccttagttcggggcaaaagcggaagctgcgactctatatctccaacacttttaaccctgcgaagcctgatgctgaggattccgacggcagcattgcctcctgggagctacgggtggaggggaagctcctggatgatcccagcaaacagaagcggaagttctcttctttcttcaagagtttggtcatcgagctggacaaagatctttatggccctgacaaccacctcgttgagtggcatcggacacccacgacccaggagacggacggcttccaggtgaaacggcctggggacctgagtgtgcgctgcacgctgctcctcatgctggactaccagcctccccagttcaaactggatccccgcctagcccggctgctggggctgcacacacagagccgctcagccattgtccaggccctgtggcagtatgtgaagaccaacaggctgcaggactcccatgacaaggaatacatcaatggggacaagtatttccagcaggtaacctctctcctgaaccctgggatctggggagcaggcggagttctccagcaggggaagtacctctaccaaggtaactaccacccctcccttctagattcctgagtagcagaagcagtacacagtcatggtcttggagccaagagaccgaccaggattctagttcaggccctactgtggattagctctgtgctgcagccaatccatgttagcccccccaagttaggaagacctggaaaccctacaaagccaaccgctttctggaatgtaatattcttggcacttggagttaggatccccaggttctagtcctgagtctggactctgggtaagtgactcagcgattctgaaccttgtttccttatctttgaagtggagtgacaatacctgtcctatctactctcctgggcagttaggaaaatcaaattgctgcaaaagtgattgagcaaaattccaccaaaacagagaatattcttattaatgcatttaaaaataaatacagcagataaacctgaggagtaaaaatagcagttgatatttattgggcacttaccatgtgccaggcactgtcccaagcactttatgtgtattagttcactgacttctcacggcagccctgggagataggtattcttttcatccccactctagagatgaagacactgagccctgaggtgttaacttgctccaggttgcatagtaagtggcagaggcaggactgatacataagcaggctgacccagggcccgcactctcaacccctgccccacactgacccaccccctatcttgtcagccataccggtggctccaccaccagaccagcccaccccaatcccatccccatgcgcactgaggaatcagacttcctctcagcttcttgtggcctttctagaacaaaaggatctacaactgcatgatgatctcttcaagaagagtgatctctctctccccaattgtcctgcttcagatttttgattgtccccggctgaagttttctgagattccccagcgcctcacagccctgctattgccccctgacccaattgtcatcaaccatgtcatcagcgtggacccttcagaccagaagaagacggcgtgctatgacattgacgtggaggtggaggagccattaaaggggcagatgagcagcttcctcctatccacggccaaccagcaggagatcagtgctctggacagtaagatccatgagacgattgagtccataaaccagctcaagatccagagggacttcatgctaagcttctccagagaccccaaaggctatgtccaagacctgctccgctcccagagccgggacctcaaggtgatgacagatgtagccggcaaccctgaagaggagcgccgggctgagttctaccaccagccctggtcccaggaggccgtcagtcgctacttctactgcaagatccagcagcgcaggcaggagctggagcagtcgctggttgtgcgcaacacctaggagcccaaaaataagcagcacgacggaactttcagccgtgtcccgggccccagcattttgccccgggctccagcatcactcctctgccaccttggggtgtggggctggattaaaagtcattcatctgac

SEQ ID NO: 187897 - DNA, 613 bp, Homo sapiens
  Payload ID: 16974
  Gene Symbol: SMARCD3
  Gene Name: SWI/SNF related, matrix associated, actin dependent regulator of chromatin, subfamily d, member 3
  ENST ID: ENST00000491651
  CDS Start-End: 197-613
aaatgcttggcaggctccctgcccgctggctgcttagggaggtgctcccacttcccccgccgttgcctgagctctctagggctccttcactctgcagatcctcagaatggcccttggtgctgcaggcgcggtgggctccgggcccaggcaccgagggggcactggatgactctccaggtgcaggaccctgccatctatgactccaggtcttcagcacccacccaccgtggtacagcgccccgggatgccgtctggagcccggatgccccaccagggggcgcccatgggccccccgggctccccgtacatgggcagccccgccgtgcgacccggcctggcccccgcgggcatggagcccgcccgcaagcgagcagcgcccccgcccgggcagagccaggcacagagccagggccagccggtgcccaccgcccccgcgcggagccgcagtgccaagaggaggaagatggctgacaaaatcctccctcaaaggattcgggagctggtccccgagtcccaggcttacatggacctcttggcatttgagaggaaactggatcaaaccatcatgcggaagcgggtggacatccaggaggctctgaagaggcccatgaag

SEQ ID NO: 187898 - DNA, 5840 bp, Homo sapiens
  Payload ID: 16975
  Gene Symbol: SMARCE1
  Gene Name: SWI/SNF related, matrix associated, actin dependent regulator of chromatin, subfamily e, member 1
  Uniprot ID: Q969G3
  ENST ID: ENST00000348513
  CDS Start-End: 782-2017
tggcttagaaacctgggacgattacaccctaaaagcgcttggaaaaactgcagaactcgtgctgattttcgccaaagctactcccccgccgtgagggcaggaagccctgcgaggcgcctgcgaggacgcaaacgccgcgaagcaagtcctccacgcctccatcccaggtttagtgaagtgtagactctgacccacagcctaaaggaaagcaagaccggagtcggggagggcccctccaggagcgggctcagcgggagtctggccgaactgcttgctgccacagtggttccgcggcctcgcgctgagcgccatccgccgtctcccaccgcggcccccaccgcccctccgcaaggctcggcacctcccgccacttcctcggtcgctgcggcggctccggctcctcacagccgctaaacccaggcctattctgtgttaggtcgggcctcctcggccctcttcgccgtgacgaatcagcgcccggctgggaaagtatcaaaattcggggagttttgaggatccaatgggtcctgaaaaaaatccctgagtgtgctaagcatcaccgcatcttcactagaaggttagtttttctaaagagggtcgggtggggcccggaaaaaaaaaaaaattaagaagagtgtggaaagtgcgagtgcggaagctccggacgcgaggggcggggcgagcgcgggacaaagggaagcgaagccggagctgcgggcgctttttctgcccgcggtgtctcagattcattcttaaggaactgagaacttaatcttccaaaatgtcaaaaagaccatcttatgccccacctcccaccccagctcctgcaacacaaatgcccagcacaccagggtttgtgggatacaatccatacagtcatctcgcctacaacaactacaggctgggagggaacccgggcaccaacagccgggtcacggcatcctctggtatcacgattccaaaacccccaaagccaccagataagccgctgatgccctacatgaggtacagcagaaaggtctgggaccaagtaaaggcttccaaccctgacctaaagttgtgggagattggcaagattattggtggcatgtggcgagatctcactgatgaagaaaaacaagaatatttaaacgaatacgaagcagaaaagatagagtacaatgaatctatgaaggcctatcataattcccccgcgtaccttgcttacataaatgcaaaaagtcgtgcagaagctgctttagaggaagaaagtcgacagagacaatctcgcatggagaaaggagaaccgtacatgagcattcagcctgctgaagatccagatgattatgatgatggcttttcaatgaagcatacagccaccgcccgtttccagagaaaccaccgcctcatcagtgaaattcttagtgagagtgtggtgccagacgttcggtcagttgtcacaacagctagaatgcaggtcctcaaacggcaggtccagtccttaatggttcatcagcgaaaactagaagctgaacttcttcaaatagaggaacgacaccaggagaagaagaggaaattcctggaaagcacagattcatttaacaatgaacttaaaaggttgtgcggtctgaaagtagaagtggatatggagaaaattgcagctgagattgcacaggcagaggaacaggcccgcaaaaggcaggaggaaagggagaaggaggccgcagagcaagctgagcgcagtcagagcagcatcgttcctgaggaagaacaagcagctaacaaaggcgaggagaagaaagacgacgagaacattccgatggagacagaggagacacaccttgaagaaacaacagagagccaacagaatggtgaagaaggcacgtctactcctgaggacaaggagagtgggcaggagggggtcgacagtatggcagaggaaggaaccagtgatagtaacactggctcggagagcaacagtgcaacagtggaggagccaccaacagatcccataccagaagatgagaaaaaagaataagtgttgccttgttttgtgtgttctaaatactttttttaatgaaaaaatgttttttggttttaatggtgttacgtggtttgtgtattaattttttttcttgtccatatcacaccaccaaaggcttttggaccatttagcatcatgagcctaatggctcagtcagtcacctttcttaagtgttgtgaagatggctcttttctttggatcttgtttctagccctcaactgctgaaagcctcagaatttagattaattgagaaaacacccacctcttttagagaattatcctttgatgctgcagaatctactcttacaatgccttcctacagctcactggggtgcttaccaaagccatagctttaaaccttcccagtccccatcagtagcttcctgaaagtctcctctcttgtttacttctgcaaagggtagcttcttaaaaacgtgatcatgtatgagtatgtatttgttcacttacccttttttacttttaatcaatgtcagataccaagagttgtgttaagctgagtgtagtgtgtaactaactacacttggatcttactgatccagaaatagtccccatagttagagtagttacttatgaagtggttattaaagtgaacacagcacatatacattatctatactgctttttgttatgattaatactgggtatgttctggtaaatccatccttattgtatagaaaaaaaattacttttttaccaggttttccaaagacagaatagatcacaaagctcaaggaatttaatattcttgtaatggactagataattcaaactgattagcccattccagaagaaaaacagctgggaattaagttaatccacttgaaattgttttacaataatcagaacatccaaacctcaaggctcaggatcccatagaccagagcccacctttttgataaacttagtaaagtcttggagactagaagcaagatagtttgtgacacataagcttcccaaaaactagaatagatttttactgaatagtggtatatctgatggtatatgtttcttaaaggtccaaatgtaataaaaaaaaaaatgaaaaaaaggtctcagtgtttttaatgcactacatatttgtatgcaagacaagcatccagtttttttctgtaatgcagtgacagtgtggaatgaccactcagccattataaatttgtgtactcagggcccttgtctcacccaactatctctataaactgctgcagtagcttatttgtacaagacacttgtgaaaatcagttttcttacattatagtcattgtcacatatggaagttggtctttgattccaaaagtaaagggaatatgtttctacattaacaggaatatggagaaatctgtaacgtttgaattatctttgaaagaatggctaaatgataaatgttaagtcctgtgcctatatggagaggactctgtaccagcatgagttaatttaagtggattcactgctattcagttcatagcacattagtgactaggaatgtgtgttcagcctcctgagagaggaggggaggaagcttgatactgggtggaaacaactcttgacatctgtttccttgtgtgtcaaagaacgaatttgtatcaaatagatctgttttgagctttggccattatttggctaagaacttcagccatctcatctcagacaaattggacagcctctttgatacattttctagtagtcaaaatggggcagatgtagtttaatatgggtggaaaactgccccagcaagataccaggttatttactgtggtatcgaaagctctaagagaatggaagtggttcttttgcccggctggaaatagcagtgggaagacaagtctatccagaccaagcctgtccatacaacactggcaatcagttgatgagggaattaagtcagatgggagacgtctcaatctgtcgcccaggttggagtgcagtggtggcgatctcagctcactgcaacctccacctcccaggttcaagcaattctctctgcctcagcctctagagcagctgggattacaggctctcgccaccatgcccggttaatttttgtattttttagtagagatggggtttcaccatgttagccaggctgatcttgaactcgtgacctcaggtgatccgcctgcctcagtctcccaaagtgctgggattacaggcgtgagccactgtgcccggcctcagttgggatttgacagctctgaacctcagcaggggaagattgatgtaaaaatccacttggtcagagtgatatatgtagacttgatgtttgagatggttctcagtttagagaatgtgggatatggtagaggtctttgtttttttcccatgtcccaaaaggtgctgggcaagtagcttgaactcgagcctgttttaattataaaatagatcaaactgctctttcttggtgcccttactgctccttgatttttagtgcatttattttgagtatgaatgcataaagtctgagggcctaaattttgttaattttttttaacaaatgggagaggggaatcctcgatagtcacccaattttcctttttttttgagacagtctgactgttgcccaggctggagtgtaatggcgccatctcggctcactgcaacatccagctcctgggtttcagcaattctcctgcctcagcctcctgagtagctgggattacaggcgcccgccaccacgcccggctaatttttgtatttttagtagagacaggattttgccatgtttgccagcctggtctcgaactcttgacctcctgatccaccctcctctgcctcccaaagtgctgggattacaggcgtgagccaccgcgcccagccccatagtcccccaattttctaacagttttaaattctgtaacttctcctgtctgtaaacaaggctgtcttttcaaatggctctcctacaggatgtgataattatctattctataaagccgaggtttggagaggtaaatagctatttcacattaacacaataatgtcaatgccctatggaaaagataaaatacttggactatattttaaaggggaatctggggtcatgcatattgaagtttaactagatccctccagatttttggttttgatcctacacatttagatactagttttggattttagacagttggtgctgacagtgtgaaactcctattgcctgcagttaaattgaagctttggtttctcgtgaacaggcagtgaagctggtattatactttaagtcctcatttcagaaatagtttccctccacccccaagcactaccacacatggtctccccacctggtttcagctagtgcattagttttatcttgttttttaccgctgggcaaaccttgctggaacaacaactgacttcatgatttgcacatttggagggcttaacgtctttgcaaatgaaaaatccactgtacaataacaagctcaaaggaactcggagcctttttagaagaaatcgtgctgaattataatgtggcttactgcaataatgtttctttgatcaggatggaaaggaaaatactgagtttagcagaaaacgatgtctaaatgtatttgtaatgatacaattgtttataaatgttttactattaggttgaaccataagaaattgccagtgtacaatttcatctacaaaatgactggcttaacctaaattctgcattttatactccaagaataagctcttcgtggcagctttctaagtgtgaaatgatggaactttctatttgccagaatgacctacacttctctaatagtttatctcatattgttagccaaacgctgattaaaatgcaaatttcaaacta

SEQ ID NO: 187899 - DNA, 1307 bp, Homo sapiens
  Payload ID: 16975
  Gene Symbol: SMARCE1
  Gene Name: SWI/SNF related, matrix associated, actin dependent regulator of chromatin, subfamily e, member 1
  Uniprot ID: Q969G3
  ENST ID: ENST00000377808
  CDS Start-End: 92-1078
caaagggaagcgaagccggagctgcgggcgctttttctgcccgcggtgtctcagattcattcttaaggaactgagaacttaatcttccaaaatgtcaaaaagaccatcttatgccccacctcccaccccagctcctgcaacagcatcctctggtatcacgattccaaaacccccaaagccaccagataagccgctgatgccctacatgaggtacagcagaaaggtctgggaccaagtaaaggcttccaaccctgacctaaagttgtgggagattggcaagattattggtggcatgtggcgagatctcactgatgaagaaaaacaagaatatttaaacgaatacgaagcagaaaagatagagtacaatgaatctatgaaggcctatcataattcccccgcgtaccttgcttacataaatgcaaaaagtcgtgcagaagctgctttagaggaagaaagtcgacagagacaatctcgcatggagaaaggagaaccgtacatgagcattcagcctgctgaagatccagatgattatgatgatggcttttcaatgaagcatacagccaccgcccgtttccagagaaaccaccgcctcatcagtgaaattcttagtgagagtgtggtgccagacgttcggtcagttgtcacaacagctagaatgcaggtcctcaaacggcaggtccagtccttaatggttcatcagcgaaaactagaagctgaacttcttcaaatagaggaacgacaccaggagaagaagaggaaattcctggaaagcacagattcatttaacaatgaacttaaaaggttgtgcggtctgaaagtagaagtggatatggagaaaattgcagctgagattgcacaggcagaggaacaggcccgcaaaaggcaggaggaaagggagaaggaggccgcagagcaagctgagcgcagtcagagcagcatcgttcctgaggaagaacaagcagctaacaaaggcgaggagaagaaagacgacgagaacattccgatggagacagaaaaaaattgccagctctgtcctagaaaaacccttacttctaggtatactgattttcctgattaaaagcatccctcaagaggagacacaccttgaagaaacaacagagagccaacagaatggtgaagaaggcacgtctactcctgaggacaaggagagtgggcaggagggggtcgacagtatggcagaggaaggaaccagtgatagtaacactggctcggagagcaacagtgcaacagtggaggagccaccaacagatcccataccagaagatgagaaaaaagaataagtgttg

SEQ ID NO: 187900 - DNA, 536 bp, Homo sapiens
  Payload ID: 16975
  Gene Symbol: SMARCE1
  Gene Name: SWI/SNF related, matrix associated, actin dependent regulator of chromatin, subfamily e, member 1
  ENST ID: ENST00000447024
  CDS Start-End: 1-474
cttagtgagagtgtggtgccagacgttcggtcagttgtcacaacagctagaatgcaggtcctcaaacggcaggtccagtccttaatggttcatcagcgaaaactagaagctgaacttcttcaaatagaggaacgacaccaggagaagaagaggaaattcctggaaagcacagattcatttaacaatgaacttaaaaggttgtgcggtctgaaagtagaagtggatatggagaaaattgcagctgagattgcacaggcagaggaacaggcccgcaaaaggcaggaggaaagggagaaggaggccgcagagcaagctgagcgcagtcagagcagcatcgttcctgaggaagaacaagcagctaacaaaggcgaggagaagaaagacgacgagaacattccgatggagacagaaaaaaattgccagctctgtcctagaaaaacccttacttctaggtatactgattttcctgattaaaagcatccctcaaggtaaaaaataataataataacttgtataaataaaacttacataaagta

SEQ ID NO: 187901 - DNA, 1263 bp, Homo sapiens
  Payload ID: 16975
  Gene Symbol: SMARCE1
  Gene Name: SWI/SNF related, matrix associated, actin dependent regulator of chromatin, subfamily e, member 1
  Uniprot ID: Q969G3
  ENST ID: ENST00000400122
  CDS Start-End: 153-1034
caaagggaagcgaagccggagctgcgggcgctttttctgcccgcggtgtctcagattcattcttaaggaactgagaacttaatcttccaaaatgtcaagcatcctctggtatcacgattccaaaacccccaaagccaccagataagccgctgatgccctacatgaggtacagcagaaaggtctgggaccaagtaaaggcttccaaccctgacctaaagttgtgggagattggcaagattattggtggcatgtggcgagatctcactgatgaagaaaaacaagaatatttaaacgaatacgaagcagaaaagatagagtacaatgaatctatgaaggcctatcataattcccccgcgtaccttgcttacataaatgcaaaaagtcgtgcagaagctgctttagaggaagaaagtcgacagagacaatctcgcatggagaaaggagaaccgtacatgagcattcagcctgctgaagatccagatgattatgatgatggcttttcaatgaagcatacagccaccgcccgtttccagagaaaccaccgcctcatcagtgaaattcttagtgagagtgtggtgccagacgttcggtcagttgtcacaacagctagaatgcaggtcctcaaacggcaggtccagtccttaatggttcatcagcgaaaactagaagctgaacttcttcaaatagaggaacgacaccaggagaagaagaggaaattcctggaaagcacagattcatttaacaatgaacttaaaaggttgtgcggtctgaaagtagaagtggatatggagaaaattgcagctgagattgcacaggcagaggaacaggcccgcaaaaggcaggaggaaagggagaaggaggccgcagagcaagctgagcgcagtcagagcagcatcgttcctgaggaagaacaagcagctaacaaaggcgaggagaagaaagacgacgagaacattccgatggagacagaaaaaaattgccagctctgtcctagaaaaacccttacttctaggtatactgattttcctgattaaaagcatccctcaagaggagacacaccttgaagaaacaacagagagccaacagaatggtgaagaaggcacgtctactcctgaggacaaggagagtgggcaggagggggtcgacagtatggcagaggaaggaaccagtgatagtaacactggctcggagagcaacagtgcaacagtggaggagccaccaacagatcccataccagaagatgagaaaaaagaataagtgttg

SEQ ID NO: 187902 - DNA, 1569 bp, Homo sapiens
  Payload ID: 16975
  Gene Symbol: SMARCE1
  Gene Name: SWI/SNF related, matrix associated, actin dependent regulator of chromatin, subfamily e, member 1
  ENST ID: ENST00000431889
  CDS Start-End: 71-1252
aggggcggggcgagcgcgggacaaagggaagcgaagccggagctgcgggcgctttttctgcccgcggcaaatgcccagcacaccagggtttgtgggatacaatccatacagtcatctcgcctacaacaactacaggctgggagggaacccgggcaccaacagccgggtcacggcatcctctggtatcacgattccaaaacccccaaagccaccagataagccgctgatgccctacatgaggtacagcagaaaggtctgggaccaagtaaaggcttccaaccctgacctaaagttgtgggagattggcaagattattggtggcatgtggcgagatctcactgatgaagaaaaacaagaatatttaaacgaatacgaagcagaaaagatagagtacaatgaatctatgaaggcctatcataattcccccgcgtaccttgcttacataaatgcaaaaagtcgtgcagaagctgctttagaggaagaaagtcgacagagacaatctcgcatggagaaaggagaaccgtacatgagcattcagcctgctgaagatccagatgattatgatgatggcttttcaatgaagcatacagccaccgcccgtttccagagaaaccaccgcctcatcagtgaaattcttagtgagagtgtggtgccagacgttcggtcagttgtcacaacagctagaatgcaggtcctcaaacggcaggtccagtccttaatggttcatcagcgaaaactagaagctgaacttcttcaaatagaggaacgacaccaggagaagaagaggaaattcctggaaagcacagattcatttaacaatgaacttaaaaggttgtgcggtctgaaagtagaagtggatatggagaaaattgcagctgagattgcacaggcagaggaacaggcccgcaaaaggcaggaggaaagggagaaggaggccgcagagcaagctgagcgcagtcagagcagcatcgttcctgaggaagaacaagcagctaacaaaggcgaggagaagaaagacgacgagaacattccgatggagacagaggagacacaccttgaagaaacaacagagagccaacagaatggtgaagaaggcacgtctactcctgaggacaaggagagtgggcaggagggggtcgacagtatggcagaggaaggaaccagtgatagtaacactggctcggagagcaacagtgcaacagtggaggagccaccaacagatcccataccagaagatgagaaaaaagaataagtgttgccttgttttgtgtgttctaaatactttttttaatgaaaaaatgttttttggttttaatggtgttacgtggtttgtgtattaattttttttcttgtccatatcacaccaccaaaggcttttggaccatttagcatcatgagcctaatggctcagtcagtcacctttcttaagtgttgtgaagatggctcttttctttggatcttgtttctagccctcaactgctgaaagcctcagaatttagattaattgagaaaacacccacctcttttagagaattatcctttgatgctgcagaatctactcttacaatg

SEQ ID NO: 187903 - DNA, 695 bp, Homo sapiens
  Payload ID: 16975
  Gene Symbol: SMARCE1
  Gene Name: SWI/SNF related, matrix associated, actin dependent regulator of chromatin, subfamily e, member 1
  ENST ID: ENST00000481231
  CDS Start-End: 105-272
ggcgagcgcgggacaaagggaagcgaagccggagctgcgggcgctttttctgcccgcggtgtctcagattcattcttaaggaactgagaacttaatcttccaaaatgtcaaaaagaccatcttatgccccacctcccaccccagctcctgcaacacaaatgcccagcacaccagggtttgtgggatacaatccatacagtcatctcgcctacaacaactacaggctgggagggaacccgggcaccaacagccgggtcacggagatttcctaggaccttgctcttctgtaagcacagttctacccgcctccccattggaaattgaaagcagaaaattggaaagagagttgctgctagaggcatcctctggtatcacgattccaaaacccccaaagccaccagataagccgctgatgccctacatgaggtacagcagaaaggtctgggaccaagtaaaggcttccaaccctgacctaaagttgtgggagattggcaagattattggtggcatgtggcgagatctcactgatgaagaaaaacaagaatatttaaacgaatacgaagcagaaaagatagagtacaatgaatctatgaaggcctatcataattcccccgcgtaccttgcttacataaatgcaaaaagtcgtgcagaagctgctttagaggaagaaagtcgacagagacaatctcgcatgg

SEQ ID NO: 187904 - DNA, 1228 bp, Homo sapiens
  Payload ID: 16975
  Gene Symbol: SMARCE1
  Gene Name: SWI/SNF related, matrix associated, actin dependent regulator of chromatin, subfamily e, member 1
  Uniprot ID: Q969G3
  ENST ID: ENST00000580419
  CDS Start-End: 92-1222
caaagggaagcgaagccggagctgcgggcgctttttctgcccgcggtgtctcagattcattcttaaggaactgagaacttaatcttccaaaatgtcaaaaagaccatcttatgccccacctcccaccccagctcctgcaacagcatcctctggtatcacgattccaaaacccccaaagccaccagataagccgctgatgccctacatgaggtacagcagaaaggtctgggaccaagtaaaggcttccaaccctgacctaaagttgtgggagattggcaagattattggtggcatgtggcgagatctcactgatgaagaaaaacaagaatatttaaacgaatacgaagcagaaaagatagagtacaatgaatctatgaaggcctatcataattcccccgcgtaccttgcttacataaatgcaaaaagtcgtgcagaagctgctttagaggaagaaagtcgacagagacaatctcgcatggagaaaggagaaccgtacatgagcattcagcctgctgaagatccagatgattatgatgatggcttttcaatgaagcatacagccaccgcccgtttccagagaaaccaccgcctcatcagtgaaattcttagtgagagtgtggtgccagacgttcggtcagttgtcacaacagctagaatgcaggtcctcaaacggcaggtccagtccttaatggttcatcagcgaaaactagaagctgaacttcttcaaatagaggaacgacaccaggagaagaagaggaaattcctggaaagcacagattcatttaacaatgaacttaaaaggttgtgcggtctgaaagtagaagtggatatggagaaaattgcagctgagattgcacaggcagaggaacaggcccgcaaaaggcaggaggaaagggagaaggaggccgcagagcaagctgagcgcagtcagagcagcatcgttcctgaggaagaacaagcagctaacaaaggcgaggagaagaaagacgacgagaacattccgatggagacagaggagacacaccttgaagaaacaacagagagccaacagaatggtgaagaaggcacgtctactcctgaggacaaggagagtgggcaggagggggtcgacagtatggcagaggaaggaaccagtgatagtaacactggctcggagagcaacagtgcaacagtggaggagccaccaacagatcccataccagaagatgagaaaaaagaataagtgttg

SEQ ID NO: 187905 - DNA, 449 bp, Homo sapiens
  Payload ID: 16975
  Gene Symbol: SMARCE1
  Gene Name: SWI/SNF related, matrix associated, actin dependent regulator of chromatin, subfamily e, member 1
  ENST ID: ENST00000577721
  CDS Start-End: 145-449
caaagggaagcgaagccggagctgcgggcgctttttctgcccgcggaaagaccatcttatgccccacctcccaccccagctcctgcaacagcatcctctggtatcacgattccaaaacccccaaagccaccagataagccgctgatgccctacatgaggtacagcagaaaggtctgggaccaagtaaaggcttccaaccctgacctaaagttgtgggagattggcaagattattggtggcatgtggcgagatctcactgatgaagaaaaacaagaatatttaaacgaatacgaagcagaaaagatagagtacaatgaatctatgaaggcctatcataattcccccgcgtaccttgcttacataaatgcaaaaagtcgtgcagaagctgctttagaggaagaaagtcgacagagacaatctcgcatggagaaaggagaaccgtacatgag

SEQ ID NO: 187906 - DNA, 1090 bp, Homo sapiens
  Payload ID: 16975
  Gene Symbol: SMARCE1
  Gene Name: SWI/SNF related, matrix associated, actin dependent regulator of chromatin, subfamily e, member 1
  ENST ID: ENST00000478349
  CDS Start-End: 225-1090
gagcgcgggacaaagggaagcgaagccggagctgcgggcgctttttctgcccgcggtgtctcagattcattcttaaggaactgagaacttaatcttccaaaatgtcaaaaagaccatcttatgccccacctcccaccccagctcctgcaacatggctatacaggtggagctgaacaattgagattctgacctcaaagagctaaccatgtacttcagctttggaaatgcaaatgcccagcacaccagggtttgtgggatacaatccatacagtcatctcgcctacaacaactacaggctgggagggaacccgggcaccaacagccgggtcacggcatcctctggtatcacgattccaaaacccccaaagccaccagataagccgctgatgccctacatgaggtacagcagaaaggtctgggaccaagtaaaggcttccaaccctgacctaaagttgtgggagattggcaagattattggtggcatgtggcgagatctcactgatgaagaaaaacaagaatatttaaacgaatacgaagcagaaaagatagagtacaatgaatctatgaaggcctatcataattcccccgcgtaccttgcttacataaatgcaaaaagtcgtgcagaagctgctttagaggaagaaagtcgacagagacaatctcgcatggagaaaggagaaccgtacatgagcattcagcctgctgaagatccagatgattatgatgatggcttttcaatgaagcatacagccaccgcccgtttccagagaaaccaccgcctcatcagtgaaattcttagtgagagtgtggtgccagacgttcggtcagttgtcacaacagctagaatgcaggtcctcaaacggcaggtccagtccttaatggttcatcagcgaaaactagaagctgaacttcttcaaatagaggaacgacaccaggagaagaagaggaaattcctggaaagcacagattcatttaacaatgaacttaaaaggttgtgcggtctgaaagtagaagtggatatggagaaaattgcagctgagattgcacaggcagaggaacaggcccgcaaaaggcaggaggaaagggagaa

SEQ ID NO: 187907 - DNA, 621 bp, Homo sapiens
  Payload ID: 16975
  Gene Symbol: SMARCE1
  Gene Name: SWI/SNF related, matrix associated, actin dependent regulator of chromatin, subfamily e, member 1
  ENST ID: ENST00000582955
  CDS Start-End: 235-621
gaggcctccttgaggcctagcagagcgagggttgggagggagtcccatctggggccccctccttggaggcaaggccagtcccccgaaattggtcaaagcacctgtgaataccccgttttaggggagttgctagtaaagtacattctccaagacaaagagagcgacctcaggaagccgtgggcaaggcagtgtctcagattcattcttaaggaactgagaacttaatcttccaaaatgtcaaaaagaccatcttatgccccacctcccaccccagctcctgcaacacaaatgcccagcacaccagggtttgtgggatacaatccatacagtcatctcgcctacaacaactacaggctgggagggaacccgggcaccaacagccgggtcacggcatcctctggtatcacgattccaaaacccccaaagccaccagataagccgctgatgccctacatgaggtacagcagaaaggtctgggaccaagtaaaggcttccaaccctgacctaaagttgtgggagattggcaagattattggtggcatgtggcgagatctcactgatgaagaaaaacaagaatatttaaacgaatacgaagcagaaaagatagagtacaatgaatct

SEQ ID NO: 187908 - DNA, 2124 bp, Homo sapiens
  Payload ID: 16975
  Gene Symbol: SMARCE1
  Gene Name: SWI/SNF related, matrix associated, actin dependent regulator of chromatin, subfamily e, member 1
  ENST ID: ENST00000474246
  CDS Start-End: 88-321
gggaagcgaagccggagctgcgggcgctttttctgcccgcggtgtctcagattcattcttaaggaactgagaacttaatcttccaaaatgtcaaaaagaccatcttatgccccacctcccaccccagctcctgcaacacaaatgcccagcacaccagggtttgtgggatacaatccatacagtcatctcgcctacaacaactacaggctgggagggaacccgggcaccaacagccgggtcacggtaggagaatcaactattacagcatccggcaaacaactggaattgaccagaaatgccttcagaattaggtctttttgaatcataagcacagccatttaaaaaaaattttttaacctagctttttgagtattttcaacattcgttgtagcatctcacactgaaaaaataaatagtgagatctggaatgtatatagaagaaaagaaaaatccattctgtttggtggttggtagggttaaagccttgagcacttgatgcttatactgtatgtaaacaaacagaatttcttaaggtaaaaatatcctttttgacataaagagtatttttcatttttataaggtgattggcattagtctcaaggattgagtttctagtagaggctggtctttcagacctggctttttcagggctggaaagcttttggctggtacaccagtttgaatcgctacccatagttatttgtcttttggatttagtagttgaccttctaactaagactcatttctctacagtgaaaaagagaaaaacgttttaatgtcacctcaaagaaatgcagagtgaaggttgaatgaaattaatttgaagtatcagactagatatgtacaacgagaagtgcatttctaatccttagtataagagataggatttctgaaacttagcatgtttcatttaagtgatcagcctaagatatcaaaattggatgatacacttcaaatcttttagtttagaatcatcttaaatttcattcaaaaaagtttaagcaccaaaaaatgccaataattataaaaatgacttactaaagataaaaaatccaaaagtcaaatactacattggaatgtagtgttggtgagaatttatacaacccagaatggctgtaaagtttttaatacctggtttttgtttgctgtattcataaataacaagtgccttctattaatgtaacttcaaaaaagccctctcaccctgtagtcaagctggaactgaaagcttgtagctatcaaatgaatgtctatcttgataagcatattgcttagcttgataggttttgtttgtctaaatttttcattgtttctgcataatatgtacttcataagcatatcaagttttatgtgccatgcatatttcatggtatctgaaaaagaattctgacaaagtgtgtgtatgtatgcatttcacaatgcatacaatttttatgtgcatcaatacatgtttttccctggcctaaacatgttgtttcacaagtgtaatggatggcaaggttttcaaatgataaagaacatttcagtttaaacaatgaacggaatcaatcatggatcttaatgttaatgcagcaattttttcacgggcagtaaacaagaatgattgcatttaatagctctatacagtcacctcttgattatctatgttaatggaatagaaatgataactataatattacagtaatttgtcttttggttttgtgtaagtattttgctcttaacttggatgtagctgtgggggattctcagttaaaaaagtgagattgttcgatggagactaggaagagaaagtgtactccctatctgaagtcactcatctgtttcttcccattccttcttggcgaatgttaagaactgaacatttggcgtggacactagctacatagtagattaattatagagagttgttggacatggaaaatttggtgttttggtcctttgtggacatttactttgtattattgtcctcttaacaccaaattgaagtataatcaaactgctatatgaagaagggcctagaaaatgtggaggttttacactacttgccctgctttctatatctagtttaagctgttaggactcaatggctctgattttgaccataataaaagcattttgatttta

SEQ ID NO: 187909 - DNA, 554 bp, Homo sapiens
  Payload ID: 16975
  Gene Symbol: SMARCE1
  Gene Name: SWI/SNF related, matrix associated, actin dependent regulator of chromatin, subfamily e, member 1
  ENST ID: ENST00000580654
  CDS Start-End: 94-554
caaagggaagcgaagccggagctgcgggcgctttttctgcccgcggaaagaccatcttatgccccacctcccaccccagctcctgcaacacaaatgcccagcacaccagggtttgtgggatacaatccatacagtcatctcgcctacaacaactacaggctgggagggaacccgggcaccaacagccgggtcacggcatcctctggtatcacgattccaaaacccccaaagccaccagataagccgctgatgccctacatgaggtacagcagaaaggtctgggaccaagtaaaggcttccaaccctgacctaaagttgtgggagattggcaagattattggtggcatgtggcgagatctcactgatgaagaaaaacaagaatatttaaacgaatacgaagcagaaaagatagagtacaatgaatctatgaaggcctatcataattcccccgcgtaccttgcttacataaatgcaaaaagtcgtgcagaagctgctttagaggaagaaagtcgacagagacaatctcgcatggagaaaggagaaccgtacatgag

SEQ ID NO: 187910 - DNA, 2384 bp, Homo sapiens
  Payload ID: 16975
  Gene Symbol: SMARCE1
  Gene Name: SWI/SNF related, matrix associated, actin dependent regulator of chromatin, subfamily e, member 1
  ENST ID: ENST00000578112
  CDS Start-End: 115-273
cgaggggcggggcgagcgcgggacaaagggaagcgaagccggagctgcgggcgctttttctgcccgcggtgtctcagattcattcttaaggaactgagaacttaatcttccaaaatgtcaacaaatgcccagcacaccagggtttgtgggatacaatccatacagtcatctcgcctacaacaactacaggctgggagggaacccgggcaccaacagccgggtcacggcatcctctggtatcacgattccaaaacccccaaagccaccagataagccgctgatgccctacatgaggtacagcagaaaggtctgggaccaagtaaaggcttccaaccctgacctaaagttgtgggagattggcaagattattggtggcatgtggcgagatctcactgatgaagaaaaacaagaatatttaaacgaatacgaagcagaaaagatagagtacaatgaatctatgaaggcctatcataattcccccgcgtaccttgcttacataaatgcaaaaagtcgtgcagaagctgctttagaggaagaaagtcgacagagacaatctcgcatggagaaaggagaaccgtacatgagcattcagcctgctgaagatccagatgattatgatgatggcttttcaatgaagcatacagccaccgcccgtttccagagaaaccaccgcctcatcagtgaaattcttagtgagagtgtggtgccagacgttcggtcagttgtcacaacagctagaatgcaggtcctcaaacggcaggtccagtccttaatggttcatcagcgaaaactagaagctgaacttcttcaaatagaggaacgacaccaggagaagaagaggaaattcctggaaagcacagattcatttaacaatgaacttaaaaggttgtgcggtctgaaagtagaagtggatatggagaaaattgcagctgagattgcacaggcagaggaacaggcccgcaaaaggcaggaggaaagggagaaggaggccgcagagcaagctgagcgcagtcagagcagcatcgttcctgaggaagaacaagcagctaacaaaggcgaggagaagaaagacgacgagaacattccgatggagacagaggagacacaccttgaagaaacaacagagagccaacagaatggtgaagaaggcacgtctactcctgaggacaaggagagtgggcaggagggggtcgacagtatggcagaggaaggaaccagtgatagtaacactggctcggagagcaacagtgcaacagtggaggagccaccaacagatcccataccagaagatgagaaaaaagaataagtgttgccttgttttgtgtgttctaaatactttttttaatgaaaaaatgttttttggttttaatggtgttacgtggtttgtgtattaattttttttcttgtccatatcacaccaccaaaggcttttggaccatttagcatcatgagcctaatggctcagtcagtcacctttcttaagtgttgtgaagatggctcttttctttggatcttgtttctagccctcaactgctgaaagcctcagaatttagattaattgagaaaacacccacctcttttagagaattatcctttgatgctgcagaatctactcttacaatgccttcctacagctcactggggtgcttaccaaagccatagctttaaaccttcccagtccccatcagtagcttcctgaaagtctcctctcttgtttacttctgcaaagggtagcttcttaaaaacgtgatcatgtatgagtatgtatttgttcacttacccttttttacttttaatcaatgtcagataccaagagttgtgttaagctgagtgtagtgtgtaactaactacacttggatcttactgatccagaaatagtccccatagttagagtagttacttatgaagtggttattaaagtgaacacagcacatatacattatctatactgctttttgttatgattaatactgggtatgttctggtaaatccatccttattgtatagaaaaaaaattacttttttaccaggttttccaaagacagaatagatcacaaagctcaaggaatttaatattcttgtaatggactagataattcaaactgattagcccattccagaagaaaaacagctgggaattaagttaatccacttgaaattgttttacaataatcagaacatccaaacctcaaggctcaggatcccatagaccagagcccacctttttgataaacttagtaaagtcttggagactagaagcaagatagtttgtgacacataagcttcccaaaaactagaatagatttttactgaatagtggtatatctgatggtatatgtttcttaaaggtccaaatgtaataaaaaaaaaaatgaaaaaaaggt

SEQ ID NO: 187911 - DNA, 1184 bp, Homo sapiens
  Payload ID: 16975
  Gene Symbol: SMARCE1
  Gene Name: SWI/SNF related, matrix associated, actin dependent regulator of chromatin, subfamily e, member 1
  Uniprot ID: Q969G3
  ENST ID: ENST00000578044
  CDS Start-End: 153-1178
caaagggaagcgaagccggagctgcgggcgctttttctgcccgcggtgtctcagattcattcttaaggaactgagaacttaatcttccaaaatgtcaagcatcctctggtatcacgattccaaaacccccaaagccaccagataagccgctgatgccctacatgaggtacagcagaaaggtctgggaccaagtaaaggcttccaaccctgacctaaagttgtgggagattggcaagattattggtggcatgtggcgagatctcactgatgaagaaaaacaagaatatttaaacgaatacgaagcagaaaagatagagtacaatgaatctatgaaggcctatcataattcccccgcgtaccttgcttacataaatgcaaaaagtcgtgcagaagctgctttagaggaagaaagtcgacagagacaatctcgcatggagaaaggagaaccgtacatgagcattcagcctgctgaagatccagatgattatgatgatggcttttcaatgaagcatacagccaccgcccgtttccagagaaaccaccgcctcatcagtgaaattcttagtgagagtgtggtgccagacgttcggtcagttgtcacaacagctagaatgcaggtcctcaaacggcaggtccagtccttaatggttcatcagcgaaaactagaagctgaacttcttcaaatagaggaacgacaccaggagaagaagaggaaattcctggaaagcacagattcatttaacaatgaacttaaaaggttgtgcggtctgaaagtagaagtggatatggagaaaattgcagctgagattgcacaggcagaggaacaggcccgcaaaaggcaggaggaaagggagaaggaggccgcagagcaagctgagcgcagtcagagcagcatcgttcctgaggaagaacaagcagctaacaaaggcgaggagaagaaagacgacgagaacattccgatggagacagaggagacacaccttgaagaaacaacagagagccaacagaatggtgaagaaggcacgtctactcctgaggacaaggagagtgggcaggagggggtcgacagtatggcagaggaaggaaccagtgatagtaacactggctcggagagcaacagtgcaacagtggaggagccaccaacagatcccataccagaagatgagaaaaaagaataagtgttg

SEQ ID NO: 187912 - DNA, 631 bp, Homo sapiens
  Payload ID: 16975
  Gene Symbol: SMARCE1
  Gene Name: SWI/SNF related, matrix associated, actin dependent regulator of chromatin, subfamily e, member 1
  ENST ID: ENST00000264640
  CDS Start-End: 1-532
aatgaagcatacagccaccgcccgtttccagagaaaccaccgcctcatcagtgaaattcttagtgagagtgtggtgccagacgttcggtcagttgtcacaacagctagaatgcaggtcctcaaacggcaggtccagtccttaatggttcatcagcgaaaactagaagctgaacttcttcaaatagaggaacgacaccaggagaagaagaggaaattcctggaaagcacagattcatttaacaatgaacttaaaaggttgtgcggtctgaaagtagaagtggatatggagaaaattgcagctgagattgcacaggcagaggaacaggcccgcaaaaggcaggaggaaagggagaaggaggccgcagagcaagctgagcgcagtcagagcagcatcgttcctgaggaagaacaagcagctaacaaaggcgaggagaagaaagacgacgagaacattccgatggagacagaaaaaaattgccagctctgtcctagaaaaacccttacttctaggtatactgattttcctgattaaaagcatccctcaaggaaacagcccagcatgactttaaacaaagtgtctaaaagaccaaccttatattatttctacaactgctttctcctcgtttaatcc

SEQ ID NO: 187913 - DNA, 4912 bp, Homo sapiens
  Payload ID: 16976
  Gene Symbol: SMARCAD1
  Gene Name: SWI/SNF-related, matrix-associated actin-dependent regulator of chromatin, subfamily a, containing DEAD/H box 1
  Uniprot ID: Q9H4L7
  ENST ID: ENST00000354268
  CDS Start-End: 74-3154
gggaacgtgcctgcgcgtgcttggatagttcatttaaagcccccatccctgcaaggtggtgctttctaccaatatgaatcttttcaacctggaccgttttcgctttgagaaaaggaataagattgaggaagcgcccgaagcaacccctcaaccttcccagcctggcccttcttcaccaatttctcttagtgctgaagaggagaatgctgaaggggaagttagcagggcaaacactcctgattcagatataactgaaaaaacagaagattctagtgttccagaaactccagataatgaaagaaaagcaagtatatcatatttcaaaaatcaaagaggaatacagtatattgatttgtcttctgatagtgaagatgtcgtttccccaaattgctccaatacagttcaagagaaaacattcaacaaagatacagtgattatagtttctgagccatctgaagatgaagagtcccaaggccttcctaccatggcacgtagaaatgatgatatttcagaactggaagacctttcggaattggaagaccttaaagatgctaaacttcagactttgaaggaactttttccacaaagaagtgacaatgatttacttaagttgattgaatcaacaagcactatggatggagcaattgctgctgccttgctgatgtttggtgatgcaggtggtgggcccaggaaaagaaaattatcttcttcttcagagccatatgaggaagatgaatttaatgatgatcaatctataaaaaagacaagactggatcatggagaggaatcaaatgagtctgcagaatctagcagtaattgggaaaagcaggaaagtattgtactgaaattgcaaaaggaatttcccaattttgataaacaggaacttagagaagtactcaaggaacatgaatggatgtacacagaagctttagaatctctaaaagtgtttgcagaagaccaagatatgcaatatgtatcacaaagtgaggttccaaatggaaaagaagtttcttcaagaagtcaaaattaccctaaaaatgcaactaaaacaaaactaaaacagaaattttcaatgaaagcacaaaatggctttaacaagaaacgtaaaaaaaatgtttttaatccaaagagagttgttgaagactctgaatatgattcaggttctgatgtcggtagttcactagatgaggactatagtagtggtgaagaagtgatggaggatggctataaaggtaaaattcttcacttccttcaagatgcttcaattggtgaacttactttgattcctcagtgttctcagaaaaaggctcagaagataacagaactccggccctttaatagttgggaggctctgttcacaaagatgtccaaaactaatggcttatcagaagatttgatatggcactgtaaaacactgatccaagaaagagatgtagttataaggcttatgaacaaatgtgaagacatttcaaataaattgaccaaacaagttaccatgcttactggaaatggaggtggatggaacatagaacaaccttccattctaaaccaaagtttgtcactcaagccctatcagaaggttggtttgaattggctggcattggtacataaacatggacttaatggcattttggcagatgaaatgggcctaggaaaaactattcaagccattgcatttctggcatacctctatcaggagggtaataatggtcctcatttgatcgttgttccagcttcaactatagataactggttaagggaagttaatttatggtgccctactttgaaggtcctctgttactatggttctcaagaagaacgtaaacaaattagatttaacattcatagtagatatgaagattacaatgtaattgtgaccacatataactgtgcgatcagcagttctgatgaccgtagtctgtttcgacggctgaaacttaattacgcaatttttgatgagggccatatgctgaagaatatgggctccattcgctaccagcaccttatgacaattaatgcaaataaccgtttgctgctcacaggcacacctgtacagaacaatctgttagaactcatgtcgctgttgaattttgttatgccacacatgtttagtagtagcaccagtgaaatacgaagaatgttttcctctaagacaaaatcagcagatgagcaaagcatatatgaaaaggagagaatagcacatgcaaaacaaattataaagccatttattctcagaagagtaaaagaagaggttctcaagcagttaccccccaagaaagatcgaattgagttgtgtgcaatgtcggagaagcaggagcaactctatttgggtcttttcaacagattgaaaaaatctatcaataacttggaaaaaaacacagaaatgtgcaatgtcatgatgcagttgaggaaaatggccaatcatcctttattacatcgccaatattacacagctgaaaaactcaaggaaatgtctcagcttatgctaaaggaacctacacattgtgaggctaaccctgacctgatctttgaagatatggaagttatgacagacttcgaactacatgtactttgtaaacagtaccgacacattaataactttcagttagacatggacttgattttagattctggaaaatttcgagttttaggatgcatcttgtctgaattgaaacagaagggtgatagagttgtgttatttagccaatttaccatgatgctggatatcttagaggttctattaaaacatcatcagcataggtacctcagattagatggaaagactcagatttctgaaaggattcatctaattgatgagtttaataccgatatggatatctttgtgtttctgctatcaacaaaagctggtggattaggaataaatctgacttcagcaaatgttgttatacttcacgatattgactgtaatccttataatgacaaacaagcagaagatagatgccatagagtaggccagactaaagaagtactagttataaaactaataagccaagggacgattgaagaatccatgctaaaaattaaccaacagaaattgaaactagaacaggatatgactacagtagatgaaggtgatgaagggagtatgccagcagatatagccacattactaaaaacatcaatgggcctgtgaaataagaactgtgaactctcaattgatgaggaaatatcaacttggtgcactcaaggacatttacattatgatgaccatggggtttatgaacatttataactttttataatttccatattacatttctcatagtatggacaactttttgccactaactgaattctccaaatactcacacgtgaaatttcaaaaaagaagccacaaatatgtagttctgaagatgttgaataatcattttacaaagcagttttctgaatggggattagttggtgattgtttgtaacaaatatgctaatgctttagaaatgtcagtatttttgtaattatttctacctccaaatatatatatattgtctttcactggataatgtgtgtagatttttacatgtgccttatttgacaatgcttatgtcttgtttttgcttgtctcatttgaagttcttttttattatgttaaagaatgcagctgtatagattatatagctttcattttattgctatttgaagcagatgttcaccaatgtcagcaagaactcaacctgaatttaaaggtggcattccatatactaacatcccccaggtcctctcaagtacttctgctgaaacaaatttatttggctaggcactaagttgttttccagtgaatagtaactaaagaagcccctaccttgctccatggattaattccttctgttcattttccaactgcactaattgtgcatattactctgcctaatcttgtgcatgttttcattgatttccctctcccggcttttgcttctcttgaaactgttgcccagtcacttctgctccaattctcttcctctctaaatagtagtttattactgccacatctccatgcatcagcaaaatgttggtgacatttttctagcctggcagaacagattacttaaagctatttcatttcaaagcagactgaatgtgacttcatctaaaggcagcattaggtactgcatggaaataggtcattaacttgaaactcttatcaaaatatattttaccagtttccagaatttccagtacaggaccgcctgaagagagagccattgttcaattccaattcagtgtgagtgacaaagtgaaatttagaagtgaagttgtctatttgatatttaactctttattaaatctttctttaaatttctgcctgtcagtctatattgctgtttttattatacatcagtttctttgtataacttgtgagttccatgtgttttgtttttattatgtaaatatcattataaataaacttatttataaatcaaagatttgttaatttttggaaatcatgcttttcaaagcatcctaacttgctaagatgctaggtagtacgaccctctggatttggaaggcaaataaaactcttacagtgattatttagatattaaagactgagaactcacggcttaaccccagtcttgatggtatattgaacagactgaatatattttaccattacagggctaaaaggagtcttcatgtgttaatactacctccttgtacatcactatacccaaatcagttattcaaattgttaggaattttaccttttaaaatctcataatggatatctcatgttttctgtattaatgtattttcaatgataggctgtttctttttttgttgttattgttgttgttgttatatccatacttttatctctaatgaaatgtagttgggttcttcctgtaatgcgctattatgtcttgggcttaataaaaatatttgtgatcataa

SEQ ID NO: 187914 - DNA, 5017 bp, Homo sapiens
  Payload ID: 16976
  Gene Symbol: SMARCAD1
  Gene Name: SWI/SNF-related, matrix-associated actin-dependent regulator of chromatin, subfamily a, containing DEAD/H box 1
  Uniprot ID: Q9H4L7
  ENST ID: ENST00000359052
  CDS Start-End: 175-3261
attacgcgctcttaaggtttctccgtggtgttttggaaggtcccggcacggctaccgtcgccccacgctaggaaattttttttttattttcaacctttgttacatagcactgaggctacaagatcatagttcatttaaagcccccatccctgcaaggtggtgctttctaccaatatgaatcttttcaacctggaccgttttcgctttgagaaaaggaataagattgaggaagcgcccgaagcaacccctcaaccttcccagcctggcccttcttcaccaatttctcttagtgctgaagaggagaatgctgaaggggaagttagcagggcaaacactcctgattcagatataactgaaaaaacagaagattctagtgttccagaaactccagataatgaaagaaaagcaagtatatcatatttcaaaaatcaaagaggaatacagtatattgatttgtcttctgatagtgaagatgtcgtttccccaaattgctccaatacagttcaagagaaaacattcaacaaagatacagtgattatagtttctgagccatctgaagatgaagagtcccaaggccttcctaccatggcacgtagaaatgatgatatttcagaactggaagacctttcggaattggaagaccttaaagatgctaaacttcagactttgaaggaactttttccacaaagaagtgacaatgatttacttaagttgattgaatcaacaagcactatggatggagcaattgctgctgccttgctgatgtttggtgatgcaggtggtgggcccaggaaaagaaaattatcttcttcttcagagccatatgaggaagatgaatttaatgatgatcaatctataaaaaagacaagactggatcatggagaggaatcaaatgagtctgcagaatctagcagtaattgggaaaagcaggaaagtattgtactgaaattgcaaaaggaatttcccaattttgataaacaggaacttagagaagtactcaaggaacatgaatggatgtacacagaagctttagaatctctaaaagtgtttgcagaagaccaagatatgcaatatgtatcacaaagtgaggttccaaatggaaaagaagtttcttcaagaagtcaaaattaccctaaaaatgcaactaaaacaaaactaaaacagaaattttcaatgaaagcacaaaatggctttaacaagaaacgtaaaaaaaatgtttttaatccaaagagagttgttgaagactctgaatatgattcaggttctgatgtcggtagttcactagatgaggactatagtagtggtgaagaagtgatggaggatggctataaaggtaaaattcttcacttccttcaagatgcttcaattggtgaacttactttgattcctcagtgttctcagaaaaaggctcagaagataacagaactccggccctttaatagttgggaggctctgttcacaaagatgtccaaaactaatggcttatcagaagatttgatatggcactgtaaaacactgatccaagaaagagatgtagttataaggcttatgaacaaatgtgaagacatttcaaataaattgaccaaacaagttaccatgcttactggaaatggaggtggatggaacatagaacaaccttccattctaaaccaaagtttgtcactcaagccctatcagaaggttggtttgaattggctggcattggtacataaacatggacttaatggcattttggcagatgaaatgggcctaggaaaaactattcaagccattgcatttctggcatacctctatcaggagggtaataatggtcctcatttgatcgttgttccagcttcaactatagataactggttaagggaagttaatttatggtgccctactttgaaggtcctctgttactatggttctcaagaagaacgtaaacaaattagatttaacattcatagtagatatgaagattacaatgtaattgtgaccacatataactgtgcgatcagcagttctgatgaccgtagtctgtttcgacggctgaaacttaattacgcaatttttgatgagggccatatgctgaagaatatgggctccattcgctaccagcaccttatgacaattaatgcaaataaccgtttgctgctcacaggcacacctgtacagaacaatctgttagaactcatgtcgctgttgaattttgttatgccacacatgtttagtagtagcaccagtgaaatacgaagaatgttttcctctaagacaaaatcagcagatgagcaaagcatatatgaaaaggagagaatagcacatgcaaaacaaattataaagccatttattctcagaagagtaaaagaagaggttctcaagcagttaccccccaagaaagatcgaattgagttgtgtgcaatgtcggagaagcaggagcaactctatttgggtcttttcaacagattgaaaaaatctatcaataacttggtcacagaaaaaaacacagaaatgtgcaatgtcatgatgcagttgaggaaaatggccaatcatcctttattacatcgccaatattacacagctgaaaaactcaaggaaatgtctcagcttatgctaaaggaacctacacattgtgaggctaaccctgacctgatctttgaagatatggaagttatgacagacttcgaactacatgtactttgtaaacagtaccgacacattaataactttcagttagacatggacttgattttagattctggaaaatttcgagttttaggatgcatcttgtctgaattgaaacagaagggtgatagagttgtgttatttagccaatttaccatgatgctggatatcttagaggttctattaaaacatcatcagcataggtacctcagattagatggaaagactcagatttctgaaaggattcatctaattgatgagtttaataccgatatggatatctttgtgtttctgctatcaacaaaagctggtggattaggaataaatctgacttcagcaaatgttgttatacttcacgatattgactgtaatccttataatgacaaacaagcagaagatagatgccatagagtaggccagactaaagaagtactagttataaaactaataagccaagggacgattgaagaatccatgctaaaaattaaccaacagaaattgaaactagaacaggatatgactacagtagatgaaggtgatgaagggagtatgccagcagatatagccacattactaaaaacatcaatgggcctgtgaaataagaactgtgaactctcaattgatgaggaaatatcaacttggtgcactcaaggacatttacattatgatgaccatggggtttatgaacatttataactttttataatttccatattacatttctcatagtatggacaactttttgccactaactgaattctccaaatactcacacgtgaaatttcaaaaaagaagccacaaatatgtagttctgaagatgttgaataatcattttacaaagcagttttctgaatggggattagttggtgattgtttgtaacaaatatgctaatgctttagaaatgtcagtatttttgtaattatttctacctccaaatatatatatattgtctttcactggataatgtgtgtagatttttacatgtgccttatttgacaatgcttatgtcttgtttttgcttgtctcatttgaagttcttttttattatgttaaagaatgcagctgtatagattatatagctttcattttattgctatttgaagcagatgttcaccaatgtcagcaagaactcaacctgaatttaaaggtggcattccatatactaacatcccccaggtcctctcaagtacttctgctgaaacaaatttatttggctaggcactaagttgttttccagtgaatagtaactaaagaagcccctaccttgctccatggattaattccttctgttcattttccaactgcactaattgtgcatattactctgcctaatcttgtgcatgttttcattgatttccctctcccggcttttgcttctcttgaaactgttgcccagtcacttctgctccaattctcttcctctctaaatagtagtttattactgccacatctccatgcatcagcaaaatgttggtgacatttttctagcctggcagaacagattacttaaagctatttcatttcaaagcagactgaatgtgacttcatctaaaggcagcattaggtactgcatggaaataggtcattaacttgaaactcttatcaaaatatattttaccagtttccagaatttccagtacaggaccgcctgaagagagagccattgttcaattccaattcagtgtgagtgacaaagtgaaatttagaagtgaagttgtctatttgatatttaactctttattaaatctttctttaaatttctgcctgtcagtctatattgctgtttttattatacatcagtttctttgtataacttgtgagttccatgtgttttgtttttattatgtaaatatcattataaataaacttatttataaatcaaagatttgttaatttttggaaatcatgcttttcaaagcatcctaacttgctaagatgctaggtagtacgaccctctggatttggaaggcaaataaaactcttacagtgattatttagatattaaagactgagaactcacggcttaaccccagtcttgatggtatattgaacagactgaatatattttaccattacagggctaaaaggagtcttcatgtgttaatactacctccttgtacatcactatacccaaatcagttattcaaattgttaggaattttaccttttaaaatctcataatggatatctcatgttttctgtattaatgtattttcaatgataggctgtttctttttttgttgttattgttgttgttgttatatccatacttttatctctaatgaaatgtagttgggttcttcctgtaatgcgctattatgtcttgggcttaataaaaatatttgtgatcat

SEQ ID NO: 187915 - DNA, 3778 bp, Homo sapiens
  Payload ID: 16976
  Gene Symbol: SMARCAD1
  Gene Name: SWI/SNF-related, matrix-associated actin-dependent regulator of chromatin, subfamily a, containing DEAD/H box 1
  ENST ID: ENST00000394961
  CDS Start-End: 209-421
gcatgagggtcagctcgtggtttcagtaaggaggggcgggcgggggaggcggacgaaggggagtgaaaagcaatggaaaattttaaaagatacccccgtccaccttctaattgttgcggcctaacaatgaagcgcagccataacagtcctgagccactgatagttcatttaaagcccccatccctgcaaggtggtgctttctaccaatatgaatcttttcaacctggaccgttttcgctttgagaaaaggaataagattgaggaagcgcccgaagcaacccctcaaccttcccagcctggcccttcttcaccaatttctcttagtgctgaagaggagaatgctgaaggggaagttagcagggcaaacactcctgattcagatataactgaaaaaacagtgagtttggagggattgaaataatggcaggtgaaagggaagagagatcctactatattttatgaataaagaataaaaatgagtgaagcctgatcctccaagagcaccaggagaaaatgaagattctagtgttccagaaactccagataatgaaagaaaagcaagtatatcatatttcaaaaatcaaagaggaatacagtatattgatttgtcttctgatagtgaagatgtcgtttccccaaattgctccaatacagttcaagagaaaacattcaacaaagatacagtgattatagtttctgagccatctgaagatgaagagtcccaaggccttcctaccatggcacgtagaaatgatgatatttcagaactggaagacctttcggaattggaagaccttaaagatgctaaacttcagactttgaaggaactttttccacaaagaagtgacaatgatttacttaagttgattgaatcaacaagcactatggatggagcaattgctgctgccttgctgatgtttggtgatgcaggtggtgggcccaggaaaagaaaattatcttcttcttcagagccatatgaggaagatgaatttaatgatgatcaatctataaaaaagacaagactggatcatggagaggaatcaaatgagtctgcagaatctagcagtaattgggaaaagcaggaaagtattgtactgaaattgcaaaaggaatttcccaattttgataaacaggaacttagagaagtactcaaggaacatgaatggatgtacacagaagctttagaatctctaaaagtgtttgcagaagaccaagatatgcaatatgtatcacaaagtgaggttccaaatggaaaagaagtttcttcaagaagtcaaaattaccctaaaaatgcaactaaaacaaaactaaaacagaaattttcaatgaaagcacaaaatggctttaacaagaaacgtaaaaaaaatgtttttaatccaaagagagttgttgaagactctgaatatgattcaggttctgatgtcggtagttcactagatgaggactatagtagtggtgaagaagtgatggaggatggctataaaggtaaaattcttcacttccttcaagatgcttcaattggtgaacttactttgattcctcagtgttctcagaaaaaggctcagaagataacagaactccggccctttaatagttgggaggctctgttcacaaagatgtccaaaactaatggcttatcagaagatttgatatggcactgtaaaacactgatccaagaaagagatgtagttataaggcttatgaacaaatgtgaagacatttcaaataaattgaccaaacaagttaccatgcttactggaaatggaggtggatggaacatagaacaaccttccattctaaaccaaagtttgtcactcaagccctatcagaaggttggtttgaattggctggcattggtacataaacatggacttaatggcattttggcagatgaaatgggcctaggaaaaactattcaagccattgcatttctggcatacctctatcaggagggtaataatggtcctcatttgatcgttgttccagcttcaactatagataactggttaagggaagttaatttatggtgccctactttgaaggtcctctgttactatggttctcaagaagaacgtaaacaaattagatttaacattcatagtagatatgaagattacaatgtaattgtgaccacatataactgtgcgatcagcagttctgatgaccgtagtctgtttcgacggctgaaacttaattacgcaatttttgatgagggccatatgctgaagaatatgggctccattcgctaccagcaccttatgacaattaatgcaaataaccgtttgctgctcacaggcacacctgtacagaacaatctgttagaactcatgtcgctgttgaattttgttatgccacacatgtttagtagtagcaccagtgaaatacgaagaatgttttcctctaagacaaaatcagcagatgagcaaagcatatatgaaaaggagagaatagcacatgcaaaacaaattataaagccatttattctcagaagagtaaaagaagaggttctcaagcagttaccccccaagaaagatcgaattgagttgtgtgcaatgtcggagaagcaggagcaactctatttgggtcttttcaacagattgaaaaaatctatcaataacttggtcacagaaaaaaacacagaaatgtgcaatgtcatgatgcagttgaggaaaatggccaatcatcctttattacatcgccaatattacacagctgaaaaactcaaggaaatgtctcagcttatgctaaaggaacctacacattgtgaggctaaccctgacctgatctttgaagatatggaagttatgacagacttcgaactacatgtactttgtaaacagtaccgacacattaataactttcagttagacatggacttgattttagattctggaaaatttcgagttttaggatgcatcttgtctgaattgaaacagaagggtgatagagttgtgttatttagccaatttaccatgatgctggatatcttagaggttctattaaaacatcatcagcataggtacctcagattagatggaaagactcagatttctgaaaggattcatctaattgatgagtttaataccgatatggatatctttgtgtttctgctatcaacaaaagctggtggattaggaataaatctgacttcagcaaatgttgttatacttcacgatattgactgtaatccttataatgacaaacaagcagaagatagatgccatagagtaggccagactaaagaagtactagttataaaactaataagccaagggacgattgaagaatccatgctaaaaattaaccaacagaaattgaaactagaacaggatatgactacagtagatgaaggtgatgaagggagtatgccagcagatatagccacattactaaaaacatcaatgggcctgtgaaataagaactgtgaactctcaattgatgaggaaatatcaacttggtgcactcaaggacatttacattatgatgaccatggggtttatgaacatttataactttttataatttccatattacatttctcatagtatggacaactttttgccactaactgaattctccaaatactcacacgtgaaatttcaaaaaagaagccacaaatatgtagttctgaagatgttgaataatcattttacaaagcagttttctgaatggggattagttggtgattgtttgtaacaaatatgctaatgctttagaaatgtcagtatttttgtaattatttctacctccaaatatatatatattgtctttcactgga

SEQ ID NO: 187916 - DNA, 4649 bp, Homo sapiens
  Payload ID: 16976
  Gene Symbol: SMARCAD1
  Gene Name: SWI/SNF-related, matrix-associated actin-dependent regulator of chromatin, subfamily a, containing DEAD/H box 1
  Uniprot ID: Q9H4L7
  ENST ID: ENST00000457823
  CDS Start-End: 276-3362
ctctcagctgggatcgcgccgcgtcaacttccgggcggatgcccgccagcacggcctccgccgctccccttctttggcccctttgtgtccccgcagtgtcgaggcgcgggccctggcaggtcctttctcgaggcagggggcacggtagcacagggagcttctctttgtgggcgggcgcgaggcccgctagggggttatactggggaacgtgcctgcgcgtgcttggatagttcatttaaagcccccatccctgcaaggtggtgctttctaccaatatgaatcttttcaacctggaccgttttcgctttgagaaaaggaataagattgaggaagcgcccgaagcaacccctcaaccttcccagcctggcccttcttcaccaatttctcttagtgctgaagaggagaatgctgaaggggaagttagcagggcaaacactcctgattcagatataactgaaaaaacagaagattctagtgttccagaaactccagataatgaaagaaaagcaagtatatcatatttcaaaaatcaaagaggaatacagtatattgatttgtcttctgatagtgaagatgtcgtttccccaaattgctccaatacagttcaagagaaaacattcaacaaagatacagtgattatagtttctgagccatctgaagatgaagagtcccaaggccttcctaccatggcacgtagaaatgatgatatttcagaactggaagacctttcggaattggaagaccttaaagatgctaaacttcagactttgaaggaactttttccacaaagaagtgacaatgatttacttaagttgattgaatcaacaagcactatggatggagcaattgctgctgccttgctgatgtttggtgatgcaggtggtgggcccaggaaaagaaaattatcttcttcttcagagccatatgaggaagatgaatttaatgatgatcaatctataaaaaagacaagactggatcatggagaggaatcaaatgagtctgcagaatctagcagtaattgggaaaagcaggaaagtattgtactgaaattgcaaaaggaatttcccaattttgataaacaggaacttagagaagtactcaaggaacatgaatggatgtacacagaagctttagaatctctaaaagtgtttgcagaagaccaagatatgcaatatgtatcacaaagtgaggttccaaatggaaaagaagtttcttcaagaagtcaaaattaccctaaaaatgcaactaaaacaaaactaaaacagaaattttcaatgaaagcacaaaatggctttaacaagaaacgtaaaaaaaatgtttttaatccaaagagagttgttgaagactctgaatatgattcaggttctgatgtcggtagttcactagatgaggactatagtagtggtgaagaagtgatggaggatggctataaaggtaaaattcttcacttccttcaagatgcttcaattggtgaacttactttgattcctcagtgttctcagaaaaaggctcagaagataacagaactccggccctttaatagttgggaggctctgttcacaaagatgtccaaaactaatggcttatcagaagatttgatatggcactgtaaaacactgatccaagaaagagatgtagttataaggcttatgaacaaatgtgaagacatttcaaataaattgaccaaacaagttaccatgcttactggaaatggaggtggatggaacatagaacaaccttccattctaaaccaaagtttgtcactcaagccctatcagaaggttggtttgaattggctggcattggtacataaacatggacttaatggcattttggcagatgaaatgggcctaggaaaaactattcaagccattgcatttctggcatacctctatcaggagggtaataatggtcctcatttgatcgttgttccagcttcaactatagataactggttaagggaagttaatttatggtgccctactttgaaggtcctctgttactatggttctcaagaagaacgtaaacaaattagatttaacattcatagtagatatgaagattacaatgtaattgtgaccacatataactgtgcgatcagcagttctgatgaccgtagtctgtttcgacggctgaaacttaattacgcaatttttgatgagggccatatgctgaagaatatgggctccattcgctaccagcaccttatgacaattaatgcaaataaccgtttgctgctcacaggcacacctgtacagaacaatctgttagaactcatgtcgctgttgaattttgttatgccacacatgtttagtagtagcaccagtgaaatacgaagaatgttttcctctaagacaaaatcagcagatgagcaaagcatatatgaaaaggagagaatagcacatgcaaaacaaattataaagccatttattctcagaagagtaaaagaagaggttctcaagcagttaccccccaagaaagatcgaattgagttgtgtgcaatgtcggagaagcaggagcaactctatttgggtcttttcaacagattgaaaaaatctatcaataacttggtcacagaaaaaaacacagaaatgtgcaatgtcatgatgcagttgaggaaaatggccaatcatcctttattacatcgccaatattacacagctgaaaaactcaaggaaatgtctcagcttatgctaaaggaacctacacattgtgaggctaaccctgacctgatctttgaagatatggaagttatgacagacttcgaactacatgtactttgtaaacagtaccgacacattaataactttcagttagacatggacttgattttagattctggaaaatttcgagttttaggatgcatcttgtctgaattgaaacagaagggtgatagagttgtgttatttagccaatttaccatgatgctggatatcttagaggttctattaaaacatcatcagcataggtacctcagattagatggaaagactcagatttctgaaaggattcatctaattgatgagtttaataccgatatggatatctttgtgtttctgctatcaacaaaagctggtggattaggaataaatctgacttcagcaaatgttgttatacttcacgatattgactgtaatccttataatgacaaacaagcagaagatagatgccatagagtaggccagactaaagaagtactagttataaaactaataagccaagggacgattgaagaatccatgctaaaaattaaccaacagaaattgaaactagaacaggatatgactacagtagatgaaggtgatgaagggagtatgccagcagatatagccacattactaaaaacatcaatgggcctgtgaaataagaactgtgaactctcaattgatgaggaaatatcaacttggtgcactcaaggacatttacattatgatgaccatggggtttatgaacatttataactttttataatttccatattacatttctcatagtatggacaactttttgccactaactgaattctccaaatactcacacgtgaaatttcaaaaaagaagccacaaatatgtagttctgaagatgttgaataatcattttacaaagcagttttctgaatggggattagttggtgattgtttgtaacaaatatgctaatgctttagaaatgtcagtatttttgtaattatttctacctccaaatatatatatattgtctttcactggataatgtgtgtagatttttacatgtgccttatttgacaatgcttatgtcttgtttttgcttgtctcatttgaagttcttttttattatgttaaagaatgcagctgtatagattatatagctttcattttattgctatttgaagcagatgttcaccaatgtcagcaagaactcaacctgaatttaaaggtggcattccatatactaacatcccccaggtcctctcaagtacttctgctgaaacaaatttatttggctaggcactaagttgttttccagtgaatagtaactaaagaagcccctaccttgctccatggattaattccttctgttcattttccaactgcactaattgtgcatattactctgcctaatcttgtgcatgttttcattgatttccctctcccggcttttgcttctcttgaaactgttgcccagtcacttctgctccaattctcttcctctctaaatagtagtttattactgccacatctccatgcatcagcaaaatgttggtgacatttttctagcctggcagaacagattacttaaagctatttcatttcaaagcagactgaatgtgacttcatctaaaggcagcattaggtactgcatggaaataggtcattaacttgaaactcttatcaaaatatattttaccagtttccagaatttccagtacaggaccgcctgaagagagagccattgttcaattccaattcagtgtgagtgacaaagtgaaatttagaagtgaagttgtctatttgatatttaactctttattaaatctttctttaaatttctgcctgtcagtctatattgctgtttttattatacatcagtttctttgtataacttgtgagttccatgtgttttgtttttattatgtaaatatcattataaataaacttatttataaatcaaa

SEQ ID NO: 187917 - DNA, 2348 bp, Homo sapiens
  Payload ID: 16976
  Gene Symbol: SMARCAD1
  Gene Name: SWI/SNF-related, matrix-associated actin-dependent regulator of chromatin, subfamily a, containing DEAD/H box 1
  Uniprot ID: Q9H4L7
  ENST ID: ENST00000509418
  CDS Start-End: 388-2178
aagaaattagagcttacatttaggaaggagttgtttgctagcctgttctgatctgttactgctgagacaccatgcagaaagcaagaatgtggcagaaattttactacaactacttgaagagcaatagcaacggccaggggagctccatgattcaaaatgccagcctaagtgttttatgcttcaccacaaaagaagcaattgtttattttctttttttcttctaaaagtaacagctcagtctctaacatgtttttgttggttaagcaacgtggccattttatggagtgtagcaggctgcagcgtttttaattggaaagatagaaaaatttctggaagcctataattcaagcgttaggtgaagggaaggcataagcactgttcacaaagatgtccaaaactaatggcttatcagaagatttgatatggcactgtaaaacactgatccaagaaagagatgtagttataaggcttatgaacaaatgtgaagacatttcaaataaattgaccaaacaagttaccatgcttactggaaatggaggtggatggaacatagaacaaccttccattctaaaccaaagtttgtcactcaagccctatcagaaggttggtttgaattggctggcattggtacataaacatggacttaatggcattttggcagatgaaatgggcctaggaaaaactattcaagccattgcatttctggcatacctctatcaggagggtaataatggtcctcatttgatcgttgttccagcttcaactatagataactggttaagggaagttaatttatggtgccctactttgaaggtcctctgttactatggttctcaagaagaacgtaaacaaattagatttaacattcatagtagatatgaagattacaatgtaattgtgaccacatataactgtgcgatcagcagttctgatgaccgtagtctgtttcgacggctgaaacttaattacgcaatttttgatgagggccatatgctgaagaatatgggctccattcgctaccagcaccttatgacaattaatgcaaataaccgtttgctgctcacaggcacacctgtacagaacaatctgttagaactcatgtcgctgttgaattttgttatgccacacatgtttagtagtagcaccagtgaaatacgaagaatgttttcctctaagacaaaatcagcagatgagcaaagcatatatgaaaaggagagaatagcacatgcaaaacaaattataaagccatttattctcagaagagtaaaagaagaggttctcaagcagttaccccccaagaaagatcgaattgagttgtgtgcaatgtcggagaagcaggagcaactctatttgggtcttttcaacagattgaaaaaatctatcaataacttggaaaaaaacacagaaatgtgcaatgtcatgatgcagttgaggaaaatggccaatcatcctttattacatcgccaatattacacagctgaaaaactcaaggaaatgtctcagcttatgctaaaggaacctacacattgtgaggctaaccctgacctgatctttgaagatatggaagttatgacagacttcgaactacatgtactttgtaaacagtaccgacacattaataactttcagttagacatggacttgattttagattctggaaaatttcgagttttaggatgcatcttgtctgaattgaaacagaagggtgatagagttgtgttatttagccaatttaccatgatgctggatatcttagaggttctattaaaacatcatcagcataggtacctcagattagatggaaagactcagatttctgaaaggattcatctaattgatgagtttaataccgatatggatatctttgtgtttctgctatcaacaaaagctggtggattaggaataaatctgacttcagcaaatgttgttatacttcacgatattgactgtaatccttataatgacaaacaagcagaagatagatgccatagagtaggccagactaaagaagtactagttataaaactaataagccaagggacgattgaagaatccatgctaaaaattaaccaacagaaattgaaactagaacaggatatgactacagtagatgaaggtgatgaagggagtatgccagcagatatagccacattactaaaaacatcaatgggcctgtgaaataagaactgtgaactctcaattgatgaggaaatatcaacttggtgcactcaaggacatttacattatgatgaccatggggtttatgaacatttataactttttataatttccatattacatttctcatagtatggacaactttttgccactaactgaattctccaaat

SEQ ID NO: 187918 - DNA, 2409 bp, Homo sapiens
  Payload ID: 16976
  Gene Symbol: SMARCAD1
  Gene Name: SWI/SNF-related, matrix-associated actin-dependent regulator of chromatin, subfamily a, containing DEAD/H box 1
  ENST ID: ENST00000510105
  CDS Start-End: 255-989
cgtcaacttccgggcggatgcccgccagcacggcctccgccgctccccttctttggcccctttgtgtccccgcagtgtcgaggcgcgggccctggcaggtcctttctcgaggcagggggcacggtagcacagggagcttctctttgtgggcgggcgcgaggcccgctagggggttatactggggaacgtgcctgcgcgtgcttggatagttcatttaaagcccccatccctgcaaggtggtgctttctaccaatatgaatcttttcaacctggaccgttttcgctttgagaaaaggaataagattgaggaagcgcccgaagcaacccctcaaccttcccagcctggcccttcttcaccaatttctcttagtgctgaagaggagaatgctgaaggggaagttagcagggcaaacactcctgattcagatataactgaaaaaacagaagattctagtgttccagaaactccagataatgaaagaaaagcaagtatatcatatttcaaaaatcaaagaggaatacagtatattgatttgtcttctgatagtgaagatgtcgtttccccaaattgctccaatacagttcaagagaaaacattcaacaaagatacagtgattatagtttctgagccatctgaagatgaagagtcccaaggccttcctaccatggcacgtagaaatgatgatatttcagaactggaagacctttcggaattggaagaccttaaagatgctaaacttcagactttgaaggaactttttccacaaagaagtgacaatgatttacttaagttgattgaatcaacaagcactatggatggagcaattgctgctgccttgctgatgtttggtgatgcaggtggtgggcccaggaaaagaaaattatcttcttcttcagagccatatgaggaagatgaatttaatgatgatcaatctataaaaaagacaagactggatcattgtgcctgggctgtaaaggtggcagtatgaattttgaagattttgaaatggtttctccagatgggtttcaccaggagaggaatcaaatgagtctgcagaatctagcagtaattgggaaaagcaggaaagtattgtactgaaattgcaaaaggaatttcccaattttgataaacaggaacttagagaagtactcaaggaacatgaatggatgtacacagaagctttagaatctctaaaagtgtttgcagaagaccaagatatgcaatatgtatcacaaagtgaggttccaaatggaaaagaagtttcttcaagaagtcaaaattaccctaaaaatgcaactaaaacaaaactaaaacagaaattttcaatgaaagcacaaaatggctttaacaagaaacgtaaaaaaaatgtttttaatccaaagagagttgttgaagactctgaatatgattcaggttctgatgtcggtagttcactagatgaggactatagtagtggtgaagaagtgatggaggatggctataaaggtaaaattcttcacttccttcaagatgcttcaattggtgaacttactttgattcctcagtgttctcagaaaaaggctcagaagataacagaactccggccctttaatagttgggaggctctgttcacaaagatgtccaaaactaatggcttatcagaagatttgatatggcactgtaaaacactgatccaagaaagagatgtagttataaggcttatgaacaaatgtgaagacatttcaaataaattgaccaaacaagttaccatgcttactggaaatggaggtggatggaacatagaacaaccttccattctaaaccaaagtttgtcactcaagccctatcagaaggttggtttgaattggctggcattggtacataaacatggacttaatggcattttggcagatgaaatgggcctaggaaaaactattcaagccattgcatttctggcatacctctatcaggagggtaataatggtcctcatttgatcgttgttccagcttcaactatagataactggttaagggaagttaatttatggtgccctactttgaaggtcctctgttactatggttctcaagaagaacgtaaacaaattagatttaacattcatagtagatatgaagattacaatgtaattgtgaccacatataactgtgcgatcagcagttctgatgaccgtagtctgtttcgacggctgaaacttaattacgcaatttttgatgagggccatatgctgaagaatatgggctccattcgctaccagcaccttatgacaattaatgcaaataaccgtttgctgctcacaggcacacctgtacagaacaatctgttagaactcatgtcgctgttgaattttgttatgccacacatgtttagtagtagcaccagtgaaatacgaagaatgttttcctctaagaca

SEQ ID NO: 187919 - DNA, 980 bp, Homo sapiens
  Payload ID: 16977
  Gene Symbol: SWI5
  Gene Name: SWI5 homologous recombination repair protein
  Uniprot ID: Q1ZZU3
  ENST ID: ENST00000320188
  CDS Start-End: 1-708
atgcagcggcgtggccagagggacctgtggcgtcacaacaaaagctgcgcacgcaaccgctgtccccgcccacctcgggagaggggcggggccggctttccttgggtgcgcgcgcagctttctgtgcgccagttcacactccgggtcagagttcctggcccggtgcacctgagaggtcgctctccgactcccgcgctggaccctcttgcgccattgaaccccctgatccgggggcctcggaccccagggctcaggagatggatccagtccctggcgctcctacttcccaactgctcctcctcccgcatccccacagtaccccgtcctcacagcgggctgtgggtccaatcagactttcccctcggattcctctctaggactgaaccaagacttacccgaagttgccgcggggccttccgatcccctaggccattgcccaagtctggccaggctgatgggaccagcgaggagtctctgcaccttgacattcagaaactgaaggagaagagggacatgctggacaaggagatctcccagttcgtatctgaaggctacagtgtggatgaactggaggaccacattacccagcttcacgagtacaatgacatcaaggatgtggggcagatgctgatgggcaaactagctgtgatccgaggtgtcaccaccaaagagttgtatccagagtttgggctggacatgaatgactgagcaggctcatcgccccttgtccacagctcccagggacagaagggtgtggacatgataaacactgagagcccaaccagcacacctacagagtttccagcgagacaatgccagaagcacttttctagagagcccaagcccaatcaggaggaggctagagaagaggcgggcagggaggaaggggcgttcccagctccaaggttcctgaaatgtcgcagtgatacttgtgtaggggtacatgtactttatttgtcaataaacgtatctgtacactg

SEQ ID NO: 187920 - DNA, 699 bp, Homo sapiens
  Payload ID: 16977
  Gene Symbol: SWI5
  Gene Name: SWI5 homologous recombination repair protein
  ENST ID: ENST00000372898
  CDS Start-End: 1-437
ggtccttggagacccgagaccaaagaaccccgggaggtccggtttggggcggcaggaggactgaaccaagacttacccgaagttgccgcggggccttccgatcccctttccttccagcaacctttgagaagacgctttactgtccccatgttgagaggccattgcccaagtctggccaggctgatgggaccagcgaggagtctctgcaccttgacattcagaaactgaaggagaagagggacatgctggacaaggagatctcccagttcgtatctgaaggctacagtgtggatgaactggaggaccacattacccagcttcacgagtacaatgacatcaaggatgtggggcagatgctgatgggcaaactagctgtgatccgaggtgtcaccaccaaagagttgtatccagagtttgggctggacatgaatgactgagcaggctcatcgccccttgtccacagctcccagggacagaagggtgtggacatgataaacactgagagcccaaccagcacacctacagagtttccagcgagacaatgccagaagcacttttctagagagcccaagcccaatcaggaggaggctagagaagaggcgggcagggaggaaggggcgttcccagctccaaggttcctgaaatgtcgcagtgatacttgtgtaggggtacatgtactttatttgtcaataaacgtat

SEQ ID NO: 187921 - DNA, 763 bp, Homo sapiens
  Payload ID: 16977
  Gene Symbol: SWI5
  Gene Name: SWI5 homologous recombination repair protein
  ENST ID: ENST00000418976
  CDS Start-End: 98-490
tccttgggtgcgcgcgcagctttctgtgcgccagttcacactccgggtcagagttcctggcccggtgcacctgagaggtcgctctccgactcccgcgctggaccctcttgcgccattgaaccccctgatccgggggcctcggaccccagggctcaggaggactgaaccaagacttacccgaagttgccgcggggccttccgatcccctaggccattgcccaagtctggccaggctgatgggaccagcgaggagtctctgcaccttgacattcagaaactgaaggagaagagggacatgctggacaaggagatctcccagttcgtatctgaaggctacagtgtggatgaactggaggaccacattacccagcttcacgagtacaatgacatcaaggatgtggggcagatgctgatgggcaaactagctgtgatccgaggtgtcaccaccaaagagttgtatccagagtttgggctggacatgaatgactgagcaggctcatcgccccttgtccacagctcccagggacagaagggtgtggacatgataaacactgagagcccaaccagcacacctacagagtttccagcgagacaatgccagaagcacttttctagagagcccaagcccaatcaggaggaggctagagaagaggcgggcagggaggaaggggcgttcccagctccaaggttcctgaaatgtcgcagtgatacttgtgtaggggtacatgtactttatttgtcaataaacgtatctgtacactga

SEQ ID NO: 187922 - DNA, 466 bp, Homo sapiens
  Payload ID: 16977
  Gene Symbol: SWI5
  Gene Name: SWI5 homologous recombination repair protein
  ENST ID: ENST00000495313
  CDS Start-End: 30-449
cagcgcgacgtccaagtcgccgctccgcgatgggggaggggaccgcagggccaggacccaggtccttggagacccgagaccaaagaaccccgggaggtccggtttggggcggcaggaggactgaaccaagacttacccgaagttgccgcggggccttccgatcccctaggccattgcccaagtctggccaggctgatgggaccagcgaggagtctctgcaccttgacattcagaaactgaaggagaagagggacatgctggacaaggagatctcccagttcgtatctgaaggctacagtgtggatgaactggaggaccacattacccagcttcacgagtacaatgacatcaaggatgtggggcagatgctgatgggcaaactagctgtgatccgaggtgtcaccaccaaagagttgtatccagagtttgggctggacatgaatgactgagcaggctcatcgcccct

SEQ ID NO: 187923 - DNA, 906 bp, Homo sapiens
  Payload ID: 16977
  Gene Symbol: SWI5
  Gene Name: SWI5 homologous recombination repair protein
  ENST ID: ENST00000608796
  CDS Start-End: 120-632
gggagaggggcggggccggctttccttgggtgcgcgcgcagctttctgtgcgccagttcacactccgggtcagagttcctggcccggtgcacctgagaggtcgctctccgactcccgcgctggaccctcttgcgccattgaaccccctgatccgggggcctcggaccccagggctcaggagatggatccagtccctggcgctcctacttcccaactgctcctcctcccgcatccccacagtaccccgtcctcacagcgggctgtgggtccaatcagactttcccctcggattcctctctaggactgaaccaagacttacccgaagttgccgcggggccttccgatcccctaggccattgcccaagtctggccaggctgatgggaccagcgaggagtctctgcaccttgacattcagaaactgaaggagaagagggacatgctggacaaggagatctcccagttcgtatctgaaggctacagtgtggatgaactggaggaccacattacccagcttcacgagtacaatgacatcaaggatgtggggcagatgctgatgggcaaactagctgtgatccgaggtgtcaccaccaaagagttgtatccagagtttgggctggacatgaatgactgagcaggctcatcgccccttgtccacagctcccagggacagaagggtgtggacatgataaacactgagagcccaaccagcacacctacagagtttccagcgagacaatgccagaagcacttttctagagagcccaagcccaatcaggaggaggctagagaagaggcgggcagggaggaaggggcgttcccagctccaaggttcctgaaatgtcgcagtgatacttgtgtaggggtacatgtactttatttgtcaataaacgtatctgtacactgat

SEQ ID NO: 187924 - DNA, 1048 bp, Homo sapiens
  Payload ID: 16977
  Gene Symbol: SWI5
  Gene Name: SWI5 homologous recombination repair protein
  ENST ID: ENST00000419867
  CDS Start-End: 100-555
tttccttgggtgcgcgcgcagctttctgtgcgccagttcacactccgggtcagagttcctggcccggtgcacctgagaggtcgctctccgactcccgcgctggaccctcttgcgccattgaaccccctgatccgggggcctcggaccccagggctcaggagatggatccagtccctggcgctcctacttcccaactgctcctcctcccgcatccccacagtaccccgtcctcacagcgggctgtgggtccaatcagactttcccctcggattcctctctaggactgaaccaagacttacccgaagttgccgcggggccttccgatcccctaggccattgcccaagtctggccaggctgatgggaccagcgaggagtctctgcaccttgacattcagaaactgaaggagaagagggacatgctggacaaggagatctcccagttcgtatctgaaggctacagtgtggatgaactggaggaccacattacccagcttcacgagtacaatgacatcaaggatgtggggcagatgctgatgggcaaactaggtgagtagttgggactccagagccacaagcaggcatcatagggtgtcgtctcgcctaggggtgttgggttttgctcctgggcctcccagcttgccaaccgtcacaccctcagcagttggcctgctcctaggctgccccagcccctctcctgaccagcctctggtctccctggccacctaggtttgttcctcaagtacagaacctgctttggagccgcagccaggtttgagcggggcttgcccatctgccagactgagaactcagggtctccccagtcttctgggacctactcagagtgatcaagataccgtccatgcctcaagtggctagcttgctaaagaggctgcaagtgcaagggtgaccctttgtgtcttaaggaagtattttgtttcctccctgaacaaaatcttgctatctagagggctttagccgaggcaccaacacctgtatgtcatgctggctaggacagcctaccttggaggtgaggaaatgtgcaggcgg

SEQ ID NO: 187925 - DNA, 1438 bp, Homo sapiens
  Payload ID: 16978
  Gene Symbol: SFR1
  Gene Name: SWI5-dependent homologous recombination repair protein 1
  Uniprot ID: Q86XK3
  ENST ID: ENST00000369727
  CDS Start-End: 20-757
ttttttgctctcgctgggaatggcggagggagagaaaaaccaagatttcactttcaagatggaaagtccgtcagactcagctgtggttttacctagcactcctcaggcctctgcgaatccatcatctccctatacaaatagttcccgaaaacaacctatgagtgcaacacttagagaaagattaaggaaaacaagattttcatttaattcctcttacaatgtggtgaaacgtcttaaagtagagagtgaagaaaatgatcagaccttttcagagaaaccagcatcttccacagaggaaaactgtttggaatttcaagaaagttttaaacatatagacagtgaatttgaagaaaatacaaatttgaaaaatactttgaagaatctcaatgtctgtgaatctcagtcacttgattctggatcatgcagtgctctccaaaatgagtttgtgagtgagaagcttcctaaacaaagattaaacgctgaaaaagccaaattggtgaagcaggttcaggagaaagaagaccttcttcggaggctaaaactagtcaaaatgtatagatcaaagaatgatctgtctcagttacagttgttaataaagaagtggagaagctgtagccagctcttgctttatgagttgcagtcagctgtgtctgaagagaacaagaaactaagccttactcaattgatagaccactatgggttagatgataaattactacactataacagaagtgaagaagaatttatagatgtttaattcctgatttttgctccagaatatctttgagaatgacaacttaattaaaagatacttaggcactttttttttttttttgagactgagtttcgctcttgtcatcctggctggagtgtgatggtgcgatcttgactcactgcaacctctgcctctcgggttccagcaattctcctgcctcagcctcccgagtagctgagattacaggcgcccgccaccatgcccggctaatttttgcatttttagtagagactgggtttcaccacgttggccaggctggtctcgaactcctgacctcaggtgatccaccgcctaggcctcccaaaaccattagggctcagaggaaggtatcccaatgaatatcaattaagggcactttaatatataaattataaactaagttctaaaaggaaaattagtattttggatagatttgtcaaaacgacatttaagtcatgtttaaaaagtcatttgggcagttctggaaactagttttaatacatttgttttttatgacaaaaagttttattttaaatgttaaaaattgtccaatctggtgaatgtctaaccctaaagtttaaaaatttctgcctcctaagtttatgtaccttgtttccatccatttaccacatatttccatctgatagtctagcaggtaattaaacttatatgtccaaaaccata

SEQ ID NO: 187926 - DNA, 1503 bp, Homo sapiens
  Payload ID: 16978
  Gene Symbol: SFR1
  Gene Name: SWI5-dependent homologous recombination repair protein 1
  Uniprot ID: Q86XK3
  ENST ID: ENST00000369729
  CDS Start-End: 124-822
agcggcgcctcgcgcgtcaggcaatctggccaattgcgcatcttttccgcctaccgcacggccccgcccctgccacaggatcgatttacggccgcagagaaaaaccaagatttcactttcaagatggaaagtccgtcagactcagctgtggttttacctagcactcctcaggcctctgcgaatccatcatctccctatacaaatagttcccgaaaacaacctatgagtgcaacacttagagaaagattaaggaaaacaagattttcatttaattcctcttacaatgtggtgaaacgtcttaaagtagagagtgaagaaaatgatcagaccttttcagagaaaccagcatcttccacagaggaaaactgtttggaatttcaagaaagttttaaacatatagacagtgaatttgaagaaaatacaaatttgaaaaatactttgaagaatctcaatgtctgtgaatctcagtcacttgattctggatcatgcagtgctctccaaaatgagtttgtgagtgagaagcttcctaaacaaagattaaacgctgaaaaagccaaattggtgaagcaggttcaggagaaagaagaccttcttcggaggctaaaactagtcaaaatgtatagatcaaagaatgatctgtctcagttacagttgttaataaagaagtggagaagctgtagccagctcttgctttatgagttgcagtcagctgtgtctgaagagaacaagaaactaagccttactcaattgatagaccactatgggttagatgataaattactacactataacagaagtgaagaagaatttatagatgtttaattcctgatttttgctccagaatatctttgagaatgacaacttaattaaaagatacttaggcactttttttttttttttgagactgagtttcgctcttgtcatcctggctggagtgtgatggtgcgatcttgactcactgcaacctctgcctctcgggttccagcaattctcctgcctcagcctcccgagtagctgagattacaggcgcccgccaccatgcccggctaatttttgcatttttagtagagactgggtttcaccacgttggccaggctggtctcgaactcctgacctcaggtgatccaccgcctaggcctcccaaaaccattagggctcagaggaaggtatcccaatgaatatcaattaagggcactttaatatataaattataaactaagttctaaaaggaaaattagtattttggatagatttgtcaaaacgacatttaagtcatgtttaaaaagtcatttgggcagttctggaaactagttttaatacatttgttttttatgacaaaaagttttattttaaatgttaaaaattgtccaatctggtgaatgtctaaccctaaagtttaaaaatttctgcctcctaagtttatgtaccttgtttccatccatttaccacatatttccatctgatagtctagcaggtaattaaacttatatgtccaaaaccata

SEQ ID NO: 187927 - DNA, 1684 bp, Homo sapiens
  Payload ID: 16979
  Gene Symbol: SWSAP1
  Gene Name: SWIM-type zinc finger 7 associated protein 1
  Uniprot ID: Q6NVH7
  ENST ID: ENST00000312423
  CDS Start-End: 60-749
cggagacgctgaggcgggtgctaaccaggggcggtgcggcctggtccggggaggagaacatgcctgccgccggaccgcctttgctgctgctcggtacaccaggatctggaaaaacagcgctgctatttgctgcggccctagaggcggcgggggagggccaaggcccagtcctcttcctgacacgaaggcctcttcaaagcatgccccgcgggaccggaacgactctagacccaatgcgactccagaagatccgcttccagtacccaccctcaacccgagagcttttccggctcctgtgctctgcccatgaggccccggggccagccccctcccttctgctgctcgacggcctagaagagtacctagcggaagacccagagccccaggaagccgcctacctcattgccttacttctagacacagctgcccacttcagccaccggcttgggcctggccgggattgtgggctcatggtggccctccagacccaggaggaagcaggtagtggggacgtcctgcacctggcactgctccagcggtattttcctgcccagtgctggctgcagccagatgcaccaggtccaggagagcacggcctccgagcctgcctggagccaggcgggctgggccccagaacagagtggtgggtgactttccgatcagatggagaaatgatgatcgctccgtggcccacccaggctggtgaccccagctcaggcaagggttcaagctctggaggccagccctgagctttggtgggtgactacctctctgtgcttcagtttcccatggctggaatacttacctcagggacatatgcagatccaaagacctaaacaatgtaaagtgctttttctcttttaaaagtatagcattatcttgtatatattttacccaatcaatatgttgtttatagtttcattgctttaaactttataaaaagagcttcaggccaggcgtggtggctcacgcctgtaatcccagcactttgggaggctgaggcggtcagatcaccagaggtcaggagttggagaccagcctgcccaacatgatgaaaccctgtatcaactaaaagtacaaaaaaaattagctgggtgtggtggcaggtgcctgtagtctcagctactcaggaggcttaggcaggagaattgcttgaacccaggaagcggaggttgcagtgagccgagattgtgccactacactccagcctgggtgacaaagcgagactccatctcaaaaaaaaaaaaaaaaaaaagtttgagacttccttctttttgcactcaacgttgttactaagattcatctacatttttttagttcattcctttttccatattgcatataattccatgggtgactataccctgatttcttcatcagattgccttatttactgctgcgaacattcttgcacacatgccctggtacgtgtgtgtgtttttaggggccgagacaggtggatcacctgaggtcaggagttcgaggtcagcccggcctacatggtgaaaccccgtctctactaaaaatacaaaatttagccaggcatggtggcatgcacttgtactcccagctacttgggaggctgagacaggagaattgcttgaacccgggaggcagaggttgcagtgagctgagatcgagccactgcactccagcctgggtgatgaagacgagactctgtctc

SEQ ID NO: 187928 - DNA, 3830 bp, Homo sapiens
  Payload ID: 16980
  Gene Symbol: SWT1
  Gene Name: SWT1 RNA endoribonuclease homolog
  Uniprot ID: Q5T5J6
  ENST ID: ENST00000367500
  CDS Start-End: 166-2868
ggggcggtgagtaggtagtgcggatgcgggcgcagaactacgtttcccagcaggcatacagttggtggggcggggtgtgtgtgtgtgttgggaggcgggggtccctctcctttggcttggggctccggagttgccactgccgccggcgctggtaagcttttcaggatgtccagcaaagaatcctgtgggaaaaaagagacatctcagaggaaagacaccaccacctcatcacccaattttggtgaaaaagacaagaaagagagaaaaaccccagcaagttctactagttcatcttctataagatcagtttcatcagaaaagagaaaactgaaatcagatcatacagatgttctgtactataatataaaaagaagacaaggactgaaaagattgagtgtagaaattgacactctcagaaggagaccaaaaatcggttcttcatcccaaagacctattaaactcaaagaagcatcatattcaaatgataatcaaattattttgcagagtccttcttcaaatggaactaaaaaagacatacataaatgtgtagactttaaacctaaagatatcaaattgacaaatgctgggagcaagcttgaccatggaattaaaagccttagtagtcctaagattgccagtgatgtgaaacctaaagccgaaggccaggcaagtgaaaataaatggtctcatttacttgttcagagagagaagatgaaagaactcaagaaaggaagaaacagtaaatttagagacaattctgaaaaatgtgtcttagagaaatggaagagaaatcaattttctcaggattataactccaacaagataattaaggaacccttgggatctagaagacagaagatcagtttcaaaatccctataaaatcccgtgacaccctccagaaacttgtagaagaaaatgtcttcaacatagattctaataattcgaagactaagcaggaagaaagagaatacctggaaagctcccaggtttcattaaatgtgactaggcagaaaactgaacatttactttcagattttacatataagcggactgttcatgagtggaaacgaaaacatcattatgaccatcaagaaagtaatgattcacattctagggaaaacctaacccagagttttgaagcaccatgttgttccgtgtcatctgaaagtatccaggatgcagatcaagagatgcagatagtagaagagcttcatgctgcacgtgtgggaaaaagtgtggatttacctggagagttaatgagtatggaaattgacttagaagatgatgtacattcctcctctgcaaataatacttcagacagaaagcttctaattgttattgacacaaatattctgatgaatcatctcaaatttgttagaattttgaagacaacagaagtaccaggttttgacaaacttgtgttaataattccctgggtcgttatgcaagagctagatcgtatgaaggaaggaaaactactaaaacgtgcccagcacaaagctatacctgcagttcatttcatcaacgacagtctcaaaaatcaagatagaaagctatggggtcagtcaatacaacttgcatcccaaaaacattatggattgagtgatgagaacaatgatgatcgagtactaaaatgctgtctccagcaccaggaattattcccttgttcttttgttattctgtgcacggatgatagaaacttaagaaacaaaggcctaataagtggtgtgaagtcactcagtaaagaagaattgagtgcagagttattacacttatctctgaacacagatgtgtgtcatcagccttgtattcctaagcaacagttgaaagcagaaacaacacccttgaaagagagctataaggaggaatctacaaattctggactgtccattctgcttgagagcattgtatctgatcttgaaaaatctcttggaacaggtttatcttcaatattagaaacagaaatgaaaattgcttttggaaacctttggatggagatcctgtacctgaaaccaccatggactctactacatttactacagtgctttaaaaaacattggttggctgtatttggattagttatggaaaagaacttgcttttaactattgagagcctatacaaaaatctccgtaaagctaataaggcagtggattttacaacagtcaaattcttgcttcaggattctagaagtttgttacatgctttcagtacaaggtcaaattatgatggtattcttccacagacctttgctcaagtaaacaacctccttcagacatttgcagaggtcaagacaaaacttaagccaaattcttcagaaaacacagtgactaaaaagcaggaaggtacttcattgaagaattctcataatcaagaaatcactgttttctcgagttctcatcttccccaacccagcaggcatcaagaaatctggtctatcctagagagtgtttggattacaatatatcagaacagcacggatgtatttcaaagattgggctcaaattcagctctgactacttcaaatatagcatcatttgaagaagcatttatatgtcttcaaaagttaatggcagctgtgagggatattcttgaaggaattcaaaggattttggccccaaacagtaattatcaagatgttgagaccctctataacttcctaatcaagtatgaggtaaataaaaatgtcaaatttactgcccaggaaatttatgattgtgtttctcagactgagtatagggaaaagttaaccattggatgccgccagctggttgagatggaatataccatgcagcagtgcaatgcatctgtttatatggaggccaaaaacaggggatggtgtgaagacatgctcaactataggatataagtactgatttgtaactttaaaggaattgcatttgtccttaagaataacagagtagttttcaatctggtcactcttttgggccaaacccaagagaattttaagaaatgtttcataggtataaaaaggtgatcgcctattactgacagtctcattgtagctctaaaaagcctaatgtatccactgtggaataaactccatagactcaactcttctggagttcacaatgcctccctacctctattcttgatagtgagccagtatctctaaggaaaggagagccgtatttttagtcatcctagggcaggagccactgtggcatctgaggaagacccagggtacagtattagcatttctttcaaccctaagtatgggcatgtgaccagagacactgccaaaccctaagaaatcattagggcatgatcatgctcaccatatttcacaaatgaaatcttaatgtgggctgttttttatgatcaaactgtcatccatgttgacctgatgaaaataacaccctccttcacctccctcagggtaatgaaagtagaaatttgactgaagctcctacttccttatacagcctttccttctgtgggcttgtcacttttcagtacatttctagtggggaagagcagggcgacccctctgctgggtttctccttaaatgtgaagcaaaataaatttatataatggaatttggtggcagtgactgatgtttgtctctagctaaaaccaactgtttagttgactttttagttataggataagttggaagtccttgtttactggaatatattatgcttttgttaacacattagattaaatagaatttggtattctattataaatgtttattttttaaagcaataaataacttatttttggtaagatttggctttttacttccaaattgtttctgatatgtacataaggtatgattataaaagtgactgtctgcaataaaa

SEQ ID NO: 187929 - DNA, 3001 bp, Homo sapiens
  Payload ID: 16980
  Gene Symbol: SWT1
  Gene Name: SWT1 RNA endoribonuclease homolog
  Uniprot ID: Q5T5J6
  ENST ID: ENST00000367501
  CDS Start-End: 95-2797
aggatacactgcgcagtctgggggcggggccggagttcaagcctcggaggaagtaaatgcaaatctaagcgagcgctgtggggcgcttttcaggatgtccagcaaagaatcctgtgggaaaaaagagacatctcagaggaaagacaccaccacctcatcacccaattttggtgaaaaagacaagaaagagagaaaaaccccagcaagttctactagttcatcttctataagatcagtttcatcagaaaagagaaaactgaaatcagatcatacagatgttctgtactataatataaaaagaagacaaggactgaaaagattgagtgtagaaattgacactctcagaaggagaccaaaaatcggttcttcatcccaaagacctattaaactcaaagaagcatcatattcaaatgataatcaaattattttgcagagtccttcttcaaatggaactaaaaaagacatacataaatgtgtagactttaaacctaaagatatcaaattgacaaatgctgggagcaagcttgaccatggaattaaaagccttagtagtcctaagattgccagtgatgtgaaacctaaagccgaaggccaggcaagtgaaaataaatggtctcatttacttgttcagagagagaagatgaaagaactcaagaaaggaagaaacagtaaatttagagacaattctgaaaaatgtgtcttagagaaatggaagagaaatcaattttctcaggattataactccaacaagataattaaggaacccttgggatctagaagacagaagatcagtttcaaaatccctataaaatcccgtgacaccctccagaaacttgtagaagaaaatgtcttcaacatagattctaataattcgaagactaagcaggaagaaagagaatacctggaaagctcccaggtttcattaaatgtgactaggcagaaaactgaacatttactttcagattttacatataagcggactgttcatgagtggaaacgaaaacatcattatgaccatcaagaaagtaatgattcacattctagggaaaacctaacccagagttttgaagcaccatgttgttccgtgtcatctgaaagtatccaggatgcagatcaagagatgcagatagtagaagagcttcatgctgcacgtgtgggaaaaagtgtggatttacctggagagttaatgagtatggaaattgacttagaagatgatgtacattcctcctctgcaaataatacttcagacagaaagcttctaattgttattgacacaaatattctgatgaatcatctcaaatttgttagaattttgaagacaacagaagtaccaggttttgacaaacttgtgttaataattccctgggtcgttatgcaagagctagatcgtatgaaggaaggaaaactactaaaacgtgcccagcacaaagctatacctgcagttcatttcatcaacgacagtctcaaaaatcaagatagaaagctatggggtcagtcaatacaacttgcatcccaaaaacattatggattgagtgatgagaacaatgatgatcgagtactaaaatgctgtctccagcaccaggaattattcccttgttcttttgttattctgtgcacggatgatagaaacttaagaaacaaaggcctaataagtggtgtgaagtcactcagtaaagaagaattgagtgcagagttattacacttatctctgaacacagatgtgtgtcatcagccttgtattcctaagcaacagttgaaagcagaaacaacacccttgaaagagagctataaggaggaatctacaaattctggactgtccattctgcttgagagcattgtatctgatcttgaaaaatctcttggaacaggtttatcttcaatattagaaacagaaatgaaaattgcttttggaaacctttggatggagatcctgtacctgaaaccaccatggactctactacatttactacagtgctttaaaaaacattggttggctgtatttggattagttatggaaaagaacttgcttttaactattgagagcctatacaaaaatctccgtaaagctaataaggcagtggattttacaacagtcaaattcttgcttcaggattctagaagtttgttacatgctttcagtacaaggtcaaattatgatggtattcttccacagacctttgctcaagtaaacaacctccttcagacatttgcagaggtcaagacaaaacttaagccaaattcttcagaaaacacagtgactaaaaagcaggaaggtacttcattgaagaattctcataatcaagaaatcactgttttctcgagttctcatcttccccaacccagcaggcatcaagaaatctggtctatcctagagagtgtttggattacaatatatcagaacagcacggatgtatttcaaagattgggctcaaattcagctctgactacttcaaatatagcatcatttgaagaagcatttatatgtcttcaaaagttaatggcagctgtgagggatattcttgaaggaattcaaaggattttggccccaaacagtaattatcaagatgttgagaccctctataacttcctaatcaagtatgaggtaaataaaaatgtcaaatttactgcccaggaaatttatgattgtgtttctcagactgagtatagggaaaagttaaccattggatgccgccagctggttgagatggaatataccatgcagcagtgcaatgcatctgtttatatggaggccaaaaacaggggatggtgtgaagacatgctcaactataggatataagtactgatttgtaactttaaaggaattgcatttgtccttaagaataacagagtagttttcaatctggtcactcttttgggccaaacccaagagaattttaagaaatgtttcataggtataaaaaggtgatcgcctattactgacagtctcattgtagctctaaaaagcctaatgtatccactgtggaataaactccatagactc

SEQ ID NO: 187930 - DNA, 633 bp, Homo sapiens
  Payload ID: 16980
  Gene Symbol: SWT1
  Gene Name: SWT1 RNA endoribonuclease homolog
  ENST ID: ENST00000450350
  CDS Start-End: 155-633
gggtgtggttctggcccggcttgcctccggggctgccccttgcccggtgttggggtctggtcggttcgtgcggagcccgcgggcccgcggcggtttactagcagctgacgagcttgcctgtccatccagctgacttggaattaggcttttcaggatgtccagcaaagaatcctgtgggaaaaaagagacatctcagaggaaagacaccaccacctcatcacccaattttggtgaaaaagacaagaaagagagaaaaaccccagcaagttctactagttcatcttctataagatcagtttcatcagaaaagagaaaactgaaatcagatcatacagatgttctgtactataatataaaaagaagacaaggactgaaaagattgagtgtagaaattgacactctcagaaggagaccaaaaatcggttcttcatcccaaagacctattaaactcaaagaagcatcatattcaaatgataatcaaattattttgcagagtccttcttcaaatggaactaaaaaagacatacataaatgtgtagactttaaacctaaagatatcaaattgacaaatgctgggagcaagcttgaccatggaattaaaagccttagtagtcctaagattgccagtgatgt

SEQ ID NO: 187931 - DNA, 1345 bp, Homo sapiens
  Payload ID: 16981
  Gene Symbol: SYF2
  Gene Name: SYF2 pre-mRNA-splicing factor
  Uniprot ID: O95926
  ENST ID: ENST00000236273
  CDS Start-End: 27-758
ggaagtgggaagagagaaaggttgtgatggcggctatagctgcatccgaggtgctggtggacagcgcggaggaggggtccctcgctgcggcggcggagctggccgctcagaagcgcgaacagagactgcgcaaattccgggagctgcacctgatgcggaatgaagctcgtaaattaaatcaccaggaagttgtggaagaagataaaagactaaaattacctgcaaattgggaagccaaaaaagctcgtttggagtgggaactaaaggaagaggaaaagaaaaaggaatgtgcggcaagaggagaagactatgagaaagtgaagttgctggagatcagtgcagaagatgcagaaagatgggagaggaaaaagaagaggaaaaaccctgatctgggattttcagattatgctgctgcccagttacgccagtatcatcggttgaccaagcagatcaaacctgacatggaaacatatgagagactgagagaaaaacatggagaagagtttttcccaacatccaatagtcttcttcatggaacacatgtgccttccacagaggaaattgacaggatggtcatagatctggaaaaacagattgaaaaacgagacaaatatagccggagacgtccttataatgatgatgcagatatcgactacattaatgaaaggaatgccaaattcaacaagaaagctgaaagattctatgggaaatacacagctgaaattaaacagaatttggaaagaggaacagctgtctaatcccttcaagaactgtttatagaagcttgagaatggggtaaaaatttctgctagcaaaatcaagttctttttgaaattttatcagtaatccagaatttagtagtccatgccttctcactcagcatttagaaataaaaatgtggtttcttaaacgtatatcctttcatgtatatttccacatttttgtgcttggatataagatgtatttcttgtagtgaagttgttttgtaatctactttgtatacattctaattatattatttttctatgtattttaaatgtatatggctgtttaatctttgaagcattttgggcttaagattgccagcagcacacatcagatgcagtcattgttgctatcagtgtggaatttgatagagtctagactcgggccacttggagttgtgtactccaaagctaaggacagtgatgaggaagatggcagtggccaccggaggactggagcagtccctcctcatggcggcctgtgaccaaggtcggggaggagtggagctatccttccatgatctgatcatgtacagttccctttttaaaaagcaataaatgcttgggattagaatttctaa

SEQ ID NO: 187932 - DNA, 926 bp, Homo sapiens
  Payload ID: 16981
  Gene Symbol: SYF2
  Gene Name: SYF2 pre-mRNA-splicing factor
  Uniprot ID: O95926
  ENST ID: ENST00000354361
  CDS Start-End: 20-625
ggaagagagaaaggttgtgatggcggctatagctgcatccgaggtgctggtggacagcgcggaggaggggtccctcgctgcggcggcggagctggccgctcagaagcgcgaacagagactgcgcaaattccgggagctgcacctgatgcgggaatgtgcggcaagaggagaagactatgagaaagtgaagttgctggagatcagtgcagaagatgcagaaagatgggagaggaaaaagaagaggaaaaaccctgatctgggattttcagattatgctgctgcccagttacgccagtatcatcggttgaccaagcagatcaaacctgacatggaaacatatgagagactgagagaaaaacatggagaagagtttttcccaacatccaatagtcttcttcatggaacacatgtgccttccacagaggaaattgacaggatggtcatagatctggaaaaacagattgaaaaacgagacaaatatagccggagacgtccttataatgatgatgcagatatcgactacattaatgaaaggaatgccaaattcaacaagaaagctgaaagattctatgggaaatacacagctgaaattaaacagaatttggaaagaggaacagctgtctaatcccttcaagaactgtttatagaagcttgagaatggggtaaaaatttctgctagcaaaatcaagttctttttgaaattttatcagtaatccagaatttagtagtccatgccttctcactcagcatttagaaataaaaatgtggtttcttaaacgtatatcctttcatgtatatttccacatttttgtgcttggatataagatgtatttcttgtagtgaagttgttttgtaatctactttgtatacattctaattatattatttttctatgtattttaaatgtatatggctgtttaatcttt

SEQ ID NO: 187933 - DNA, 4195 bp, Homo sapiens
  Payload ID: 16982
  Gene Symbol: SYMPK
  Gene Name: symplekin
  Uniprot ID: Q92797
  ENST ID: ENST00000245934
  CDS Start-End: 246-4070
ggaaatgaagggtctgctcgccgtagtatggaggcgggcagaatgccgctcgcacgggacgaggcatgggcggggtcgggctgtgctctggactccatttcccggcggccctgggtgtgtggcgcgtgcgcaccgttcccggcgacgaacggaagatggcggcggcggcggcggcggagtgtaggaagaggcactgctgagggggcgcgaggggaacggaggccagagctgcgctgacagcagccatggcgagcggcagtggagacagcgtcacccgtcggagcgtggcatcacagtttttcactcaagaggaggggccgggcatcgatggcatgaccacctcagagagggtggtggatcttctgaaccaggcggcgctgatcaccaatgactcaaagatcacagtgctcaaacaggtccaggagctgatcatcaacaaagaccccacactactggacaacttcctggatgagatcatcgcattccaagcagacaagtcaatcgaagtgcgaaaatttgtcatcggcttcatcgaggaggcatgcaagcgagacattgagttgctgctgaaactcattgcaaacctcaacatgctcttgagggacgagaatgtgaacgtggtgaagaaggctatcctcaccatgacccagctctacaaggtggccctgcagtggatggtaaagtcacgggtcattagcgagctacaggaggcctgctgggacatggtatctgccatggcgggggacatcatcctgctattggactctgacaatgacggcatccgcacccacgccatcaagtttgtggagggcctcattgtcaccctgtcaccccgcatggctgactcagagataccccgacgccaggagcatgatatcagcctggaccgcatccctcgtgaccacccctacatccagtacaacgtgctatgggaagagggcaaggcagccttggagcagctgcttaagttcatggtgcaccctgccatctcctccatcaacctgaccacagcgctgggctcccttgccaatatcgcccgccagagacccatgttcatgtctgaggtgatccaggcctatgaaactctgcatgccaacctgcccccgacgctggccaaatcgcaggtgagcagtgtgcgtaagaatctgaagctgcacctgttgagtgtgctgaagcacccggcttccttggagttccaggcccagatcaccaccctgctggtggacctgggcacacctcaggccgagatcgcccgcaacatgccgagcagcaaggacacccgcaagcggccccgcgatgactcggactccacactcaagaagatgaagctggagcccaacctgggggaggacgatgaggacaaagacttggagccaggcccgtcggggacctcgaaggcctcagcgcagatctccggccagtcagacacggacatcacagctgagttcctgcagcctctgctgacgcctgataatgtggctaatctggtcctcatcagcatggtgtacctacccgaggccatgccagcctccttccaggccatctacacccccgtggagtcagcaggcacggaagcccagatcaagcacctggctcggctcatggccacacagatgacagctgccggactgggaccaggtgtagagcagaccaaacagtgcaaggaggagcccaaggaggagaaggtggtgaagacagagagcgtcctgatcaagcggcgcctgtcagcccagggccaagccatctcggtggtgggttccctgagctccatgtcccccctggaggaagaggcaccgcaggccaagaggaggccagagcccattatccctgtcactcagccccggctggcaggcgctggtgggcgcaagaaaattttccgtctcagcgacgtgctgaagccccttaccgatgcccaggtggaagccatgaagctgggcgctgtgaagcggatcctgcgggctgagaaggctgtggcctgcagcggggcagcccaggtccgcataaagatcctggccagcctggtgacacagttcaactcgggcctgaaggcggaggtcctgtccttcatcctggaggatgtgcgggcccgcctggacctggccttcgcctggctctaccaggagtacaacgcctacctggccgcaggtgcctcgggctccctggacaagtatgaggactgcctcatccgcctgttgtctggcctgcaggagaaaccagaccagaaggatgggatcttcaccaaggttgtgctggaggcgccactcatcacagagagtgccctggaggtggtccgcaagtactgcgaggatgagagtcgcacctatctgggcatgtccacacttcgagacctgatcttcaagcgcccgtcccgccagttccagtacctgcatgtcctcctcgacctcagctcccatgagaaggacaaggtgcgctcccaggccctgctgttcatcaaacgcatgtatgagaaggagcagctgcgggagtatgtggagaaatttgccctcaactacctgcagctcctggtgcaccccaacccaccgtctgtgctgtttggagctgacaaggacacagaggtggcagcaccctggacggaggagacagtgaagcagtgtctgtacctctacctggccctcctgcctcagaaccacaagctgatccacgaactggcggccgtgtacactgaagccatcgccgacatcaagcggacggtgctgagggtcattgagcagccgatccgaggaatgggcatgaactccccggagctgctcctgctggtggaaaattgtcccaagggagcagagacactggtcacgagatgtctgcacagcctcacagacaaagtcccaccctccccagagctggtgaagcgggtccgggatctctaccacaagcgactgccagacgtccgcttcctcatcccggtgctcaatgggctggagaagaaagaggtgatccaggccctgcctaaactcatcaaactcaaccccatcgtggtgaaggaagtcttcaaccgcctgctgggcacccagcatggtgagggaaactcagccttgtccccgctgaaccctggagagctcctgatcgcattacacaacattgactccgtgaagtgcgacatgaaatccatcatcaaagccaccaacctgtgctttgcggagcggaacgtgtacacgtcagaggtgctggccgtggtgatgcagcagctgatggagcagagccccctgcccatgctgctcatgaggaccgtcatccagtccctgaccatgtacccccgcctggggggcttcgtcatgaacatcctgtcccgcctcatcatgaagcaggtgtggaagtaccccaaggtgtgggagggcttcatcaagtgctgccagcgcacaaagccccagagcttccaggtcatcctgcagctgccgccccagcagctgggagccgtctttgacaagtgcccagagctccgggagcccctgctggcccatgtccgctccttcaccccccaccagcaagctcacatccctaactccatcatgaccatcttggaggccagcggcaagcaggagccagaggccaaggaggcgcctgcggggcccttggaggaggatgatctggagcccctgaccttggccccggccccagcaccccggccccctcaggacctcatcggcctgcgactggcccaggagaaggccttaaagcggcagctggaggaggaacagaagctgaagccgggaggagtgggagccccctcctcttcctccccctctccctctccgtcggcccggccaggcccgcccccgtctgaggaagccatggatttccgggaggaggggcctgagtgcgagaccccgggcatcttcatcagcatggatgacgactcggggctgaccgaggccgcgctgttggactctagtctcgagggccccctacccaaggagacggcagcgggcgggctgaccttgaaggaggagcggagcccccagaccctcgcacctgttggagaagatgctatgaagactcccagcccggctgccgaggacgccagggaacccgaggccaaggggaacagctgacggggctcgagggggaaagggggtgggacagggactcggggctgggggacggggcggggcttgacctgcgggtgctttgccttaaaaagaaataaaagatgtgaacttgggcaagttactgaaaa

SEQ ID NO: 187934 - DNA, 503 bp, Homo sapiens
  Payload ID: 16982
  Gene Symbol: SYMPK
  Gene Name: symplekin
  ENST ID: ENST00000602061
  CDS Start-End: 78-503
aatttgttatccgactcttatctgtgtgctgttttatgatgtctatgaccgtgtgttccatgaagctgacagcagccatggcgagcggcagtggagacagcgtcacccgtcggagcgtggcatcacagtttttcactcaagaggaggggccgggcatcgatggcatgaccacctcagagagggtggtggatcttctgaaccaggcggcgctgatcaccaatgactcaaagatcacagtgctcaaacaggtccaggagctgatcatcaacaaagaccccacactactggacaacttcctggatgagatcatcgcattccaagcagacaagtcaatcgaagtgcgaaaatttgtcatcggcttcatcgaggaggcatgcaagcgagacattgagttgctgctgaaactcattgcaaacctcaacatgctcttgagggacgagaatgtgaacgtggtgaagaaggctatcctcaccatgacccagctctacaaggtggccctgcag

SEQ ID NO: 187935 - DNA, 653 bp, Homo sapiens
  Payload ID: 16982
  Gene Symbol: SYMPK
  Gene Name: symplekin
  ENST ID: ENST00000596824
  CDS Start-End: 1-286
cccccgcctggggggcttcgtcatgaacatcctgtcccgcctcatcatgaagcaggtgtggaagtaccccaaggtgtgggagggcttcatcaagtgctgccagcgcacaaagccccagagcttccaggtcatcctgcagctgccgccccagcagctgggagccgtctttgacaagtgcccagagctccgggagcccctgctggcccatgtccgctccttcaccccccaccagagctgcccccagcgcccccttcctgctctccacccagcaagctcacatccctaactccatcatgaccatcttggaggccagcggcaagcaggagccagaggccaaggaggcgcctgcggggcccttggaggaggatgatctggagcccctgaccttggccccggccccagcaccccggccccctcaggacctcatcggcctgcgactggcccaggagaaggccttaaagcggcagctggaggaggaacagaagctgaagccgggaggagtgggagccccctcctcttcctccccctctccctctccgtcggcccggccaggcccgcccccgtctgaggaagccatggatttccgggaggaggggcctgagtgcgagaccccgggcatcttcatcagcatggatgacgactcggggctgacc

SEQ ID NO: 187936 - DNA, 560 bp, Homo sapiens
  Payload ID: 16982
  Gene Symbol: SYMPK
  Gene Name: symplekin
  ENST ID: ENST00000601600
  CDS Start-End: 410-560
agagctgtgtttttaaaagtttactctgggccaggcactgtggttcacgcctgtaatccctgcactttgggaggccgaggcaggtggaacacctgaggtcaggagtttgacaccagcctggccaacatggtgaaaccctgtctctactgaaaatacaaaaattagctgggcatggtggcatgtgcccgtaatcccagttacttgggaggctgaggcaggagaatcacttgaacctgggaggcagaggttgcagtgagctgagatcgcaccaccacactccaacctgggtgacagagcaagacttcatctcaaaaaaaaaaaaaaaagaaagtttgctgtggtgcccagtccaaagcatatcccagatggagagaggggacacacggagacctgcaagctgacagcagccatggcgagcggcagtggagacagcgtcacccgtcggagcgtggcatcacagtttttcactcaagaggaggggccgggcatcgatggcatgaccacctcagagagggtggtggatcttctgaaccaggcggcgctgatcaccaatgactcaa

SEQ ID NO: 187937 - DNA, 611 bp, Homo sapiens
  Payload ID: 16982
  Gene Symbol: SYMPK
  Gene Name: symplekin
  ENST ID: ENST00000598059
  CDS Start-End: 199-611
gtgcgcaccgttcccggcgacgaacggaagatggcggcggcggcggcggcggagtgtaggaagaggcactgctgagggggcgcgaggggaacggaggccagagctgcggtgttcgggtgacaatccagcccagcccatccgctggttccctgagcttgatccatcctcttctttcctggggacaagctgacagcagccatggcgagcggcagtggagacagcgtcacccgtcggagcgtggcatcacagtttttcactcaagaggaggggccgggcatcgatggcatgaccacctcagagagggtggtggatcttctgaaccaggcggcgctgatcaccaatgactcaaagatcacagtgctcaaacaggtccaggagctgatcatcaacaaagaccccacactactggacaacttcctggatgagatcatcgcattccaagcagacaagtcaatcgaagtgcgaaaatttgtcatcggcttcatcgaggaggcatgcaagcgagacattgagttgctgctgaaactcattgcaaacctcaacatgctcttgagggacgagaatgtgaacgtggtgaagaaggctatcctcaccatgacccagctctacaa

SEQ ID NO: 187938 - DNA, 623 bp, Homo sapiens
  Payload ID: 16982
  Gene Symbol: SYMPK
  Gene Name: symplekin
  ENST ID: ENST00000594293
  CDS Start-End: 278-623
atttcccggcggccctgggtgtgtggcgcgtgcgcaccgttcccggcgacgaacggaagatggcggcggcggcggcggcggagtgtaggaagaggcactgctgagggggcgcgaggggaacggaggccagagctgcgggtctcactctgtcgcccaggctggcacgatcccagttcactgcaacctccacctccctggttcaagtgattctcccaccccagcctctcgagtagctgggattacaaacgtgccccaccacacccagctgacagcagccatggcgagcggcagtggagacagcgtcacccgtcggagcgtggcatcacagtttttcactcaagaggaggggccgggcatcgatggcatgaccacctcagagagggtggtggatcttctgaaccaggcggcgctgatcaccaatgactcaaagatcacagtgctcaaacaggtccaggagctgatcatcaacaaagaccccacactactggacaacttcctggatgagatcatcgcattccaagcagacaagtcaatcgaagtgcgaaaatttgtcatcggcttcatcgaggaggcatgcaagcgagacattgagttgctgctgaaactcattgcaaacctcaaca

SEQ ID NO: 187939 - DNA, 5164 bp, Homo sapiens
  Payload ID: 16982
  Gene Symbol: SYMPK
  Gene Name: symplekin
  ENST ID: ENST00000600237
  CDS Start-End: 1313-3334
cccaggctgctctccgactcctaggctcaagcgatctgcctgcctcagcctcccaaagtgttgggagtacaggcatgagccactgcacctggcctcatttttcttttttttttgtaaaacagaaacatacagtcaacactgtcttcagctttgcttgttttcacttaatgtatgcactctctatcagtgtctagagattgttctcatttttttgtttttttcttcctttcttgttacagttccatagtctttttcctttatttatatttatatgtttttcacttactttcacaggtgttgaagccccatggcctttgattatgtatgaactttttttcagccagtctccctatttgagaacacttgagttgcttctagtcttttgctattatgaatagttgtgtaattgacatatactgctacgttaatcattccataattttgcctgtgtgactgtgatggatgcctgaaagcccccttcctcccttttaaaaacagcttcatgatattccagagagtggctgaaacataattattgaagcaggccttttgtgatgtattgagtgcctactatgtgccggactctgtgcctgatattcctcagagctgtgtttttaaaagtttactctgggccaggcactgtggttcacgcctgtaatccctgcactttgggaggccgaggcaggtggaacacctgaggtcaggagtttgacaccagcctggccaacatggtgaaaccctgtctctactgaaaatacaaaaattagctgggcatggtggcatgtgcccgtaatcccagttacttgggaggctgaggcaggagaatcacttgaacctgggaggcagaggttgcagtgagctgagatcgcaccaccacactccaacctgggtgacagagcaagacttcatctcaaaaaaaaaaaaaaaagaaagtttgctgtggtgcccagtccaaagcatatcccagatggagagaggggacacacggagacctgcaaggtggctgttgcacgttcatgtggcccatcgttcagcagctgtttgtggttggcccacttgaggctgagacttctggctctgccttgggagatgtcagtctcccccaagttacaggccccgtgcacatatccataagccagagacagaccctggaggggagagggacttgagaaggcctgactggggaggaacagcctgggaaggaggcttgggccctttgtaggtgttcgggtgacaatccagcccagcccatccgctggttccctgagcttgatccatcctcttctttcctggggacaagctgacagcagccatggcgagcggcagtggagacagcgtcacccgtcggagcgtggcatcacagtttttcactcaagaggaggggccgggcatcgatggcatgaccacctcagagagggtggtggatcttctgaaccaggcggcgctgatcaccaatgactcaaagatcacagtgctcaaacaggtccaggagctgatcatcaacaaagaccccacactactggacaacttcctggatgagatcatcgcattccaagcagacaagtcaatcgaagtgcgaaaatttgtcatcggcttcatcgaggaggcatgcaagcgagacattgagttgctgctgaaactcattgcaaacctcaacatgctcttgagggacgagaatgtgaacgtggtgaagaaggctatcctcaccatgacccagctctacaaggtggccctgcagtggatggtaaagtcacgggtcattagcgagctacaggaggcctgctgggacatggtatctgccatggcgggggacatcatcctgctattggactctgacaatgacggcatccgcacccacgccatcaagtttgtggagggcctcattgtcaccctgtcaccccgcatggctgactcagagataccccgacgccaggagcatgatatcagcctggaccgcatccctcgtgaccacccctacatccagtacaacgtgctatgggaagagggcaaggcagccttggagcagctgcttaagttcatggtgcaccctgccatctcctccatcaacctgaccacagcgctgggctcccttgccaatatcgcccgccagagacccatgttcatgtctgaggtgatccaggcctatgaaactctgcatgccaacctgcccccgacgctggccaaatcgcaggtgagcagtgtgcgtaagaatctgaagctgcacctgttgagtgtgctgaagcacccggcttccttggagttccaggcccagatcaccaccctgctggtggacctgggcacacctcaggccgagatcgcccgcaacatgccgagcagcaaggacacccgcaagcggccccgcgatgactcggactccacactcaagaagatgaagctggagcccaacctgggggaggacgatgaggacaaagacttggagccaggcccgtcggggacctcgaaggcctcagcgcagatctccggccagtcagacacggacatcacagctgagttcctgcagcctctgctgacgcctgataatgtggctaatctggtcctcatcagcatggtgtacctacccgaggccatgccagcctccttccaggccatctacacccccgtggagtcagcaggcacggaagcccagatcaagcacctggctcggctcatggccacacagatgacagctgccggactgggaccaggtgtagagcagaccaaacagtgcaaggaggagcccaaggaggagaaggtggtgaagacagagagcgtcctgatcaagcggcgcctgtcagcccagggccaagccatctcggtggtgggttccctgagctccatgtcccccctggaggaagaggcaccgcaggccaagaggaggccagagcccattatccctgtcactcagccccggctggcaggcgctggtgggcgcaagaaaattttccgtctcagcgacgtgctgaagccccttaccgatgcccaggtggaagccatgaagctgggcgctgtgaagcggatcctgcgggctgagaaggctgtggcctgcagcggggcagcccaggtccgcataaagatcctggccagcctggtgacacagttcaactcgggcctgaaggcggaggtcctgtccttcatcctggaggatgtgcgggcccgcctggacctggccttcgcctggctctaccaggagtacaacgcctacctggccgcaggatcttcaccaaggttgtgctggaggcgccactcatcacagagagtgccctggaggtggtccgcaagtactgcgaggatgagagtcgcacctatctgggcatgtccacacttcgagacctgatcttcaagcgcccgtcccgccagttccagtacctgcatgtcctcctcgacctcagctcccatgagaaggacaaggtgcgctcccaggccctgctgttcatcaaacgcatgtatgagaaggagcagctgcgggagtatgtggagaaatttgccctcaactacctgcagctcctggtgcaccccaacccaccgtctgtgctgtttggagctgacaaggacacagaggtggcagcaccctggacggaggagacagtgaagcagtgtctgtacctctacctggccctcctgcctcagaaccacaagctgatccacgaactggcggccgtgtacactgaagccatcgccgacatcaagcggacggtgctgagggtcattgagcagccgatccgaggaatgggcatgaactccccggagctgctcctgctggtggaaaattgtcccaagggagcagagacactggtcacgagatgtctgcacagcctcacagacaaagtcccaccctccccagagctggtgaagcgggtccgggatctctaccacaagcgactgccagacgtccgcttcctcatcccggtgctcaatgggctggagaagaaagaggtgatccaggccctgcctaaactcatcaaactcaaccccatcgtggtgaaggaagtcttcaaccgcctgctgggcacccagcatggtgagggaaactcagccttgtccccgctgaaccctggagagctcctgatcgcattacacaacattgactccgtgaagtgcgacatgaaatccatcatcaaagccaccaacctgtgctttgcggagcggaacgtgtacacgtcagaggtgctggccgtggtgatgcagcagctgatggagcagagccccctgcccatgctgctcatgaggaccgtcatccagtccctgaccatgtacccccgcctggggggcttcgtcatgaacatcctgtcccgcctcatcatgaagcaggtgtggaagtaccccaaggtgtgggagggcttcatcaagtgctgccagcgcacaaagccccagagcttccaggtcatcctgcagctgccgccccagcagctgggagccgtctttgacaagtgcccagagctccgggagcccctgctggcccatgtccgctccttcaccccccaccagcaagctcacatccctaactccatcatgaccatcttggaggccagcggcaagcaggagccagaggccaaggaggcgcctgcggggcccttggaggaggatgatctggagcccctgaccttggccccggccccagcaccccggccccctcaggacctcatcggcctgcgactggcccaggagaaggccttaaagcggcagctggaggaggaacagaagctgaagccgggaggagtgggagccccctcctcttcctccccctctccctctccgtcggcccggccaggcccgcccccgtctgaggaagccatggatttccgggaggaggggcctgagtgcgagaccccgggcatcttcatcagcatggatgacgactcggggctgaccgaggccgcgctgttggactctagtctcgagggccccctacccaaggagacggcagcgggcgggctgaccttgaaggaggagcggagcccccagaccctcgcacctgttggagaagatgctatgaagactcccagcccggctgccgaggacgccagggaacccgaggccaaggggaacagctgacggggctcgagggggaaagggggtgggacagggactcggggctgggggacggggcggggcttgacctgcgggtgctttgccttaaaaagaaataaaagatgtgaacttgggc

SEQ ID NO: 187940 - DNA, 6537 bp, Homo sapiens
  Payload ID: 16982
  Gene Symbol: SYMPK
  Gene Name: symplekin
  ENST ID: ENST00000599814
  CDS Start-End: 1216-4392
tttttcttttttttttgtaaaacagaaacatacagtcaacactgtcttcagctttgcttgttttcacttaatgtatgcactctctatcagtgtctagagattgttctcatttttttgtttttttcttcctttcttgttacagttccatagtctttttcctttatttatatttatatgtttttcacttactttcacaggtgttgaagccccatggcctttgattatgtatgaactttttttcagccagtctccctatttgagaacacttgagttgcttctagtcttttgctattatgaatagttgtgtaattgacatatactgctacgttaatcattccataattttgcctgtgtgactgtgatggatgcctgaaagcccccttcctcccttttaaaaacagcttcatgatattccagagagtggctgaaacataattattgaagcaggccttttgtgatgtattgagtgcctactatgtgccggactctgtgcctgatattcctcagagctgtgtttttaaaagtttactctgggccaggcactgtggttcacgcctgtaatccctgcactttgggaggccgaggcaggtggaacacctgaggtcaggagtttgacaccagcctggccaacatggtgaaaccctgtctctactgaaaatacaaaaattagctgggcatggtggcatgtgcccgtaatcccagttacttgggaggctgaggcaggagaatcacttgaacctgggaggcagaggttgcagtgagctgagatcgcaccaccacactccaacctgggtgacagagcaagacttcatctcaaaaaaaaaaaaaaaagaaagtttgctgtggtgcccagtccaaagcatatcccagatggagagaggggacacacggagacctgcaaggtggctgttgcacgttcatgtggcccatcgttcagcagctgtttgtggttggcccacttgaggctgagacttctggctctgccttgggagatgtcagtctcccccaagttacaggccccgtgcacatatccataagccagagacagaccctggaggggagagggacttgagaaggcctgactggggaggaacagcctgggaaggaggcttgggccctttgtaggtgttcgggtgacaatccagcccagcccatccgctggttccctgagcttgatccatcctcttctttcctggggacaagctgacagcagccatggcgagcggcagtggagacagcgtcacccgtcggagcgtggcatcacagtttttcactcaagaggaggggccgggcatcgatggcatgaccacctcagagagggtggtggatcttctgaaccaggcggcgctgatcaccaatgactcaaagatcacagtgctcaaacaggtccaggagctgatcatcaacaaagaccccacactactggacaacttcctggatgagatcatcgcattccaagcagacaagtcaatcgaagtgcgaaaatttgtcatcggcttcatcgaggaggcatgcaagcgagacattgagttgctgctgaaactcattgcaaacctcaacatgctcttgagggacgagaatgtgaacgtggtgaagaaggctatcctcaccatgacccagctctacaaggtggccctgcagtggatggtaaagtcacgggtcattagcgagctacaggaggcctgctgggacatggtatctgccatggcgggggacatcatcctgctattggactctgacaatgacggcatccgcacccacgccatcaagtttgtggagggcctcattgtcaccctgtcaccccgcatggctgactcagagataccccgacgccaggagcatgatatcagcctggaccgcatccctcgtgaccacccctacatccagtacaacgtgctatgggaagagggcaaggcagccttggagcagctgcttaagttcatggtgcaccctgccatctcctccatcaacctgaccacagcgctgggctcccttgccaatatcgcccgccagagacccatgttcatgtctgaggtgatccaggcctatgaaactctgcatgccaacctgcccccgacgctggccaaatcgcaggtgagcagtgtgcgtaagaatctgaagctgcacctgttgagtgtgctgaagcacccggcttccttggagttccaggcccagatcaccaccctgctggtggacctgggcacacctcaggccgagatcgcccgcaacatgccgagcagcaaggacacccgcaagcggccccgcgatgactcggactccacactcaagaagatgaagctggagcccaacctgggggaggacgatgaggacaaagacttggagccaggcccgtcggggacctcgaaggcctcagcgcagatctccggccagtcagacacggacatcacagctgagttcctgcagcctctgctgacgcctgataatgtggctaatctggtcctcatcagcatggtgtacctacccgaggccatgccagcctccttccaggccatctacacccccgtggagtcagcaggcacggaagcccagatcaagcacctggctcggctcatggccacacagatgacagctgccggactgggaccaggtgtagagcagaccaaacagtgcaaggaggagcccaaggaggagaaggtggtgaagacagagagcgtcctgatcaagcggcgcctgtcagcccagggccaagccatctcggtggtgggttccctgagctccatgtcccccctggaggaagaggcaccgcaggccaagaggaggccagagcccattatccctgtcactcagccccggctggcaggcgctggtgggcgcaagaaaattttccgtctcagcgacgtgctgaagccccttaccgatgcccaggtggaagccatgaagctgggcgctgtgaagcggatcctgcgggctgagaaggctgtggcctgcagcggggcagcccaggtccgcataaagatcctggccagcctggtgacacagttcaactcgggcctgaaggcggaggtcctgtccttcatcctggaggatgtgcgggcccgcctggacctggccttcgcctggctctaccaggagtacaacgcctacctggccgcaggtgcctcgggctccctggacaagtatgaggactgcctcatccgcctgttgtctggcctgcaggagaaaccagaccagaaggatgggatcttcaccaaggttgtgctggaggcgccactcatcacagagagtgccctggaggtggtccgcaagtactgcgaggatgagagtcgcacctatctgggcatgtccacacttcgagacctgatcttcaagcgcccgtcccgccagttccagtacctgcatgtcctcctcgacctcagctcccatgagaaggacaaggtgcgctcccaggccctgctgttcatcaaacgcatgtatgagaaggagcagctgcgggagtatgtggagaaatttgccctcaactacctgcagctcctggtgcaccccaacccaccgtctgtgctgtttggagctgacaaggacacagaggtggcagcaccctggacggaggagacagtgaagcagtgtctgtacctctacctggccctcctgcctcagaaccacaagctgatccacgaactggcggccgtgtacactgaagccatcgccgacatcaagcggacggtgctgagggtcattgagcagccgatccgaggaatgggcatgaactccccggagctgctcctgctggtggaaaattgtcccaagggagcagagacactggtcacgagatgtctgcacagcctcacagacaaagtcccaccctccccagagctggtgaagcgggtccgggatctctaccacaagcgactgccagacgtccgcttcctcatcccggtgctcaatgggctggagaagaaagaggtgatccaggccctgcctaaactcatcaaactcaaccccatcgtggtgaaggaagtcttcaaccgcctgctgggcacccagcatggtgagggaaactcagccttgtccccgctgaaccctggagagctcctgatcgcattacacaacattgactccgtgaagtgcgacatgaaatccatcatcaaaggtgaggcgcttcccccccactccagtggcctggcccctgcgacgccagggcaggacctcagtcacccacatgcccccactggaatctgccaagtcaaagactgtcactcacagccccacctcagagctctggagagccacctccctccctccctccttttcttgcctcctcttccctccctccctccctccctcctccttccttcctcccaggttttaccctttacaacccacctttttctgcctctgatgtacctgctgtgccctggcacagagtgggcctaaagcagttgggtagccccacccctagccccgaggaacagaaggaagcagggcacaccgtgagtggtagaggcgcagcagcagggcagacccagggctccagggcacttgtgggccagggtaggtgaggcaggagagcttgcctgcagggcggcagggttggtgacgaactggccgcctcacgatggcccccactcactgagcactctgcgctgggctctccctgaacgcctacaggcctgagcctgctggtccgccacttggtgggtatgttcacttccattgtgtagacaggaaatggaggctccagagaggttaggtgacttactcagggccaagcagaagctaagtggtgtggtagaagaaacagaatctgaagtgaaacggacctgggtgggaatcccagctctgccggttccgcgtctaaggaccacctcccctgagagcgcccacccctccatccctcctgagcaaggtttctgggccaggagccatcctgtcccacggagctggacaccctcactgtcgccctctatactcagaagactgctgtcctttgatttctcttctcaccctcagacgggaaggggcttcctctctgtgctgcttactttcgtgttctagcttgaaacagcttttcagtgacttacttcctaaccttcctctgcaagttctctgagaaacgtttaaggtcaagagagcagcttatggaaatgtcaaacccacattataaaacccaggaggcaccaaggcctctcgtgggagaccagcagggaggaaagatctccaggctcataggccagggctgtggtcttcacattccccgacccctttggtgatctgaggaaagttctagcccattcccaggacagtatgctcatattatttgcatacagtttgagggggttcacacatacacacacacaccccaaggccatttgtggacccagattagaagccctgaggatcctaggtccagaagaaagggccttgtcggaggccacacaggccaccaggagccaggcccctgaagatccttggcccaggagaaagggccttgccagaggccacacaggccaccaggagtgaggcccccagaggggtcagcagggcctaccctacaccaccccacccttcaacacgcccaggcgtgcacgctgcaggccagacaaccctccagctggtgtccccagcacccaacccaagtttttctcctgctcaggcaccagcagtcttcctggttgcactctaagctccagatcacaaagtcgagtccttttgttgtgcactgttcactcccccgtagaccaccctgttcctctggggagcttgtctataactagacccactcctggtagtccagcattaagaaaagtcagcacctctgctcacccatatccatcctgggtagtgctggggacacaggaaagacagccctagccctgtccttccagggcttacagtccagggagagacaagaagtccctggccagtaacaactgagaggggtggcctgggactgggcagcccagaggggccatgtaacccagcctgggtgtgggacatcagggaagacttcccgaaaaaggggacactcaggctgagaccaaggaaggatgagtaggcggcagcagcaggagactgcagggaccgagggaggtgcttgctggctggttctggacctaggggacgaaggagggggcctggtcaagggaggaggtcaggctgtcgccattgggaaaggtgcccctggggcctgcccacacaggagtctcgcaggccgaggtgggaatttgaccttgtttcttgagggtctctgggaggcaagtcaggtctgagctttccaaaacacccttcaggctgctatatggagaatggatcggaggctcgggggaggcccaggtggggggctggggcaaagccgacagggaaggaagaggggaggggtgattctggagccttggggtggctgagcaggcaggaccagtgaccacctggccctgacgaggagcaggggcttcctcggtttctggcaggtcctcacctccactgtctgctctgcccattcagcctcctccccacctgtctacgcccccccccttagagaccccacccctgttctccattagcctctcaaggatttggggg

SEQ ID NO: 187941 - DNA, 5449 bp, Homo sapiens
  Payload ID: 16982
  Gene Symbol: SYMPK
  Gene Name: symplekin
  ENST ID: ENST00000599460
  CDS Start-End: 86-3262
ggcggcggcggcggcggagtgtaggaagaggcactgctgagggggcgcgaggggaacggaggccagagctgcgctgacagcagccatggcgagcggcagtggagacagcgtcacccgtcggagcgtggcatcacagtttttcactcaagaggaggggccgggcatcgatggcatgaccacctcagagagggtggtggatcttctgaaccaggcggcgctgatcaccaatgactcaaagatcacagtgctcaaacaggtccaggagctgatcatcaacaaagaccccacactactggacaacttcctggatgagatcatcgcattccaagcagacaagtcaatcgaagtgcgaaaatttgtcatcggcttcatcgaggaggcatgcaagcgagacattgagttgctgctgaaactcattgcaaacctcaacatgctcttgagggacgagaatgtgaacgtggtgaagaaggctatcctcaccatgacccagctctacaaggtggccctgcagtggatggtaaagtcacgggtcattagcgagctacaggaggcctgctgggacatggtatctgccatggcgggggacatcatcctgctattggactctgacaatgacggcatccgcacccacgccatcaagtttgtggagggcctcattgtcaccctgtcaccccgcatggctgactcagagataccccgacgccaggagcatgatatcagcctggaccgcatccctcgtgaccacccctacatccagtacaacgtgctatgggaagagggcaaggcagccttggagcagctgcttaagttcatggtgcaccctgccatctcctccatcaacctgaccacagcgctgggctcccttgccaatatcgcccgccagagacccatgttcatgtctgaggtgatccaggcctatgaaactctgcatgccaacctgcccccgacgctggccaaatcgcaggtgagcagtgtgcgtaagaatctgaagctgcacctgttgagtgtgctgaagcacccggcttccttggagttccaggcccagatcaccaccctgctggtggacctgggcacacctcaggccgagatcgcccgcaacatgccgagcagcaaggacacccgcaagcggccccgcgatgactcggactccacactcaagaagatgaagctggagcccaacctgggggaggacgatgaggacaaagacttggagccaggcccgtcggggacctcgaaggcctcagcgcagatctccggccagtcagacacggacatcacagctgagttcctgcagcctctgctgacgcctgataatgtggctaatctggtcctcatcagcatggtgtacctacccgaggccatgccagcctccttccaggccatctacacccccgtggagtcagcaggcacggaagcccagatcaagcacctggctcggctcatggccacacagatgacagctgccggactgggaccaggtgtagagcagaccaaacagtgcaaggaggagcccaaggaggagaaggtggtgaagacagagagcgtcctgatcaagcggcgcctgtcagcccagggccaagccatctcggtggtgggttccctgagctccatgtcccccctggaggaagaggcaccgcaggccaagaggaggccagagcccattatccctgtcactcagccccggctggcaggcgctggtgggcgcaagaaaattttccgtctcagcgacgtgctgaagccccttaccgatgcccaggtggaagccatgaagctgggcgctgtgaagcggatcctgcgggctgagaaggctgtggcctgcagcggggcagcccaggtccgcataaagatcctggccagcctggtgacacagttcaactcgggcctgaaggcggaggtcctgtccttcatcctggaggatgtgcgggcccgcctggacctggccttcgcctggctctaccaggagtacaacgcctacctggccgcaggtgcctcgggctccctggacaagtatgaggactgcctcatccgcctgttgtctggcctgcaggagaaaccagaccagaaggatgggatcttcaccaaggttgtgctggaggcgccactcatcacagagagtgccctggaggtggtccgcaagtactgcgaggatgagagtcgcacctatctgggcatgtccacacttcgagacctgatcttcaagcgcccgtcccgccagttccagtacctgcatgtcctcctcgacctcagctcccatgagaaggacaaggtgcgctcccaggccctgctgttcatcaaacgcatgtatgagaaggagcagctgcgggagtatgtggagaaatttgccctcaactacctgcagctcctggtgcaccccaacccaccgtctgtgctgtttggagctgacaaggacacagaggtggcagcaccctggacggaggagacagtgaagcagtgtctgtacctctacctggccctcctgcctcagaaccacaagctgatccacgaactggcggccgtgtacactgaagccatcgccgacatcaagcggacggtgctgagggtcattgagcagccgatccgaggaatgggcatgaactccccggagctgctcctgctggtggaaaattgtcccaagggagcagagacactggtcacgagatgtctgcacagcctcacagacaaagtcccaccctccccagagctggtgaagcgggtccgggatctctaccacaagcgactgccagacgtccgcttcctcatcccggtgctcaatgggctggagaagaaagaggtgatccaggccctgcctaaactcatcaaactcaaccccatcgtggtgaaggaagtcttcaaccgcctgctgggcacccagcatggtgagggaaactcagccttgtccccgctgaaccctggagagctcctgatcgcattacacaacattgactccgtgaagtgcgacatgaaatccatcatcaaaggtgaggcgcttcccccccactccagtggcctggcccctgcgacgccagggcaggacctcagtcacccacatgcccccactggaatctgccaagtcaaagactgtcactcacagccccacctcagagctctggagagccacctccctccctccctccttttcttgcctcctcttccctccctccctccctccctcctccttccttcctcccaggttttaccctttacaacccacctttttctgcctctgatgtacctgctgtgccctggcacagagtgggcctaaagcagttgggtagccccacccctagccccgaggaacagaaggaagcagggcacaccgtgagtggtagaggcgcagcagcagggcagacccagggctccagggcacttgtgggccagggtaggtgaggcaggagagcttgcctgcagggcggcagggttggtgacgaactggccgcctcacgatggcccccactcactgagcactctgcgctgggctctccctgaacgcctacaggcctgagcctgctggtccgccacttggtgggtatgttcacttccattgtgtagacaggaaatggaggctccagagaggttaggtgacttactcagggccaagcagaagctaagtggtgtggtagaagaaacagaatctgaagtgaaacggacctgggtgggaatcccagctctgccggttccgcgtctaaggaccacctcccctgagagcgcccacccctccatccctcctgagcaaggtttctgggccaggagccatcctgtcccacggagctggacaccctcactgtcgccctctatactcagaagactgctgtcctttgatttctcttctcaccctcagacgggaaggggcttcctctctgtgctgcttactttcgtgttctagcttgaaacagcttttcagtgacttacttcctaaccttcctctgcaagttctctgagaaacgtttaaggtcaagagagcagcttatggaaatgtcaaacccacattataaaacccaggaggcaccaaggcctctcgtgggagaccagcagggaggaaagatctccaggctcataggccagggctgtggtcttcacattccccgacccctttggtgatctgaggaaagttctagcccattcccaggacagtatgctcatattatttgcatacagtttgagggggttcacacatacacacacacaccccaaggccatttgtggacccagattagaagccctgaggatcctaggtccagaagaaagggccttgtcggaggccacacaggccaccaggagccaggcccctgaagatccttggcccaggagaaagggccttgccagaggccacacaggccaccaggagtgaggcccccagaggggtcagcagggcctaccctacaccaccccacccttcaacacgcccaggcgtgcacgctgcaggccagacaaccctccagctggtgtccccagcacccaacccaagtttttctcctgctcaggcaccagcagtcttcctggttgcactctaagctccagatcacaaagtcgagtccttttgttgtgcactgttcactcccccgtagaccaccctgttcctctggggagcttgtctataactagacccactcctggtagtccagcattaagaaaagtcagcacctctgctcacccatatccatcctgggtagtgctggggacacaggaaagacagccctagccctgtccttccagggcttacagtccagggagagacaagaagtccctggccagtaacaactgagaggggtggcctgggactgggcagcccagaggggccatgtaacccagcctgggtgtgggacatcagggaagacttcccgaaaaaggggacactcaggctgagaccaaggaaggatgagtaggcggcagcagcaggagactgcagggaccgagggaggtgcttgctggctggttctggacctaggggacgaaggagggggcctggtcaagggaggaggtcaggctgtcgccattgggaaaggtgcccctggggcctgcccacacaggagtctcgcaggccgaggtgggaatttgaccttgtttcttgagggtctctgggaggcaagtcaggtctgagctttccaaaacacccttcaggctgctatatggagaatggatcggaggctcgggggaggcccaggtggggggctggggcaaagccgacagggaaggaagaggggaggggtgattctggagccttggggtggctgagcaggcaggaccagtgaccacctggccctgacgaggagcaggggcttcctcggtttctggcaggtcctcacctccactgtctgctctgcccattcagcctcctccccacctgtctacgcccccccccttagagaccccacccctgttctccattagcctctcaaggatttggggggttggggtgctcttctggctcaataaagacttcctggttgac

SEQ ID NO: 187942 - DNA, 6129 bp, Homo sapiens
  Payload ID: 16983
  Gene Symbol: SYAP1
  Gene Name: synapse associated protein 1
  Uniprot ID: Q96A49
  ENST ID: ENST00000380155
  CDS Start-End: 94-1152
tctccctgggagtcgcgcagagtggagtcaaaggcaaccagtgctcgctgcggtctctggggatcgggaccgcggcggcggcccgcgagcgggatgttccggggcttgagcagttggttgggcttgcagcagccggtggcaggcggtgggcagcccaatggagatgctccacccgagcagccgtccgagacggtggctgagtctgcggaggaggagctgcagcaagcgggagaccaggagctcctccaccaggccaaagacttcggcaactatttatttaactttgcatctgctgccacaaaaaagataactgaatcagttgctgaaacagcacaaacaataaagaaatccgtagaagaaggaaaaatagatggcatcattgacaagacaattataggagattttcagaaggaacagaaaaaatttgttgaagagcaacatacaaagaagtcagaagcagctgtgcccccatgggttgacactaacgatgaagaaacaattcaacaacaaattttggccttatcagctgacaagaggaatttccttcgtgaccctccggctggcgtgcaatttaatttcgactttgatcagatgtaccccgtggccctggtcatgctccaggaggatgagctgctaagcaagatgagatttgccctcgttcctaaacttgtgaaggaagaagtgttctggaggaactacttttaccgcgtctccctgattaagcagtcagcccagctcacggccctggctgcccaacagcaggccgcagggaaggaggagaagagcaatggcagagagcaagatttgccgctggcagaggcagtacggcccaaaacgccacccgttgtaatcaaatctcagcttaaaactcaagaggatgaggaagaaatttctactagcccaggtgtttctgagtttgtcagtgatgccttcgatgcctgtaacctaaatcaggaagatctaaggaaagaaatggagcaactagtgcttgacaaaaagcaagaggagacagccgtactggaagaggattctgcagattgggaaaaagaactgcagcaggaacttcaagaatatgaagtggtgacagaatctgaaaaacgagatgaaaactgggataaggaaatagagaaaatgcttcaagaggaaaattagctgttcctgaaatagaagaataatccttaacagtctgcaaactgacattaaattctagatgttgacaattactgaatcagaaggcatgaaagagtataattttatgaaattcaaaattattcttttttcaagttgaaacttgcctcttctactttaaaaaagtatatagaacagttacttctaataatcagaaagagatgttttatagaacatttctttaatataaagttagagatgtcttcataggcagtatggctatctttgccacagaaacataagtaaaattttagagttctgttttccatgaggtcaaaaatataatttattcctcagtcatggttttctaaatatctgtactccacattccattttaattgatatgagggtgttaaagtacctacttaatgggttgattactatcaaaatgaccaaattataccaaagaacttaagaggaagcactttcagaactattcacttgccaggtattttctaaaattccacctgaaagccaaaagataaaataaataagttgattttaatgatataagcatcacacaattttacattaagaaatactgtgcaggccatgcgtggtggctcaggcctgtaatcccagcactttgggaggccgaggtgggcagatcaccggaggtcaggagttcgagaccagccttgccaacatagtgaaaccctgtctctactaaaaatacaaaaattagccgggcatggtggcaggcacctgtaatcccagctactagggaggcttttgaacccaggaggcagaggttgcagcgagctgagatcgcgccactgcactccagcctgggtgatagagtgagattcagtctcaaaaaaaaaaaaaaaaaaaagctgtgcgaaaatatttgtttttctctggggccttttctttcttttctttttaaactataccagaaattttacatcacagtttttatacaaagtgggaccttccatactttttgtattacaataaccttcagaagcccattccccttaaagtctgttgttcttgttttaatcatcaccacatataaatgttttagctttgtcttaaactgtgagtcttcataaaattgtgttcctccgagttcaccttctaggactttattgattaatccttctctttctgctataccagcagacacatattcatagaatatgattatttttaaagaacaaggtgaggaggctgaggcaggagaattgcttgaacctgggagatggaggttgcagtgagctgagatcacgccactgcactccagcctgggtgacagagtgagagactccgtctcaaaaatgaatgaatgaatgaatgaatgaatgaacgaacgaacaaggtggtttaatgtcagaaaacttcctaagcatttgctccccaaacctttcatgtttttcaagaagcctttattacataaaggggaatagaattaaaatgtttctttataagaaaaatatacatatttgtgttcttggccccattaaaactagtcagtagtcctttggcaaagatatagtcaacaagagaactgggtatgagtccaggcattactcctgttcatagttgtggatgcatgtgtctgagccagactgtctcaactggagtctcttgggttatagcagtaaacccgtgtattccatgaaaccactgggcccatcatcaaaaggtttccacttgtggtgccacagttgcttattactgagtttgggttccaagatgactggcaacttctgaaataatctcattgaaggaaagagtttcattttttttttaaaagagtttgctggaggaaaagaagcatgttaaatgtttttaagcagctaaaagtcctagatggaagcatatcaggatgtgtcggtgcttggctcttagtgaatgcactaaaattcttattgataaatgttgaataaacacacacaaaaaagtatcagagaaagagaaaaaccctacaatggcaatagaggtgtgtgacagttattgctatcaattttacataatatctcatttaaaaacaacctaattatgcattgcctgtgaaaataaaaggataaaataagattttgtacatactgtaagaatacagttgtgctgtatttttatggattcatcaaggagtaaaatgttctgctttagtaaattatataggtaactgaagtgttattcctttaaagagcaaaataatttatcaccatgtttggtggaaaatttctaagtatttattacatgcctaggggttagccaacaagatataccaagcatgaaaacctgtaaaacttaataaaatgctaaaatatgaacatcacactatggagattatgcctcactactcaaagagtgtggctcaggaaccagtgtagcttggccatgccctggcagtatgttggaaatgcctgccccagaccagttgatgttactaagaacgcccaggggatgagaatggactttatttacagtttgggaagcactggtctaatatgctctcagggaagctgaggtttctactgctttttactttttacccttccactagatgtcctttgcagcagtgtttttctagttggcattacaggtgtctcctctgaggttccagttatttctatactaccaaaattaaaaagacccaagggctgggcatggtggttcacacctgtaatcccagcactttgggaggctgaggcaggcagattgcttgagctcaggagttcaagaccagcctgggcaacatagggagacccctgcctctacaaaaatacaaatgagccaggtgtggtagcccacacctgtggtcctagctacttggaaggctgaggcaggaggatcgcttgagcccaggagatccaggctgcagtaagccatgatcatgccactgcacttcagcctgggtgacagagactctgtttcaaaaaagggagggggggcaagtttttagggggatgagaaatattcttggtaaatcgggcatttctttttttgtttgtttttttttcttggagacagaatcttgctctgtcacccaggctggagtgcagtggcttgatctcagctcacggcaacctccgcctcccaagttcaagcgattctcccacctcagcctccagagtagctgggattacaggcaaccgccaccatgcccagctaatttttttgtatttttagcagagatggggtttcaccgtgttggccaggctggtctcaagctcctgatctcaaatgatccgcacgccttgacctcccaaagtgttgggattacaggcatgagccacagccttaattggtaatttttgaaaaaaaaactagagaaacattgtttcagagataaagcagcaattacacttgtactcccagtgatttaagatgcactattgtaatcaagatgatttgctttaatcaaaatattgttaaaaataggatttcaggacatttaaaaggtttcagcagaaatcttatgattatgtctgacttgcagtattttatttgcctctttgacggctttttttttttttttttttttgagacagagtctcacactgttgcctgggctggaatgcaatggcgcagtctcagctcactgcaaacctccggctcccgggttcaggcagttctcctgcctcagcctccctagtagctgggattataggcatgtgccaccacacccggctaatttttgtatttttagtagagacagggtttcgccatgttggtcaggctggtcttgaactcccaacctcaggtgatccgcccgcctcggcctcccaaagtgctgggattacaggcgtgagccactgcgcccaaccttaatggctttttggtattaaaaaccaggactctgaatgtgcatcaataattcaaataattttatatagttactctttctagtaatagatacccccctccatttttaagtaaagataaacattttttaattaggaaaattaggcacatttaattttagcaaatttagtttttcaacttttttttttttctttttttttttttttgagatggaggctcactctgttgccctggctggagtgcagtggccgcaacctcggctcactgcaacctccgcctcctgggttcaagtgattctcctgcctcagcctcccgagtagctgggattacaggcgtgtgccaccacacctggctaatttttgtatttttagtagagacggggtttcaccatgttggccaggctggtcttgaacgactggcctcaggtgatccgcccacctcggcctctcaaagtgctgggattacaggcatgagccaccatgcccagccagtttttcaacttttaaaaataaaagtggtagaatttttttttttctttttgagacagggtcttgctctgtcactcaggctagagtgcagtggtgggatctcagctcactgcagcctccgcctcccaggcttaagggatcctccctcctcagcctcccgagtagctgggaccacaggcatgcaccaccacgcctggctaatttttgtattttttgtagagatgggtgtctccccatgttgctcaggctgttcttgaacttctgagctcaggtgatctatctgcctcggccttccaaagtgctgggattacaggcatgatgagccactgcacctggccaaaagtggcagaaattttgatatggtttataatcagttttattgtggggaagatgggccattttaatgaatgattatttctattggctaaactaccgagtcacgacatgacaaatacacatgaagctttaatcacatgcagttatatacttctcacaaatcatcaaattatttatctggtcttcacactaagggatttacttagataagccatcgatgatttcagttgttaaaagtgtggctttttaaacagcatttattcagtgcatcctgatttatttcaaaatgaaaaattgttacctttttttctgaataaataaagcttacttttagtggcaa

SEQ ID NO: 187943 - DNA, 3264 bp, Homo sapiens
  Payload ID: 16984
  Gene Symbol: SYDE1
  Gene Name: synapse defective 1, Rho GTPase, homolog 1 (C. elegans)
  Uniprot ID: Q6ZW31
  ENST ID: ENST00000342784
  CDS Start-End: 32-2239
gcactcggctcggcccggcccgggccgcagcatggccgagccgctactcaggaaaaccttctcccgcctgcggggccgggagaaacttccccggaaaaagtcggacgccaaggagcgcggccacccagcccagcgcccagagcccagccctccagagccagagccccaggctcccgaagggtcccaggccggagcagaggggccctccagccccgaggcatcaaggagccctgcacggggagcctacctgcaaagcctggagcccagtagccgccgatgggtgctgggtggggccaagccagctgaggacacctctttagggcctggggtacctggcactggggagcccgccggcgagatctggtacaaccccatccctgaggaagaccccagacctccagcacctgagcccccggggccacagcctggctcagctgagtcagagggcctggccccccaaggtgcagcccccgccagccccccaaccaaagcctcccgcaccaagtccccgggccccgccaggcgcctctccataaagatgaagaagctgccggaactgcggcgccgcctgagcctgcgaggcccccgggctggcagggagcgcgagagggctgcccctgcgggctccgtcatcagccgctaccacctggacagcagcgtggggggccccgggccggcagcagggcctgggggcacccggagcccgagggccggttacctcagcgacggggactcaccggagcgcccagctgggcccccatcacccacctccttccggccctacgaggtgggtcccgcagcccgggcacccccggccgcactctggggccgcctcagcctgcacctgtacggtctcggggggctgcggccagcgccgggggccacccccagggacctctgctgcctactgcaagtggatggggaggccagggcccgaacagggccactgcgaggggggccggacttcctgcggctggaccacaccttccacctggagctggaggccgccaggctcctgcgcgccctggtgcttgcgtgggaccctggcgtgagaaggcaccggccctgtgcccagggcaccgtgctgctgcccacggtcttccgagggtgccaggcccaacagctggccgtgcgcctggagcctcaggggctgctgtatgccaagctgaccctgtcggagcagcaggaagcccctgccacagctgagccccgcgtctttgggctgcccctgccactgctggtggagcgggagcggccccccggccaggtgcccctcatcatccagaagtgcgttgggcagatcgagcgccgagggctgcgggtagtgggactgtaccgtctttgtggctcagcggcagtgaagaaagagcttcgggatgcctttgagcgggacagtgcagcggtctgcctatctgaggacctgtaccccgatatcaatgtcatcactggcatcctcaaggattatcttcgagagttgcccaccccactcatcacccagcccctgtataaggtggtactggaggccatggcccgggaccccccaaacagagttccccccaccactgagggcacccgagggctcctcagctgcctgccagatgtggaaagggccacgctgacgcttctcctggaccacctgcgcctcgtctcctccttccatgcctacaaccgcatgaccccacagaacttggccgtgtgcttcgggcctgtgctgctgccggcacgccaggcgcccacaaggcctcgtgcccgcagctccggcccaggccttgccagtgcagtggacttcaagcaccacatcgaggtgctgcactacctgctgcagtcttggccagatccccgcctgccccgacaatctccagatgtcgcgccttacttgcgacccaaacgacagccacctctgcacctgccgctggcagaccccgaagtggtgactcggccccgcggtcgaggaggccccgaaagccccccgagcaaccgctacgccggcgactggagcgtttgcgggcgggacttcctgccctgtgggcgggatttcctgtccgggccagactacgaccacgtgacgggcagtgacagcgaggacgaggacgaggaggtcggcgagccgagggtcaccggtgacttcgaagacgacttcgatgcgcccttcaacccgcacctgaatctcaaagacttcgacgccctcatcctggatctggagagagagctctccaagcaaatcaacgtgtgcctctgagccagatgacggggtgggaccccggttagtaaggaccgggcgcccagtggctaaggcggtgccctggtgaccaaggagagccagacctgttgctcaggccgagctcctggttgccagcgagttaccacgggaccagtcgcgtgtatggctgagactcattcccagtttccagggcccggtatttggacactagttgccaagtctggggcctggggattttagggaccagcggttgtgaccatctttcctgagcaccaagggcttccccttttgttgccaaaaaggtagttctcgcgcttgctaggctggcctctcttgcctccccttggccggggcaacaccagttactgtgagcatcaccctggtgtggtgagtcacctctagtcggccctcttgctgctgccaaccaaatcagtattagctttgagcactgcactgtttctccctcccttggacgacacaaagactagcatgaggcactgtttgtggggggcagcccctatcctgggttccagcatggacacaggggtagcctggggcttatagagaaacagctggtttcccctacccttttccggggaagtccccacgattggcctctagtcagcaaatggagataacagagtctggcctttccaatccccatctccttgccccccccttgcccccccccccgaaaaaaattgagcacttaaacccctcccttttggagggggccccctgaagcgtcaggctgggggcagtctggtacggaacatatttattgcctccatgcatgtgtgtgtgtgtctgtgaggactggtgtgcgtggacacgtctgaagcaggcgtgtggggctctttcagggaccacagaggagggagcagtttgcagtgcccagccaccctgaaatccccaataatggtgcctcagtgggccccagagttccagtgggagagtacggttccctcctgtctccctcttcttttccgcacctccatctttgtggataataaataaatatgcacaggttctgagactgagta

SEQ ID NO: 187944 - DNA, 3832 bp, Homo sapiens
  Payload ID: 16984
  Gene Symbol: SYDE1
  Gene Name: synapse defective 1, Rho GTPase, homolog 1 (C. elegans)
  ENST ID: ENST00000600252
  CDS Start-End: 1643-2821
ttttgggatgccagggactgagtagggggtgctctaagctgataactgagatcgctagcctgtggctgcctattccaaacaaaacagcaggatccaaggaaccatgacttatcaggggccggccagggccgtacacagcatcccacccactgatcaattgcacagggctgctctgcaggcagtgaggggctgggtgggtctcactccccttgctctctgccaggccacccagcccagcgcccagagcccagccctccagagccagagccccaggctcccgaagggtcccaggccggagcagaggggccctccagccccgaggcatcaaggagccctgcacggggagcctacctgcaaagcctggagcccagtagccgccgatgggtgctgggtggggccaagccagctgaggacacctctttagggcctggggtacctggcactggggagcccgccggcgagatctggtacaaccccatccctgaggaagaccccagacctccagcacctgagcccccggggccacagcctggctcagctgagtcagagggcctggccccccaaggtaagaacaagcttcccatccccttccccaaggtgagcaccagctccacatcccttcccttcagggtagcaccagcctcacactccctcctcccagaggagcaccaacctcacactccttcccttcaggggagcaccagcctcacatccccaccccgtcagatgctcccagaggagcatcagcctcacaccctcctccccgccaggggaacaccagcctcacactccttcccttcaggggagcaccagcctcacccccctcccctaagcccaggttcctggaccctgaagtctgctctccacacaggtgcagcccccgccagccccccaaccaaagcctcccgcaccaagtccccgggccccgccaggcgcctctccataaagatgaagaagctgccggaactgcggcgccgcctgagcctgcgaggcccccgggctggcagggagcgcgagagggctgcccctgcgggctccgtcatcagccgctaccacctggacagcagcgtggggggccccgggccggcagcagggcctgggggcacccggagcccgagggccggttacctcagcgacggggactcaccggagcgcccagctgggcccccatcacccacctccttccggccctacgaggtgggtcccgcagcccgggcacccccggccgcactctggggccgcctcagcctgcacctgtacggtctcggggggctgcggccagcgccgggggccacccccagggacctctgctgcctactgcaagtggatggggaggccagggcccgaacagggccactgcgaggggggccggacttcctgcggctggaccacaccttccacctggagctggaggccgccaggctcctgcgcgccctggtgcttgcgtgggaccctggcgtgagaaggcaccggccctgtgcccagggcaccgtgctgctgcccacggtcttccgaggtaggacatgcggctgcaggggaggaggggcagggacccccaaaccccaccgccaccccccgcagagtgcctagggggctgggctccgggcggaaggtgtggcctggagcagcgaggccagggtacatgaagcttcagagcacacccggctcaggcccccttgtgtcctcagggtgccaggcccaacagctggccgtgcgcctggagcctcaggggctgctgtatgccaagctgaccctgtcggagcagcaggaagcccctgccacagctgagccccgcgtctttgggctgcccctgccactgctggtggagcgggagcggccccccggccaggtgcccctcatcatccagaagtgcgttgggcagatcgagcgccgagggctgcgggtagtgggactgtaccgtctttgtggctcagcggcagtgaagaaagagcttcgggatgcctttgagcgggacagtgcagcggtctgcctatctgaggacctgtaccccgatatcaatgtcatcactggcatcctcaaggattatcttcgagagttgcccaccccactcatcacccagcccctgtataaggtggtactggaggccatggcccgggaccccccaaacagagttccccccaccactgagggcacccgagggctcctcagctgcctgccagatgtggaaagggccacgctgacgcttctcctggaccacctgcgcctcgtctcctccttccatgcctacaaccgcatgaccccacagaacttggccgtgtgcttcgggcctgtgctgctgccggcacgccaggcgcccacaaggcctcgtgcccgcagctccggcccaggccttgccagtgcagtggacttcaagcaccacatcgaggtgctgcactacctgctgcagtcttggccagatccccgcctgccccgacaatctccagatgtcgcgccttacttgcgacccaaacgacagccacctctgcacctgccgctggcagaccccgaagtggtgactcggccccgcggtcgaggaggccccgaaagccccccgagcaaccgctacgccggcgactggagcgtttgcgggcgggacttcctgccctgtgggcgggatttcctgtccgggccagactacgaccacgtgacgggcagtgacagcgaggacgaggacgaggaggtcggcgagccgagggtcaccggtgacttcgaagacgacttcgatgcgcccttcaacccgcacctgaatctcaaagacttcgacgccctcatcctggatctggagagagagctctccaagcaaatcaacgtgtgcctctgagccagatgacggggtgggaccccggttagtaaggaccgggcgcccagtggctaaggcggtgccctggtgaccaaggagagccagacctgttgctcaggccgagctcctggttgccagcgagttaccacgggaccagtcgcgtgtatggctgagactcattcccagtttccagggcccggtatttggacactagttgccaagtctggggcctggggattttagggaccagcggttgtgaccatctttcctgagcaccaagggcttccccttttgttgccaaaaaggtagttctcgcgcttgctaggctggcctctcttgcctccccttggccggggcaacaccagttactgtgagcatcaccctggtgtggtgagtcacctctagtcggccctcttgctgctgccaaccaaatcagtattagctttgagcactgcactgtttctccctcccttggacgacacaaagactagcatgaggcactgtttgtggggggcagcccctatcctgggttccagcatggacacaggggtagcctggggcttatagagaaacagctggtttcccctacccttttccggggaagtccccacgattggcctctagtcagcaaatggagataacagagtctggcctttccaatccccatctccttgccccccccttgcccccccccccgaaaaaaattgagcacttaaacccctcccttttggagggggccccctgaagcgtcaggctgggggcagtctggtacggaacatatttattgcctccatgcatgtgtgtgtgtgtctgtgaggactggtgtgcgtggacacgtctgaagcaggcgtgtggggctctttcagggaccacagaggagggagcagtttgcagtgcccagccaccctgaaatccccaataatggtgcctcagtgggccccagagttccagtgggagagtacggttccctcctgtctccctcttcttttccgcacctccatctttgtggataataaataaatatgcacaggt

SEQ ID NO: 187945 - DNA, 3058 bp, Homo sapiens
  Payload ID: 16984
  Gene Symbol: SYDE1
  Gene Name: synapse defective 1, Rho GTPase, homolog 1 (C. elegans)
  Uniprot ID: Q6ZW31
  ENST ID: ENST00000600440
  CDS Start-End: 30-2036
actcggctcggcccggcccgggccgcagcatggccgagccgctactcaggaaaaccttctcccgcctgcggggccgggagaaacttccccggaaaaagtcggacgccaaggagcgcgggcctggggtacctggcactggggagcccgccggcgagatctggtacaaccccatccctgaggaagaccccagacctccagcacctgagcccccggggccacagcctggctcagctgagtcagagggcctggccccccaaggtgcagcccccgccagccccccaaccaaagcctcccgcaccaagtccccgggccccgccaggcgcctctccataaagatgaagaagctgccggaactgcggcgccgcctgagcctgcgaggcccccgggctggcagggagcgcgagagggctgcccctgcgggctccgtcatcagccgctaccacctggacagcagcgtggggggccccgggccggcagcagggcctgggggcacccggagcccgagggccggttacctcagcgacggggactcaccggagcgcccagctgggcccccatcacccacctccttccggccctacgaggtgggtcccgcagcccgggcacccccggccgcactctggggccgcctcagcctgcacctgtacggtctcggggggctgcggccagcgccgggggccacccccagggacctctgctgcctactgcaagtggatggggaggccagggcccgaacagggccactgcgaggggggccggacttcctgcggctggaccacaccttccacctggagctggaggccgccaggctcctgcgcgccctggtgcttgcgtgggaccctggcgtgagaaggcaccggccctgtgcccagggcaccgtgctgctgcccacggtcttccgagggtgccaggcccaacagctggccgtgcgcctggagcctcaggggctgctgtatgccaagctgaccctgtcggagcagcaggaagcccctgccacagctgagccccgcgtctttgggctgcccctgccactgctggtggagcgggagcggccccccggccaggtgcccctcatcatccagaagtgcgttgggcagatcgagcgccgagggctgcgggtagtgggactgtaccgtctttgtggctcagcggcagtgaagaaagagcttcgggatgcctttgagcgggacagtgcagcggtctgcctatctgaggacctgtaccccgatatcaatgtcatcactggcatcctcaaggattatcttcgagagttgcccaccccactcatcacccagcccctgtataaggtggtactggaggccatggcccgggaccccccaaacagagttccccccaccactgagggcacccgagggctcctcagctgcctgccagatgtggaaagggccacgctgacgcttctcctggaccacctgcgcctcgtctcctccttccatgcctacaaccgcatgaccccacagaacttggccgtgtgcttcgggcctgtgctgctgccggcacgccaggcgcccacaaggcctcgtgcccgcagctccggcccaggccttgccagtgcagtggacttcaagcaccacatcgaggtgctgcactacctgctgcagtcttggccagatccccgcctgccccgacaatctccagatgtcgcgccttacttgcgacccaaacgacagccacctctgcacctgccgctggcagaccccgaagtggtgactcggccccgcggtcgaggaggccccgaaagccccccgagcaaccgctacgccggcgactggagcgtttgcgggcgggacttcctgccctgtgggcgggatttcctgtccgggccagactacgaccacgtgacgggcagtgacagcgaggacgaggacgaggaggtcggcgagccgagggtcaccggtgacttcgaagacgacttcgatgcgcccttcaacccgcacctgaatctcaaagacttcgacgccctcatcctggatctggagagagagctctccaagcaaatcaacgtgtgcctctgagccagatgacggggtgggaccccggttagtaaggaccgggcgcccagtggctaaggcggtgccctggtgaccaaggagagccagacctgttgctcaggccgagctcctggttgccagcgagttaccacgggaccagtcgcgtgtatggctgagactcattcccagtttccagggcccggtatttggacactagttgccaagtctggggcctggggattttagggaccagcggttgtgaccatctttcctgagcaccaagggcttccccttttgttgccaaaaaggtagttctcgcgcttgctaggctggcctctcttgcctccccttggccggggcaacaccagttactgtgagcatcaccctggtgtggtgagtcacctctagtcggccctcttgctgctgccaaccaaatcagtattagctttgagcactgcactgtttctccctcccttggacgacacaaagactagcatgaggcactgtttgtggggggcagcccctatcctgggttccagcatggacacaggggtagcctggggcttatagagaaacagctggtttcccctacccttttccggggaagtccccacgattggcctctagtcagcaaatggagataacagagtctggcctttccaatccccatctccttgccccccccttgcccccccccccgaaaaaaattgagcacttaaacccctcccttttggagggggccccctgaagcgtcaggctgggggcagtctggtacggaacatatttattgcctccatgcatgtgtgtgtgtgtctgtgaggactggtgtgcgtggacacgtctgaagcaggcgtgtggggctctttcagggaccacagaggagggagcagtttgcagtgcccagccaccctgaaatccccaataatggtgcctcagtgggccccagagttccagtgggagagtacggttccctcctgtctccctcttcttttccgcacctccatctttgtggataataaataaatatgcacaggttctgagactga

SEQ ID NO: 187946 - DNA, 571 bp, Homo sapiens
  Payload ID: 16984
  Gene Symbol: SYDE1
  Gene Name: synapse defective 1, Rho GTPase, homolog 1 (C. elegans)
  ENST ID: ENST00000602203
  CDS Start-End: 1-571
tgaccctgtcggagcagcaggaagcccctgccacagctgagccccgcgtctttgggctgcccctgccactgctggtggagcgggagcggccccccggccaggtgcccctcatcatccagaagtgcgttgggcagatcgagcgccgagggctgcgggtagtgggactgtaccgtctttgtggctcagcggcagtgaagaaagagcttcgggatgcctttgagcgggacagtgcagcggtctgcctatctgaggacctgtaccccgatatcaatgtcatcactggccacgctgacgcttctcctggaccacctgcgcctcgtctcctccttccatgcctacaaccgcatgaccccacagaacttggccgtgtgcttcgggcctgtgctgctgccggcacgccaggcgcccacaaggcctcgtgcccgcagctccggcccaggccttgccagtgcagtggacttcaagcaccacatcgaggtgctgcactacctgctgcagtcttggccagatccccgcctgccccgacaatctccagatgtcgcgccttacttgcgacccaaacgacagccac

SEQ ID NO: 187947 - DNA, 539 bp, Homo sapiens
  Payload ID: 16984
  Gene Symbol: SYDE1
  Gene Name: synapse defective 1, Rho GTPase, homolog 1 (C. elegans)
  ENST ID: ENST00000597977
  CDS Start-End: 30-539
actcggctcggcccggcccgggccgcagcatggccgagccgctactcaggaaaaccttctcccgcctgcggggccgggagaaacttccccggaaaaagtcggacgccaaggagcgcggccacccagcccagcgcccagagcccagccctccagagccagagccccaggctcccgaagggtcccaggccggagcagaggggccctccagccccgaggcatcaaggagccctgcacggggagcctacctgcaaagcctggagcccagtagccgccgatgggtgctgggtggggccaagccagctgaggacacctctttagggcctggggtacctggcactggggagcccgccggcgagatctggtacaaccccatccctgaggaagaccccagacctccagcacctgagcccccggggccacagcctggctcagctgagtcagagggcctggccccccaaggtaagaacaagcttcccatccccttccccaaggtgagcaccagctccacatcccttcccttcagggtagcaccagcctca

SEQ ID NO: 187948 - DNA, 5512 bp, Homo sapiens
  Payload ID: 16985
  Gene Symbol: SYDE2
  Gene Name: synapse defective 1, Rho GTPase, homolog 2 (C. elegans)
  Uniprot ID: Q5VT97
  ENST ID: ENST00000341460
  CDS Start-End: 51-3635
gcaggctgcggacccagttgcgagaggcctattatctgctgatccaggccatgcacgacctgccccctgactcgggcgcgcggcggggcggcaggggcttggcggatcacagcttccccgcgggagcccgggctccgggccagccgccttcccgcggcgccgcgtaccgccgagcctgcccccgggacggggagcggggaggcggcggacgccctcggcagcaggtgtccccgccccggtcgcctcagagggagccgcggggaggccagctgcggactcctcggatgcggccgtcctgcagcagaagcctcgagagcctccgggtgggtgccaagccgcctcccttccagcggtggccgagcgacagctggatcaggtgcggcgcgcaccgggactgggacgagcccccgccacgtggaggcaggatggacggctggagtggggaccgcgcccgggcggctgcacccaccggcctccagcctccaggctgcaaggaccacggctgctcctcgggaagccctttcagggatccagcggggtcctctgtgatacgcagtggcaaaggagaccgccaggaaggcccctccttcctcaggccgccggcagtgacagtcaagaagctgcagaagtggatgtacaaagggcgtctgctgtccctgggaatgaagggtcgtgcccgtgggacggctcccaaagtcacaggaacgcaggcagcctccccaaatgtgggcgctttgaaagtgcgtgaaaaccgtgtcctgtcggtgcctccagaccaaagaattacgctgacagatttatttgaaaatgcctatgggtcttcaatgaagggaagagaacttgaagagctgaaggataatattgaattcagaggtcataagccacttaacagcatcactgtttcaaagaaacgcaattggctatatcagagtactctgaggcctcttaatctggaagaagaaaataagaaatgccaagatagaagtcatttatccatctcacctgtgtctctacctaaacatcagctatcacagtctttcctcaaatcatctaaagagtactgtacatatgtggtatgtaacgctacaaactcttcattatcgaaaaactgtgctttagattttaatgaggaaaatgatgcagatgatgaaggagaaatatggtacaatcccattcctgaggatgatgaccttggtatatcaagtgccttgagttttggtgaggccgactctgctgttctgaagctccctgctgtcaatttgagcatgttgtctggcagtgacctgatgaaagcagagcggcatactgaagactcactgtgctcttccgaacatgcaggtgatattcagaccacacggtcaaatggaatgaatcctatacatcctgcccattccacagaatttgtgcagcagtacaagcaaaagctaggacacaagacacaagaaggtataatggtggaggacagtcccatgttgaaatctccttttgcaggttctgggatcctggctgctacaaatagtactgaattgggaattatggaaccatcttctccaaatcctagccctgtgaaaaaaggcagttcaattaattggtcattgccagataaaataaaatctccacgaactgtgaggaaactttccatgaaaatgaaaaagttgccagaatttagccgaaagctaagcgttaagggaacattgaattatataaacagtccagataatactccttctttgtctaaatataactgccgagaagttcatcatactgatattctgccctctgggaacacaaccaccgctgctaagaggaatgttataagccgataccatcttgataccagtgtatcctcccagcagagctaccagaagaaaaactctatgagttctaagtattcctgcaaaggtggttaccttagtgatggagactcacctgaacttacaactaaagctagcaaacatggatctgaaaacaaatttggaaaaggaaaagaaataatttcaaatagttgtagcaagaatgaaatagacattgatgcttttaggcattatagcttttctgatcaacctaagtgttcacagtacatatctgggctcatgagtgtacatttctatggtgctgaggatttaaaaccacctcggatagattcaaaagacgtcttttgtgcaattcaggtagattcagtaaacaaagcaagaacagctttgctcacatgccgaacaacatttttagacatggatcacactttcaacatagaaattgaaaatgcacaacatttgaaactagtagtattcagttgggaacccactccaagaaaaaatcgagtttgttgtcatggaactgttgttcttcccaccttatttagagtgacaaagactcatcagttggctgtcaaacttgaacctagaggtcttatttatgtgaaagtgactcttatggaacagtgggagaattctcttcatggactagatataaaccaagaaccaataatatttggagttgatattcaaaaagttgtagagaaagaaaatataggactgatggtgccccttctgatacagaaatgtattatggaaattgaaaagagaggctgtcaggtagtaggcctgtatcgattatgtggttcggcagcagtcaagaaagaactgcgagaggcttttgagagagatagcaaagctgttggtctgtgtgaaaaccagtacccagatataaatgtaataacaggtgttcttaaggattatttaagagaactcccttctcctctgataacaaagcagctttatgaggctgtattagatgcaatggcaaaaagtcctttgaaaatgtcatcaaatggttgtgagaatgacccaggtgactctaagtacactgttgacctgctggattgtctgccagagattgagaaggcaaccctaaagatgttgttggatcatttgaaattggtggcttcctatcatgaagtgaataagatgacgtgccagaatttggctgtgtgctttggaccagtattattaagtcagaggcaagagccttccacccataacaacagagtctttactgattcagaagaacttgcaagtgctttggattttaaaaaacacattgaagttcttcattacttactccaactctggccagtgcagcgtttaactgtcaaaaaatcaacagacaatttattcccagagcagaagtcttctctgaattatctgaggcagaagaaagaacgacctcatatgttaaatttgagtggtactgattcatcaggagtacttaggccaaggcaaaaccgattagacagtccacttagcaatcgttatgcaggagactggagcagctgtggggaaaactactttttaaatacaaaagaaaatttaaatgatgtggattatgatgatgtcccttcagaagatagaaaaatcggagaaaattatagcaaaatggatgggccagaagtaatgattgaacagccaattcccatgtccaaagagtgtacatttcagacatatttgacaatgcagacagttgagtctacagtggatcgaaaaaacaatctcaaagatctacaagaaagtattgatactttgattggaaatctggaacgtgagctcaacaaaaacaagcttaatatgagtttttgagattgagggtttttttttgtaatgtcttaaagtttcaaatctgtttttgttttattttcttataccacccacagcgatgttttcatttttttactcttgaaatctttaattaatttttaataagtttatctgattcaattaaaaacactattcattaatacaatttttacttatctcactagaaaacttttctggggatcaataaaacttggacttcttgggatattttactaaatcttgccaactctatggagataactttcaaatgcacttaagaaggttcacataagttattagcccctcaaggtttttctgctttatgggaaccactcttctgtagctgagacagatgtccttttttttgttgttttttgagacagagtctcactctgtcgcccaggctggagtgcactggtgcgatctcaggtcactgcaacctccacctccctggttcaagtgattctcctgccacagcctcccgagtagctgtgatgacggggcccaccaccatgcccagctaattattgtatttttagtaaagatggggtttcaccatgttggccaggctggtctcgaactcctgatctcagatgatccgcccaccttggcctcccaaagtgctgggattacaggcgtgagccactgcgcctggcctctagatgttcttttagaggaacatcacagctgctcagtctgatttgcagtactggtcctggtacactgcaacatcctttggtcaaattttatttgtaatgcaaatgctgctataagaaaatctttttataaataaaagtgaaattatacaagtattaatgttttctgtattaacagtaattatttaagcttataaaaattaaatatttttataatcctgaaactgtatatatttataaatgcatatatgtatagatatcaggatgggggaggggttattgtagaatcacatgtatttttaaagtatatatgtcatgaggccaaaattattatcttaaagtatttttttcagggaaagaacatttaaattaaaggaggaattacataaaaacacttgaacaataatactctagaagcatctgaatagaaataatagactttctttcctttattcacagaaagtcacaatgtcccctgggaaaagtcatcttttaaatttgaaatcctctaactccttaagggattaagtacccagatttctgcactggtgacttagatttaataaatctgctcctgttctatgcatttttatattctgctttgttttaattatttatttgtagtagtacatttataacattgactttataattacccccatttgtttctaaatagtcttgccagcatattacatgttactgatttttaaaaattaacttattttggctaagtatatatacaatgttatagaatcacagtaatgtttgaaaatgtaaatttagaaggcttttgtattaaatcaaaatgtatttttttaacttttatatctacagaatatgtaattttaaaattataaatagactttaagttaccaacttttaagacatggcagccattgaaaaactggcttcctgatgtttttctaaatattaaagtacttaaaatatttctatgcaataaatattgataaacagacattatttaatttgaaaacccattgttaaaaaagataaatatttttatatgaaattttcattttttaaaactttgtgttaacaattcagaagaataccaagagaacatatatattgagtaaacagtcaaaggaaagtactcttgaatgttttataggaaagctgtctcagtttccttccttttgttgctatatcatgtatgaattgaataaattgctctagaaatgtaaaaattttattaaaatatta

SEQ ID NO: 187949 - DNA, 2522 bp, Homo sapiens
  Payload ID: 16986
  Gene Symbol: SYNDIG1
  Gene Name: synapse differentiation inducing 1
  Uniprot ID: Q9H7V2
  ENST ID: ENST00000376862
  CDS Start-End: 634-1410
agacactggccgcgggccaccatctggacgcgatcccccgctagggcctccctggtctgggccaaagttggtggccaccttcgcgcgggctgcgccctccttctcttccctgccctcctcccccggggcccgcgcccgctgcctccagcacgcgcgtcggcaggctcggcaagcgaagaggagcggctcgccccagggcgcccctcgcccagcctgccggccaggcgagcgcgacgagagtctccccgcaccccttcctctcccgggggccgagagggttgggctccgccccggcgccgcagctcccgactccccgccgctcgggctgccgccgctgccccgcgcccggcgctcggggcagccgggggcgcaggcggagagcgcagggcggggagaggcgtggggagcagagcggcgctgaggggagggcagaggaggagagagcctggcagcggaggagcagaggcgggcgccgcaccgccccgcacgctcgctcgctcgggagagtcgcgggcggccgcttgggcgcacttgccgggtcaccttgtcccggaggagaaatggcttccctgaggcaagtgtaacctacattcccagcccaccagcctgacgcccagccagggagagagtaccatggatggcatcattgaacagaagagcatgctggtgcacagtaaaatcagtgatgctggcaagaggaatggtttaattaacaccagaaacttgatggccgagagcagagatggtctggtgtctgtttacccagcgccccagtaccagagccaccgggtgggggccagcacagtgccggccagcctggacagcagcaggagtgagccgatgcagcagctgctggaccccaacaccctgcagcagtcagtggagtcccgctaccggcccaacatcatcctctattcagagggcgtgctgcgctcctggggggacggtgtggccgccgactgctgcgagaccaccttcatcgaggaccggtcgcccaccaaagacagcctcgagtacccggatgggaagttcattgacctctcagctgatgacataaaaatccacaccctgtcctacgatgtggaggaggaggaggagttccaggagctggagagcgactactcaagcgacacagagagtgaggacaatttcctcatgatgcccccgcgggaccacctgggcctcagtgtcttctccatgctctgctgcttctggcctctgggcatcgcagccttctacttgtcccatgagaccaacaaagccgtggccaagggggacttgcaccaggccagcaccagctcccggcgggccctattcctggcagtgctgtccatcaccattgggactggcgtctatgtgggcgtggccgtggccctcatcgcctacctctccaagaacaaccacctgtgagcttcctgcgaatggagggggagcacccggggccaggtctgtgtggacgtggaggaagcaggcataccgcatgatgctgtacagtacaaatgattgccaaatgatgccacgaagccctgggatttcctacccatggatttattttgtttttatcctttaatttcatgttcacagcactgtgtagagcaccagacagacgggcactgctaatccttccaaaggaaagctccaaagatcccagcccgcaaggctgtctctggatggattctggtggatgaatggcaacgcggctctctgcagcctgccagtgcccagagtgccaccgcattagcaatatacaaacagtccaaaaaagtgtttattttttatggaatacggtgcaataggcagaggacaagggacacatcactcttctgtctgtggccctgctggagtcctttgtgccccccggagtccacacgccttccctgcaagacgagaatggggctgggaagaaagaggcaacaccacggctggcaggagccccgctgcactgctctgcagacccattggcctgaccctgagaagcagagccagcaaagcccgggacctgcccctctttctttcccttcacaccaccccagcctcaggatgtcaagccacctccggaacgtgtctacactccacagctaccccgcagcaatacgcactcttgggacctcgctgatctaggatggggaggcaggccaccgcccctcccaagactcctcaagaaagagccccgcggttgctccggaaactcgaggcactgcagctatgggcactgcctcagcctaaagacacaggggcgcctcccaatcaccgcgctggcggatgctcaccccgtcataagcagaaactagtgatcctggaaatgagatgggccttactctgtcgactaaatgaatagctattttcttgtcattttttaaagtgcaactcttgcttcatgctgcttaagttaccagatgaatgctgagaaataagtaatcacagacattttaataccatttcattgctgttttacgagtgttcattacttaacaaaaaattatcttttagctttttcgcttaagacttttctttctgatgaa

SEQ ID NO: 187950 - DNA, 2607 bp, Homo sapiens
  Payload ID: 16987
  Gene Symbol: SYNDIG1L
  Gene Name: synapse differentiation inducing 1-like
  Uniprot ID: A6NDD5
  ENST ID: ENST00000331628
  CDS Start-End: 249-965
ggcggcggcgggctgcgggcgggagctgtccgcggtgctgaagcggcggctgctcagggacgcggggacgagagcaggggagccctcctgggagttccaccgcgaccgcgaggcgggggcgccgtcgctcaccggcccatgccgagcccccgagccccgcggaggaggcgggaccgtccgcggcgggacaggctctgaggactgctcagctggcccaggcccccctccccagcagctgccccagaaccatggagagtctgagtgaactacagaacccgctgctgcccaggagccctgcccatctccatggcccctatccctacccggagaccccacccagctggtcctgccaggaaaagctctactcctacctcctaggtggcgctgggcctgccggagcccaccagctcctggacccagggtccctgcagctggccgtggaggcctggtaccggcccagctgcctcctggggagagacaaggtcaaggagcccagggcaggcagctgtgagacaagcttcacagaggacagggagccccaggaggggcctccagagcagcccacaggacctggccaagctgcagagaatgtcaccatccagactgtgtcctatggggtacaagaggagctgcgggaccaggaggatgaccaggaggaagaggagagcgatgccacttcaacggagagtgaaagtgaagacaacttcctcacgctgcctcccagggaccacctgggacttactctcttctccatgctctgctgcttctggccactgggcattgctgccttctacttctcccaggggaccagcaaggccatctccaaaggggacttccgcctggccagcaccacctcccgccgggccctcttcctagccacactcgccatcgccgtgggggccggtctctacgtggctgtggtggtggctctggcagcttacatgtcccagaacggtcatggctagtagccagtagggcctgcatcctgactcccctgcccacctgaggaagcagtggggcttggagttgcagaccctatggaaaggcccggcccctgaagatgatcccgtgagagtggcttgctgagggggagacccccattccacagcctgcagagctcagccttcacttctgcttgcccgctgctcccagccccagagcagggcccggggcgccactctctaacccaggctacagacgggaaacagaaggcagggctgcccaccaggccatcccagcagggcctagctccatccattctgcccattccctagaggatctcctgccctacagccagcccaccacctaccctgccaacctccccacagagaaagagcaggaggttacagggagaaaagggggtgcccagagcacaaggggacccgtcccaatcctttcagcccacagggatcttcacctggggacagcctgagcttcccccaactccactgtctggccccatcatgcccagacctcagcaggccaagaaggaaatacgtggaggcaagggggcctcttgctgtctctgattctagagggtgcttatctctgcatgggcttgtgaggcactgtagattctagatagggaagaggagcctcggtatgtaaactctgaaccaagggcaggttcttggagcttcttcatgcgggtgcaaaaggcagttgcaatgacagagaatagagggtcctgaaatattgctgtactacatgactcttcctactctccccccactccccgcccctatcatccttttctgggctttgcctgggggtccgtgagctggtgccatcacaagtagactagacccagagagtgccctcagctcaccagccactgagcgcacggccctaggtccagccctacagaaaacgcagcaaggagagaccctagggagtagtgagtatagatgagggaagggactcagggaaggaatggcctgctgagtagtcagcggtgcttaggaaggcttcctggaggaggtatcccttgagcaagtcctaggatgaatagaattcatctaagggatttggtcacataactctttgtatttgtaggcagggatgtggcaggaaccttccatgggaagcttccaggctgtttggattctgcctggaacatctgggctggagccaaactacagccattcctaagggttctgccaactcaaggaggaacgtcacacctgtctctcaaagaccaatgatgttttcccatctctgaatgctagggggtcagtggtgggtacctggttacccctggggcatcttcactgatatctctgctcagtgccagtctcaacaccctcagccactagggcacatccagaattttagagacatctccaggtaggcggggggcagcaccaatgtgggcaggcctgtctggactcaagctacaggcccctgctgtgcatgatgtgggaacctggtcattcccatgccccatccagagcccagggctgtggctccaccactgagcatcccttgtcccactgtcctcccctgcctcgggcactgcccagccctccactcctgcatcacagcagttttaaggtcccattattgtactgatttatccttgtaataaatgtttctgtaacacctggt

SEQ ID NO: 187951 - DNA, 2420 bp, Homo sapiens
  Payload ID: 16987
  Gene Symbol: SYNDIG1L
  Gene Name: synapse differentiation inducing 1-like
  Uniprot ID: A6NDD5
  ENST ID: ENST00000554823
  CDS Start-End: 63-779
gacaggctctgaggactgctcagctggcccaggcccccctccccagcagctgccccagaaccatggagagtctgagtgaactacagaacccgctgctgcccaggagccctgcccatctccatggcccctatccctacccggagaccccacccagctggtcctgccaggaaaagctctactcctacctcctaggtggcgctgggcctgccggagcccaccagctcctggacccagggtccctgcagctggccgtggaggcctggtaccggcccagctgcctcctggggagagacaaggtcaaggagcccagggcaggcagctgtgagacaagcttcacagaggacagggagccccaggaggggcctccagagcagcccacaggacctggccaagctgcagagaatgtcaccatccagactgtgtcctatggggtacaagaggagctgcgggaccaggaggatgaccaggaggaagaggagagcgatgccacttcaacggagagtgaaagtgaagacaacttcctcacgctgcctcccagggaccacctgggacttactctcttctccatgctctgctgcttctggccactgggcattgctgccttctacttctcccaggggaccagcaaggccatctccaaaggggacttccgcctggccagcaccacctcccgccgggccctcttcctagccacactcgccatcgccgtgggggccggtctctacgtggctgtggtggtggctctggcagcttacatgtcccagaacggtcatggctagtagccagtagggcctgcatcctgactcccctgcccacctgaggaagcagtggggcttggagttgcagaccctatggaaaggcccggcccctgaagatgatcccgtgagagtggcttgctgagggggagacccccattccacagcctgcagagctcagccttcacttctgcttgcccgctgctcccagccccagagcagggcccggggcgccactctctaacccaggctacagacgggaaacagaaggcagggctgcccaccaggccatcccagcagggcctagctccatccattctgcccattccctagaggatctcctgccctacagccagcccaccacctaccctgccaacctccccacagagaaagagcaggaggttacagggagaaaagggggtgcccagagcacaaggggacccgtcccaatcctttcagcccacagggatcttcacctggggacagcctgagcttcccccaactccactgtctggccccatcatgcccagacctcagcaggccaagaaggaaatacgtggaggcaagggggcctcttgctgtctctgattctagagggtgcttatctctgcatgggcttgtgaggcactgtagattctagatagggaagaggagcctcggtatgtaaactctgaaccaagggcaggttcttggagcttcttcatgcgggtgcaaaaggcagttgcaatgacagagaatagagggtcctgaaatattgctgtactacatgactcttcctactctccccccactccccgcccctatcatccttttctgggctttgcctgggggtccgtgagctggtgccatcacaagtagactagacccagagagtgccctcagctcaccagccactgagcgcacggccctaggtccagccctacagaaaacgcagcaaggagagaccctagggagtagtgagtatagatgagggaagggactcagggaaggaatggcctgctgagtagtcagcggtgcttaggaaggcttcctggaggaggtatcccttgagcaagtcctaggatgaatagaattcatctaagggatttggtcacataactctttgtatttgtaggcagggatgtggcaggaaccttccatgggaagcttccaggctgtttggattctgcctggaacatctgggctggagccaaactacagccattcctaagggttctgccaactcaaggaggaacgtcacacctgtctctcaaagaccaatgatgttttcccatctctgaatgctagggggtcagtggtgggtacctggttacccctggggcatcttcactgatatctctgctcagtgccagtctcaacaccctcagccactagggcacatccagaattttagagacatctccaggtaggcggggggcagcaccaatgtgggcaggcctgtctggactcaagctacaggcccctgctgtgcatgatgtgggaacctggtcattcccatgccccatccagagcccagggctgtggctccaccactgagcatcccttgtcccactgtcctcccctgcctcgggcactgcccagccctccactcctgcatcacagcagttttaaggtcccattattgtactgatttatccttgtaataaatgtttctgtaacacctgg

SEQ ID NO: 187952 - DNA, 488 bp, Homo sapiens
  Payload ID: 16987
  Gene Symbol: SYNDIG1L
  Gene Name: synapse differentiation inducing 1-like
  ENST ID: ENST00000554953
  CDS Start-End: 249-488
ggcggcggcgggctgcgggcgggagctgtccgcggtgctgaagcggcggctgctcagggacgcggggacgagagcaggggagccctcctgggagttccaccgcgaccgcgaggcgggggcgccgtcgctcaccggcccatgccgagcccccgagccccgcggaggaggcgggaccgtccgcggcgggacaggctctgaggactgctcagctggcccaggcccccctccccagcagctgccccagaaccatggagagtctgagtgaactacagaacccgctgctgcccaggagccctgcccatctccatggcccctatccctacccggagaccccacccagctggtcctgccaggaaaagctctactcctacctcctaggtggcgctgggcctgccggagcccaccagctcctggacccagggtccctgcagctggccgtggaggcctggtaccggcccagctgcctcctggggagagacaaggtcaag

SEQ ID NO: 187953 - DNA, 3209 bp, Homo sapiens
  Payload ID: 16988
  Gene Symbol: SYN1
  Gene Name: synapsin I
  Uniprot ID: P17600
  ENST ID: ENST00000295987
  CDS Start-End: 126-2243
tgcggtgggcagcggaggagtcgtgtcgtgcctgagagcgcagctgtgctcctgggcaccgcgcagtccgcccccgcggctcctggccagaccacccctaggaccccctgccccaagtcgcagccatgaactacctgcggcgccgcctgtcggacagcaactttatggccaatctgccaaatgggtacatgacagacctgcagcgtccgcagccgcccccaccgccgcccggtgcccacagccccggagccacgcccggtcccgggaccgccactgccgagaggtcctccggggtcgccccagcggcctctccggccgcccctagccccgggtcctcggggggcggtggcttcttctcgtcgctgtccaacgcggtcaagcagaccacggcggcggcagctgccaccttcagcgagcaggtgggcggcggctctgggggcgcaggccgcgggggagccgcctccagggtgctgctggtcatcgacgagccgcacaccgactgggcaaaatacttcaaagggaaaaagatccatggagaaattgacattaaagtagaacaggccgaattctctgatctcaaccttgtggcccatgccaatggtggattctctgtggatatggaagttcttcggaatggggtgaaggtcgtgcggtctctgaagccggattttgtgctgatccgccagcacgccttcagcatggcacgcaacggagactaccgcagtttggtcattgggctgcagtatgctggaatccccagtgttaactccttgcattctgtctacaacttctgtgacaagccctgggtgtttgcccagatggttcgactgcataagaaactggggacagaagaattccctctaattgatcagaccttctaccccaatcacaaagaaatgctcagcagtacaacgtaccccgtggttgtgaagatggggcacgcacactctgggatgggcaaggtcaaggttgacaaccagcatgacttccaggacatcgcaagtgtcgtggcactgaccaagacgtatgccactgccgagcccttcatcgatgccaaatatgacgtgcgtgtccagaagattgggcagaactacaaggcctacatgaggacgtcagtgtcagggaactggaagaccaatactggctctgcgatgctggagcaaattgccatgtctgacagatacaagctgtgggtggacacgtgctcagagatttttgggggactggacatctgcgcagtggaagcgctacatggcaaggacggaagggatcacatcattgaggtggtgggttcctccatgccgctcattggtgaccaccaggatgaagacaaacagctcatcgtagagctcgtggtcaacaagatggctcaggccctgccccggcagcgacagcgggatgcctcccctggcaggggctcccatggccagactccgtccccaggggccctgcccttgggccgccagacctcccagcagcccgcagggcccccggctcagcagcgacccccaccacagggcggccctccacagccgggtccaggcccccagcgccagggacccccattgcagcagcgcccgcccccgcagggccagcagcacctttcaggccttggacccccagctggcagccccctgccccagcgccttccaagtcccacctcagcgccccagcagcccgcgtcccaggccgcgccgccgacccagggtcaaggccgccaatcccggccagtggcgggaggccccggggcgcctccagcagcccgcccgcccgcctctccgtctccccagcgccaggcgggccccccacaggctacccgtcagacatccgtctctggcccggctccgccaaaggcctctggggccccaccgggcgggcagcagcgccagggcccgccccagaaacccccaggcccagccggccccacacgccaggccagccaggcgggtcccgtgccccgcactgggccacccaccacgcagcagcctcggcccagcggcccgggccccgctggacgtcccaaaccacagctggcccagaaacccagccaggacgtgccgccacccgccaccgccgctgcagggggacctccgcacccccagctcaacaaatcccagtctctgaccaatgccttcaaccttccagagccagccccgcccaggcccagccttagccaggacgaggtgaaagctgagaccatccgcagcctgaggaagtctttcgccagcctcttctccgactgataccccactctgagaaccccaaaatccctgggcaacccttctctgggccctgaatccatttctcacttttggagtctccaaatcccttgagaacccatctcccggttctccaagattccacctctcattcctcaagatccccgagtaccttgagaaacctgactcctcctggccctaaatccggttctcacatgtggaatccccaagtccttttagaaccccactcgtggtcacttcaggatctacttctgttttagaacctccacattcctgaagacctccgcccctggtttccccagagggcgttttccttcctggaagtgcccaaataccaggcaacccattgcagaatcccttcctggagccctgaagttcctggaaaaccctatttttggtcccaaatctctccagcacacctatttcccatcataattttccaaatcctcaagaaacccctactgttgagccccttcccatggatcttccatccctctgaagatccacatcttcaaatgccacccaacacctagccccacaaggatttcccttcaccagctcccctcaacctcattcaataccttgggagcccctcccacttccaggacccctcggttcccccagggaccccctccccagtttcctgcctctgacagctgtctttaaatatgcaaactccacccatcttcccagaatcctttgcacacggaaggccagtggtctccgcttccccacctttgctgtggtgtctgtgtctgtgactgacgtggcctccttttgtgccgtgcttggcatatgtggtcctcgttcatcgtgccgcctgtggtgatgcgtgcagtgacgctgtttatgtggtccgcacctccccctgaccttcactccttgcctggactcaccccacccctcagcggctctgaaccccaagagaagagtcgggaaacaaaataaacaagcaaaggcccagcagaa

SEQ ID NO: 187954 - DNA, 3165 bp, Homo sapiens
  Payload ID: 16988
  Gene Symbol: SYN1
  Gene Name: synapsin I
  Uniprot ID: P17600
  ENST ID: ENST00000340666
  CDS Start-End: 126-2135
tgcggtgggcagcggaggagtcgtgtcgtgcctgagagcgcagctgtgctcctgggcaccgcgcagtccgcccccgcggctcctggccagaccacccctaggaccccctgccccaagtcgcagccatgaactacctgcggcgccgcctgtcggacagcaactttatggccaatctgccaaatgggtacatgacagacctgcagcgtccgcagccgcccccaccgccgcccggtgcccacagccccggagccacgcccggtcccgggaccgccactgccgagaggtcctccggggtcgccccagcggcctctccggccgcccctagccccgggtcctcggggggcggtggcttcttctcgtcgctgtccaacgcggtcaagcagaccacggcggcggcagctgccaccttcagcgagcaggtgggcggcggctctgggggcgcaggccgcgggggagccgcctccagggtgctgctggtcatcgacgagccgcacaccgactgggcaaaatacttcaaagggaaaaagatccatggagaaattgacattaaagtagaacaggccgaattctctgatctcaaccttgtggcccatgccaatggtggattctctgtggatatggaagttcttcggaatggggtgaaggtcgtgcggtctctgaagccggattttgtgctgatccgccagcacgccttcagcatggcacgcaacggagactaccgcagtttggtcattgggctgcagtatgctggaatccccagtgttaactccttgcattctgtctacaacttctgtgacaagccctgggtgtttgcccagatggttcgactgcataagaaactggggacagaagaattccctctaattgatcagaccttctaccccaatcacaaagaaatgctcagcagtacaacgtaccccgtggttgtgaagatggggcacgcacactctgggatgggcaaggtcaaggttgacaaccagcatgacttccaggacatcgcaagtgtcgtggcactgaccaagacgtatgccactgccgagcccttcatcgatgccaaatatgacgtgcgtgtccagaagattgggcagaactacaaggcctacatgaggacgtcagtgtcagggaactggaagaccaatactggctctgcgatgctggagcaaattgccatgtctgacagatacaagctgtgggtggacacgtgctcagagatttttgggggactggacatctgcgcagtggaagcgctacatggcaaggacggaagggatcacatcattgaggtggtgggttcctccatgccgctcattggtgaccaccaggatgaagacaaacagctcatcgtagagctcgtggtcaacaagatggctcaggccctgccccggcagcgacagcgggatgcctcccctggcaggggctcccatggccagactccgtccccaggggccctgcccttgggccgccagacctcccagcagcccgcagggcccccggctcagcagcgacccccaccacagggcggccctccacagccgggtccaggcccccagcgccagggacccccattgcagcagcgcccgcccccgcagggccagcagcacctttcaggccttggacccccagctggcagccccctgccccagcgccttccaagtcccacctcagcgccccagcagcccgcgtcccaggccgcgccgccgacccagggtcaaggccgccaatcccggccagtggcgggaggccccggggcgcctccagcagcccgcccgcccgcctctccgtctccccagcgccaggcgggccccccacaggctacccgtcagacatccgtctctggcccggctccgccaaaggcctctggggccccaccgggcgggcagcagcgccagggcccgccccagaaacccccaggcccagccggccccacacgccaggccagccaggcgggtcccgtgccccgcactgggccacccaccacgcagcagcctcggcccagcggcccgggccccgctggacgtcccaaaccacagctggcccagaaacccagccaggacgtgccgccacccgccaccgccgctgcagggggacctccgcacccccagctcaaagccagccccgcccaggcccagccttagccaggacgaggtgaaagctgagaccatccgcagcctgaggaagtctttcgccagcctcttctccgactgataccccactctgagaaccccaaaatccctgggcaacccttctctgggccctgaatccatttctcacttttggagtctccaaatcccttgagaacccatctcccggttctccaagattccacctctcattcctcaagatccccgagtaccttgagaaacctgactcctcctggccctaaatccggttctcacatgtggaatccccaagtccttttagaaccccactcgtggtcacttcaggatctacttctgttttagaacctccacattcctgaagacctccgcccctggtttccccagagggcgttttccttcctggaagtgcccaaataccaggcaacccattgcagaatcccttcctggagccctgaagttcctggaaaaccctatttttggtcccaaatctctccagcacacctatttcccatcataattttccaaatcctcaagaaacccctactgttgagccccttcccatggatcttccatccctctgaagatccacatcttcaaatgccacccaacacctagccccacaaggatttcccttcaccagctcccctcaacctcattcaataccttgggagcccctcccacttccaggacccctcggttcccccagggaccccctccccagtttcctgcctctgacagctgtctttaaatatgcaaactccacccatcttcccagaatcctttgcacacggaaggccagtggtctccgcttccccacctttgctgtggtgtctgtgtctgtgactgacgtggcctccttttgtgccgtgcttggcatatgtggtcctcgttcatcgtgccgcctgtggtgatgcgtgcagtgacgctgtttatgtggtccgcacctccccctgaccttcactccttgcctggactcaccccacccctcagcggctctgaaccccaagagaagagtcgggaaacaaaataaacaagcaaaggccca

SEQ ID NO: 187955 - DNA, 2356 bp, Homo sapiens
  Payload ID: 16989
  Gene Symbol: SYN2
  Gene Name: synapsin II
  ENST ID: ENST00000425297
  CDS Start-End: 1-664
gctgacactgcccacgttccctgtggtggtgaagattggccacgctcactcaggcatgggcaaggtcaaagtggaaaaccactacgacttccaggacattgccagcgtggtggctctcacccagacctatgccactgcagagcctttcattgactccaagtatgacatccgggtccagaagattggcaacaactacaaggcttacatgaggacatcgatctcagggaactggaagacgaacactggctctgcgatgctggagcagattgccatgtcagacaggtacaaactgtgggtggacacctgctctgagatgtttggcggcctggacatctgtgctgtcaaagctgtacatggcaaagatgggaaagactacatttttgaggtcatggactgtagcatgccactgattggggaacatcaggtggaggacaggcaactcatcaccgaactagtcatcagcaagatgaaccagctgctgtccaggactcctgccctgtctcctcagagacccctaacaacccagcagccacagagcggaacacttaaggatccggactcaagcaagaccccacctcagcggccaccccctcaaggttgtttacagtatattctcgactgtaatggcattgcagtagggccaaaacaagtccaagcttcttaaaatgattggtggttaatttttcaaagcagaaattttaagccaaaaacaaacgaaaggaaagcggggaggggaaaacagaccctcccactggtgccgttgctgcgttctttcaatgctgactggactgtgtttttcctatgcagtaaaacccaactcctctcctccccccaagctcagttaaatcccccacctccaactttccctccaccagtgtgcttgggatcttcaatgaactgtgcttttcgctttctttctgcatgactattgtaactagatagaacattaagagattttcaagatcaaacttccatagcttcatccactgaatttgaaggcatccacctttttctccatttgctaaaatttggtgcagtttgagtttatgtgaataggctggctgtgcctgtagagctcttgtgtttttagtgatgacatgaaatacaaagaacaagctatttccaggaatgtgttctgtattttacatcccagtgtaccctttattttattattaactaattaactatgagatttttaaaaaatggggccgctgatgtgcaatatcaaagtgaacttgtgagtattttgtgtgtgttgatctcagttgtttcttcattgttgctgtttctggatccagccatgtgtgcgcttgtgtggacctgaggctgctttctgttcccaaagcttgacctgtgtacagagataattccttggcaatgttggacatagaatgcagggagctactgaaggtctgtcagggatttgtccattctgctcttggcctctcctgaggcctcataatgggagaccaaatcaaaaatgtcccatgtcacttgagtgggtacactgcctacagaaccttgaggttgactcctgcttcagttctcagctgtttaccacagccctccagggtccaaagattgaggagctttctctttcctgggaggaactgtctcagatttagcttgtgtgtgttttggacagaggctccacagcggtggctcttgaggaatcctcaccagtttgttctcttccctctgacaagcagcacctgagcagatgctgaggcagttcattaaaccaggcctcagcttcagtgcctcatcttgccatctcccggccaggctgggaacgggcaccaagcagccgcctctaacaaacaccatggtccgtggaagttcatgccagcagcttgcctttgagaagaaatgctgctggctctatttttacattcccttccacctctatactgtcatgtcaccgttctgaactcccagatctgagaaggaactagtgttggtggtatgtaacaagagttacgtatccaggggcttgtgccttggtttctcctttgattgctggtaaattctgaggccacagagaaatgcattgagtgtgaatgttgtcatctgtaatccctccctcagctgataatggtagttgatctgttgtaaatatatacatatatgcatatttgcacttccagatgggttgcataagaatcaggtccttaaatacctcccaatctgatgaaacgatagaataaagtaacatttcccagaatggaggaatacattattttatcgtatatttttgtccaagcgatgagctgacggtggtattgcttctctgcatgttatcagtgtgtacatctggtgcttttcatgtgtcatttgtgagccacaaatgcaaagt

SEQ ID NO: 187956 - DNA, 2674 bp, Homo sapiens
  Payload ID: 16989
  Gene Symbol: SYN2
  Gene Name: synapsin II
  ENST ID: ENST00000621198
  CDS Start-End: 151-1899
gtctgcggggtctggtgccggggcctgagtctctgctggctaagccgccgcctcagccgcctcagtcgcctcaatctcgccttccgccctcgctctccctccgcgccaccagaccccgtagccccgcgcgcccccagccctttaagccagatgatgaacttcctgcggcgccggctgtcggacagcagcttcatcgccaacctgcccaacggctacatgaccgacctgcagcggcccgagccccagcagccgccgccgccgccgccccccggtccgggcgccgcctcggcctcggcggcgcccccgaccgcctcgccgggcccggagcggaggccgccgcccgcctcggcgcccgcgccgcagcccgcgccgacgccgtcggtgggcagcagcttcttcagctcgctgtcccaagccgtgaagcagacggccgcctcggctggcctggtggacgcgcccgctcccgcgcccgcagccgccaggaaggccaaggtgctgctggtggtcgacgagccgcacgccgactgggccaagtgctttcggggcaaaaaagtccttggagattatgatatcaaggtggaacaggcagaattttcagagctcaacctggtggcccatgcagatggcacctatgctgtggatatgcaggttctccggaatggcacaaaggttgtccggtccttccggccagacttcgtgctcatccggcagcatgcatttggcatggcggagaatgaggacttccgccacctgatcattggtatgcagtatgcaggcctccccagcatcaactcactggaatccatatacaacttctgtgacaagccatgggtgtttgcccagctggtcgctatctataagacactgggaggagaaaagttccctctcattgaacagacatactaccccaaccacaaagagatgctgacactgcccacgttccctgtggtggtgaagattggccacgctcactcaggcatgggcaaggtcaaagtggaaaaccactacgacttccaggacattgccagcgtggtggctctcacccagacctatgccactgcagagcctttcattgactccaagtatgacatccgggtccagaagattggcaacaactacaaggcttacatgaggacatcgatctcagggaactggaagacgaacactggctctgcgatgctggagcagattgccatgtcagacaggtacaaactgtgggtggacacctgctctgagatgtttggcggcctggacatctgtgctgtcaaagctgtacatggcaaagatgggaaagactacatttttgaggtcatggactgtagcatgccactgattggggaacatcaggtggaggacaggcaactcatcaccgaactagtcatcagcaagatgaaccagctgctgtccaggactcctgccctgtctcctcagagacccctaacaacccagcagccacagagcggaacacttaaggatccggactcaagcaagaccccacctcagcggccaccccctcaagggggccctgggcaaccccaaggaatgcagcccccaggcaaggtgctgcctccacgccggctcccccctggaccatcactgccaccttcctcctcttcctcctcttcttcctcctcctcggctcctcagcggccgggcggccccaccacccacggagatgcaccctccagcagcagctccctggcagaggcccagccacccctggctgctccaccacagaagccccagcctcacccacagctcaacaagtcgcagtccctgacaaatgccttcagcttctctgagtcctccttcttccggtcttcagccaatgaggatgaagccaaagcagagaccatccggagcttgaggaagtcctttgccagcctcttttcagattagctcttcagacacacggggcacccagcccaaccgggaaaggcatctaagacattcaccaacaacagtcagccagcttggtggttatgtcccatgaccttgacgtgtgtggtcccttcctctgctctgttgtactaagtgatgttgtgcagcccagaaaggaccatttgacagtctcagggcaggtgcctacccagcaaggggtacctggcatcagagaggaaagagctgcttccctgtagtcatgagagcttccttctgaagtcatcgttcgctgtgagtttagtggccttattgtgacagtgccatcatgtcttattcttccctgtgaaaccaggattaatcgtggactcctggcagcttaacctagctcagttgcagtgctaagcatgccccgcccccattcagtgatacctgtttgggaagtatatacttccccaaaagtactcttggccctaagttttaggaactttccccgacctggatcccttgtcatacctgtgttactgtttaaagcacacccacccaacttacaagatcttaggctgctgtggtggtgaagcaccttgagtctgctgatattcgggagaacaaggatctgcagtttccccttttctcccctctgaagagtggttcttatgtgcaatctgcagtaaccttgaactccagagctgcactatagaggagaatgcatgccactatgacagcagtatgccaagctttgtgttcatctcctaataaacgttaagacctttggtgtaataaaagcagcagcatt

SEQ ID NO: 187957 - DNA, 3871 bp, Homo sapiens
  Payload ID: 16989
  Gene Symbol: SYN2
  Gene Name: synapsin II
  ENST ID: ENST00000620175
  CDS Start-End: 147-1583
gcggggtctggtgccggggcctgagtctctgctggctaagccgccgcctcagccgcctcagtcgcctcaatctcgccttccgccctcgctctccctccgcgccaccagaccccgtagccccgcgcgcccccagccctttaagccagatgatgaacttcctgcggcgccggctgtcggacagcagcttcatcgccaacctgcccaacggctacatgaccgacctgcagcggcccgagccccagcagccgccgccgccgccgccccccggtccgggcgccgcctcggcctcggcggcgcccccgaccgcctcgccgggcccggagcggaggccgccgcccgcctcggcgcccgcgccgcagcccgcgccgacgccgtcggtgggcagcagcttcttcagctcgctgtcccaagccgtgaagcagacggccgcctcggctggcctggtggacgcgcccgctcccgcgcccgcagccgccaggaaggccaaggtgctgctggtggtcgacgagccgcacgccgactgggccaagtgctttcggggcaaaaaagtccttggagattatgatatcaaggtggaacaggcagaattttcagagctcaacctggtggcccatgcagatggcacctatgctgtggatatgcaggttctccggaatggcacaaaggttgtccggtccttccggccagacttcgtgctcatccggcagcatgcatttggcatggcggagaatgaggacttccgccacctgatcattggtatgcagtatgcaggcctccccagcatcaactcactggaatccatatacaacttctgtgacaagccatgggtgtttgcccagctggtcgctatctataagacactgggaggagaaaagttccctctcattgaacagacatactaccccaaccacaaagagatgctgacactgcccacgttccctgtggtggtgaagattggccacgctcactcaggcatgggcaaggtcaaagtggaaaaccactacgacttccaggacattgccagcgtggtggctctcacccagacctatgccactgcagagcctttcattgactccaagtatgacatccgggtccagaagattggcaacaactacaaggcttacatgaggacatcgatctcagggaactggaagacgaacactggctctgcgatgctggagcagattgccatgtcagacaggtacaaactgtgggtggacacctgctctgagatgtttggcggcctggacatctgtgctgtcaaagctgtacatggcaaagatgggaaagactacatttttgaggtcatggactgtagcatgccactgattggggaacatcaggtggaggacaggcaactcatcaccgaactagtcatcagcaagatgaaccagctgctgtccaggactcctgccctgtctcctcagagacccctaacaacccagcagccacagagcggaacacttaaggatccggactcaagcaagaccccacctcagcggccaccccctcaaggttgtttacagtatattctcgactgtaatggcattgcagtagggccaaaacaagtccaagcttcttaaaatgattggtggttaatttttcaaagcagaaattttaagccaaaaacaaacgaaaggaaagcggggaggggaaaacagaccctcccactggtgccgttgctgcgttctttcaatgctgactggactgtgtttttcctatgcagtgtcagctcctctgtctggttgtttacctgttcctgttcgtgcttgtaatgctcacttatgttttctctgtataacttgtgattccagggctgtttgtcaacagtatacaaaagaattgtgcctctcccaagtccagtgtgactttatcttctgggtggtttgatagtgtttttaaaagtaatatataatgtggggtgaaatgggagtaggggggtggacaggggagaaacgaaaaccacaaaaagaaaacccaactcctctcctccccccaagctcagttaaatcccccacctccaactttccctccaccagtgtgcttgggatcttcaatgaactgtgcttttcgctttctttctgcatgactattgtaactagatagaacattaagagattttcaagatcaaacttccatagcttcatccactgaatttgaaggcatccacctttttctccatttgctaaaatttggtgcagtttgagtttatgtgaataggctggctgtgcctgtagagctcttgtgtttttagtgatgacatgaaatacaaagaacaagctatttccaggaatgtgttctgtattttacatcccagtgtaccctttattttattattaactaattaactatgagatttttaaaaaatggggccgctgatgtgcaatatcaaagtgaacttgtgagtattttgtgtgtgttgatctcagttgtttcttcattgttgctgtttctggatccagccatgtgtgcgcttgtgtggacctgaggctgctttctgttcccaaagcttgacctgtgtacagagataattccttggcaatgttggacatagaatgcagggagctactgaaggtctgtcagggatttgtccattctgctcttggcctctcctgaggcctcataatgggagaccaaatcaaaaatgtcccatgtcacttgagtgggtacactgcctacagaaccttgaggttgactcctgcttcagttctcagctgtttaccacagccctccagggtccaaagattgaggagctttctctttcctgggaggaactgtctcagatttagcttgtgtgtgttttggacagaggctccacagcggtggctcttgaggaatcctcaccagtttgttctcttccctctgacaagcagcacctgagcagatgctgaggcagttcattaaaccaggcctcagcttcagtgcctcatcttgccatctcccggccaggctgggaacgggcaccaagcagccgcctctaacaaacaccatggtccgtggaagttcatgccagcagcttgcctttgagaagaaatgctgctggctctatttttacattcccttccacctctatactgtcatgtcaccgttctgaactcccagatctgagaaggaactagtgttggtggtatgtaacaagagttacgtatccaggggcttgtgccttggtttctcctttgattgctggtaaattctgaggccacagagaaatgcattgagtgtgaatgttgtcatctgtaatccctccctcagctgataatggtagttgatctgttgtaaatatatacatatatgcatatttgcacttccagatgggttgcataagaatcaggtccttaaatacctcccaatctgatgaaacgatagaataaagtaacatttcccagaatggaggaatacattattttatcgtatatttttgtccaagcgatgagctgacggtggtattgcttctctgcatgttatcagtgtgtacatctggtgcttttcatgtgtcatttgtgagccacaaatgcaaagttgccatttgaattcagtcaggctacagggtggtgtcagtcaaggtctttcaggtgggggagaaattggttagggctcccactgccaaatgcaagcagatagcataacctgactgttatgtgccctcaggcagcatgcttagggacaactctgtggcctgggggacatctgtgtcacagtataggattgccattcaggtgttttgtacctatttctttcctgacgttgtcccctttttttgtactgatccaactgggagaacctcagccaatgctggaagtatgattgaagtacctctcttttgtgactcttgtacagcttaatgtgcaataaaggaaaagttatatctgtc

SEQ ID NO: 187958 - DNA, 972 bp, Homo sapiens
  Payload ID: 16990
  Gene Symbol: SYN3
  Gene Name: synapsin III
  ENST ID: ENST00000332840
  CDS Start-End: 1-972
cagatcaaagtggaaaaccagcttgacttccaggacatcaccagcgtggtcgccatggccaaaacctacgccaccaccgaggccttcatcgactccaagtacgacatccgcatccagaaaattggatccaactacaaggcttacatgagaacctccatctctgggaactggaaggccaacacaggctctgccatgctggagcaggtggccatgacagagaggtacaggctgtgggtggacagctgctcggaaatgtttggcggcctggacatctgtgccgtcaaggctgtccacagcaaggatggcagagattacatcatcgaggtaatggacagctcaatgccgctgattggagagcatgtggaagaggacagacagctgatggccgaccttgttgtctccaaaatgagccagctcccgatgccaggaggcacagcgccctcccccctcagaccttgggctccacagattaaatcagcgaaatccccagggcaagcccagctggggcctcagctaggccagccccagccacgcccacctccgcaaggaggccctcgccaagctcagtctcctcagccccagagatctggaagcccctcccaacagaggctctccccacaaggccagcagcccctgagcccccagtccggatctccacagcagcaaaggtcaccaggctctccgcagctatcccgggcatccagtggcagctccccaaaccaggcctccaagccaggtgccaccctcgcctcacagccccggccccctgtgcagggccgtagtacctcccagcagggtgaagagtccaagaagccagcaccaccccatccgcatctcaacaaatctcagtccctgactaacagcctcagcacatccgacacctcccagcgtgggaccccaagtgaagacgaggccaaggctgaaaccatccgcaacctgaggaagtcttttgccagcctgttctctgactaa

SEQ ID NO: 187959 - DNA, 3126 bp, Homo sapiens
  Payload ID: 16990
  Gene Symbol: SYN3
  Gene Name: synapsin III
  Uniprot ID: O14994
  ENST ID: ENST00000358763
  CDS Start-End: 244-1986
gctcccgggacccggagcggatcgactggcgggcgccgcgccgaggcaccaccgggcgccgagttcctggcggctcgcacgcaggtaaataaaggcagctaaagctgactgctggttgcgcaaaatccccctggctcttctggctaaagtcctaccactccctgtacctggcagcagcctgtcttctgggcctcacctacacacgtctgggtaggagccagtcatctccatccatccacagccatgaatttcctccggcgacgtctctctgacagcagcttcatggccaacctgcctaatggctatatgacggacctgcaacgcccagatagctccaccagctcacctgcttcccccgccatggagaggaggcacccccagcccctggctgcctccttctcctctccaggatccagcctttttagctccctctccagtgccatgaagcaggcccctcaggccacctcaggactgatggagcctccaggtccctccacgcccattgttcaaagacccaggatcctgttggtgatcgatgatgcccatacagactggtcgaagtatttccatgggaagaaggtgaatggagagattgagatccgagtggagcaggctgaattctcagagttgaacctagctgcctatgtgaccgggggctgcatggtggacatgcaggtcgtgagaaatgggaccaaagtggtgagcagatccttcaagccagacttcatcctggtccgccagcatgcctacagcatggccctgggggaagactaccgcagcctggtcatcggcctgcagtatggagggctgcctgctgtcaactctctctactccgtctacaacttctgcagcaagccctgggtgttctctcagctcattaagatcttccattccctgggtcctgagaagttcccgcttgtggagcaaacatttttccccaaccataagccaatggtcacagccccacacttcccggtggtagtcaagctgggacatgcccacgctggaatgggaaagatcaaagtggaaaaccagcttgacttccaggacatcaccagcgtggtcgccatggccaaaacctacgccaccaccgaggccttcatcgactccaagtacgacatccgcatccagaaaattggatccaactacaaggcttacatgagaacctccatctctgggaactggaaggccaacacaggctctgccatgctggagcaggtggccatgacagagaggtacaggctgtgggtggacagctgctcggaaatgtttggcggcctggacatctgtgccgtcaaggctgtccacagcaaggatggcagagattacatcatcgaggtaatggacagctcaatgccgctgattggagagcatgtggaagaggacagacagctgatggccgaccttgttgtctccaaaatgagccagctcccgatgccaggaggcacagcgccctcccccctcagaccttgggctccacagattaaatcagcgaaatccccagggcaagcccagctggggcctcagctaggccagccccagccacgcccacctccgcaaggaggccctcgccaagctcagtctcctcagccccagagatctggaagcccctcccaacagaggctctccccacaaggccagcagcccctgagcccccagtccggatctccacagcagcaaaggtcaccaggctctccgcagctatcccgggcatccagtggcagctccccaaaccaggcctccaagccaggtgccaccctcgcctcacagccccggccccctgtgcagggccgtagtacctcccagcagggtgaagagtccaagaagccagcaccaccccatccgcatctcaacaaatctcagtccctgactaacagcctcagcacatccgacacctcccagcgtgggaccccaagtgaagacgaggccaaggctgaaaccatccgcaacctgaggaagtcttttgccagcctgttctctgactaacgccatccaggctgggaggggaagagtgctctgctacactcgtccccctcctgcctcatcttccttctcagccttggttcctgatgggaacagaatggagggcctgagaacatactttctaaatgcctttgacccaggaaccgattatctatatttgttcccattttccttcaccgtgacattccagcattgtctgactgtgaggtgggcctttgagagcctccaggttcctcaaaacaggcctgagcgatgggcatcacaccctctgcctacccacgtgcctgcttacctgccagataaccaagtgagatgtctgcgagtggctagttttcacattcttactagtgtttggctcacctttgggcaaaggccccctctaggccttgccccacctccatcaaacgcagacactgtagtcagacctcagcaatataggaggcaataatcttttaacagtgttttgcaaacaaacaaaaagagaaaaatcccagccaggggaactcgccacctgcccacgctagttccatccacgctcaagacccgcccttagaccaggcaggcaaaggcccccatcacactcggccactagtggggtcctgaggccaagaaagaaaccagaccctgtatgacaagtggggtctttcagaacacgacagaaacaggggggcccttgtaatgccactcatactcagagcattattcttatttggacagccaagggcagatcacaggttattgtaggaataaagactagtttacaaaggagaaagaggccctggacttcccaaggaaagggtcaggttagggctcctgtacccattctgttccaccactgtttgatctctctggcctcccaccaggaatgccgtttcctttttatggatctgttgggaaccagagagaatcaacagatcaatgacataggatccgaagtgcaatgatagtcacttctagtttggcatttcacaaactctgtacagcaaggtattggtaggttactcaatttcaaaagggccccatggccaaatatgtttaggaaccgctgtttgtatttctttttttggagacgcattgtatataatatatgtcaaaggctttcggaattcctgcaggaaagaaatcagctttgttaaatccaaa

SEQ ID NO: 187960 - DNA, 632 bp, Homo sapiens
  Payload ID: 16990
  Gene Symbol: SYN3
  Gene Name: synapsin III
  ENST ID: ENST00000412575
  CDS Start-End: 292-632
ggattacaggcgtgagccaccctgtccggcgggaatgtaaattaatacggccattatggaaaacggcatggaggttcctcagaaaactaaaaatagaactaccatatgatccagcaggctcacttctggcaggtaaataaaggcagctaaagctgactgctggttgcgcaaaatccccctggctcttctggctaaagtcctaccactccctgtacctggcagcagcctgtcttctgggcctcacctacacacgtctgggtaggagccagtcatctccatccatccacagccatgaatttcctccggcgacgtctctctgacagcagcttcatggccaacctgcctaatggctatatgacggacctgcaacgcccagatagctccaccagctcacctgcttcccccgccatggagaggaggcacccccagcccctggctgcctccttctcctctccaggatccagcctttttagctccctctccagtgccatgaagcaggcccctcaggccacctcaggactgatggagcctccaggtccctccacgcccattgttcaaagacccaggatcctgttggtgatcgatgatgcccatacagactggtcgaagtatttccatgggaagaaggtgaa

SEQ ID NO: 187961 - DNA, 855 bp, Homo sapiens
  Payload ID: 16990
  Gene Symbol: SYN3
  Gene Name: synapsin III
  ENST ID: ENST00000441821
  CDS Start-End: 487-855
ttgggtttgggaggtcaggtttgtcatgccatttccgatttccagtcatcctgggggcaggatgaaatttcagagtggtttcctggccaagctagaagcagagaatagctatggatacagcacctcgtgtatctatccagcacttacttggctttttctgagtgccaggaactgtgccaagccctagcagcatgaagaatggcctttggggagcttctggggctaagagggacagtaggaggagcaattgcagtgcagggtagtgcggaagactcgagatggagaagaggacggtgaggaagccaggaaggtttcagagaggagcaggtaaataaaggcagctaaagctgactgctggttgcgcaaaatccccctggctcttctggctaaagtcctaccactccctgtacctggcagcagcctgtcttctgggcctcacctacacacgtctgggtaggagccagtcatctccatccatccacagccatgaatttcctccggcgacgtctctctgacagcagcttcatggccaacctgcctaatggctatatgacggacctgcaacgcccagatagctccaccagctcacctgcttcccccgccatggagaggaggcacccccagcccctggctgcctccttctcctctccaggatccagcctttttagctccctctccagtgccatgaagcaggcccctcaggccacctcaggactgatggagcctccaggtccctccacgcccattgttcaaagacccaggatcctgttggtgatcgatgatgcccatacagactggtcgaagtatttccatgggaagaaggtgaatggagagattgagatccgagtggagcag

SEQ ID NO: 187962 - DNA, 561 bp, Homo sapiens
  Payload ID: 16990
  Gene Symbol: SYN3
  Gene Name: synapsin III
  ENST ID: ENST00000619146
  CDS Start-End: 1-561
cagatcaaagtggaaaaccagcttgacttccaggacatcaccagcgtggtcgccatggccaaaacctacgccaccaccgaggccttcatcgactccaagtacgacatccgcatccagaaaattggatccaactacaaggcttacatgagaacctccatctctgggaactggaaggccaacacaggctctgccatgctggagcaggtggccatgacagagaggtacaggctgtgggtggacagctgctcggaaatgtttggcggcctggacatctgtgccgtcaaggctgtccacagcaaggatggcagagattacatcatcgaggtaatggacagctcaatgccgctgattggagagcatgtggaagaggacagacagctgatggccgaccttgttgtctccaaaatgagccagctcccgatgccaggaggcacagcgccctcccccctcagaccttgggctccacagattaaatcagcgaaatccccagggcaagcccagctggggcctcagctaggccagccccagccacgcccacctccgcaagggaatgtcccacct

SEQ ID NO: 187963 - DNA, 4556 bp, Homo sapiens
  Payload ID: 16991
  Gene Symbol: SYNGAP1
  Gene Name: synaptic Ras GTPase activating protein 1
  ENST ID: ENST00000293748
  CDS Start-End: 1-3855
atgtcctatgcccccttcagagatgtacggggaccctctatgcaccgaacccaatacgttcattccccgtatgatcgtcctggttggaaccctcggttctgcatcatctcggggaaccagctgctcatgctggatgaggatgagatacaccccctactgatccgggaccggaggagcgagtccagtcgcaacaaactgctgagacgcacagtctccgtgccggtggaggggcggccccacggcgagcatgaataccacttgggtcgctcgaggaggaagagtgtcccaggggggaagcagtacagcatggagggtgcccctgctgcgcccttccggccctcgcaaggcttcctgagccgacggctaaaaagctccatcaaacgaacgaagtcacaacccaaacttgaccggaccagcagctttcgccagatcctgcctcgcttccgaagtgctgaccatgaccgggcccggctgatgcaaagctttaaggagtcacactctcatgagtccttgctgagtcctagcagtgcagctgaggcattggagctcaacttggatgaagattccattatcaagccagtgcacagctccatcctgggccaggagttctgttttgaggtaacaacttcatcaggaacaaaatgctttgcctgtcggtctgcggccgaaagagacaaatggattgagaatctgcagcgggcagtaaagcccaacaaggacaacagccgccgggtagacaatgtgctaaagctgtggatcatagaggcccgggagctgccccccaagaagcggtactactgtgagctctgcctggatgacatgctgtatgcacgcaccacctccaagccccgctctgcctctggggacaccgtcttctggggcgagcacttcgagtttaacaacctgccggctgtccgtgccctgcggctgcatctgtaccgtgactcagacaaaaagcgcaagaaggacaaggcaggctatgtcggcctggtgactgtgccagtggccaccctggctgggcgccacttcacagagcagtggtaccctgtaaccctgccaacaggcagtgggggatctgggggcatgggttcgggagggggagggggctcggggggtggctcagggggcaagggcaaaggaggttgcccggctgtgcggctgaaagcacgttaccagacaatgagcatcttgcccatggagctatataaagagtttgcagagtatgtcaccaaccattatcggatgctgtgtgcagtcttggagcccgccctgaatgtcaaaggcaaggaggaggttgccagtgcactagttcacatcctgcagagtacaggcaaggccaaggacttcctttcagacatggccatgtctgaggtagaccggttcatggaacgggagcacctcatattccgcgagaacacgcttgccactaaagccatagaagagtatatgagactgattggtcagaaatacctcaaggatgccattggagaattcatccgtgctctgtatgaatctgaggaaaactgcgaggtagaccctatcaagtgcacagcatccagtttggcagagcaccaggccaacctgcgaatgtgctgtgagttggccctgtgcaaggtggtcaactcccactgcgtgttcccgagggagctgaaggaggtgtttgcttcgtggcggctgcgctgcgcagagcgaggccgggaggacatcgcagacaggcttatcagcgcctcactcttcctgcgcttcctctgcccagcgattatgtcgcccagtctctttgggcttatgcaggagtacccagatgagcagacctcacgaaccctcaccctcattgccaaggtcatccagaacctggccaacttttccaagtttacctcaaaggaggactttctgggcttcatgaatgagtttctggagctggaatggggttccatgcagcagtttttgtatgagatctccaatctggacacgctaaccaacagcagtagctttgagggttacatcgacttgggccgagagctctccacactgcatgccctactctgggaggtgctgccccagctcagcaaggaagccctcctgaagctgggtccactgccccggctcctcaacgacatcagcacagctctgaggaaccccaacatccaaaggcagccaagccgccagagtgagcggccccggcctcagcctgtggtactgcgggggccatcggctgagatgcagggctacatgatgcgggacctcaacagctccatcgaccttcagtccttcatggctcgaggcctcaacagctctatggacatggctcgcctcccctccccaaccaaggaaaagccacccccaccaccgcctggtggtggtaaagacctgttctatgtaagccgtccacccctggcccgttcctcaccagcatactgcacgagcagctcggacatcacagagccagagcagaagatgctgagtgtcaacaagagtgtgtccatgctggacttacagggtgatgggcctggtggccgcctcaacagcagcagtgtttcgaacctggcggccgtaggggacctgctgcactcaagccaggcctcgctgacagcagccttggggctacggcctgcgcctgccggacgcctctcccaggggagtggctcatccatcacggcggctggcatgcgcctcagccagatgggtgtcaccacagacggtgtccctgcccagcaactgcgaatccccctctccttccagaaccctctcttccacatggctgctgatgggccaggtcccccaggcggccatggagggggcggtggccatggcccaccttcctcccatcaccaccaccaccaccatcaccaccaccgaggtggagagccccctggggacacctttgccccattccatggctatagcaagagtgaggacctctcttccggggtccccaagccccctgctgcctccatccttcatagccacagctacagtgatgagtttggaccctctggcactgacttcacccgtcggcagctttcactccaggacaacctgcagcacatgctgtcccctccccagatcaccattggtccccagaggccagccccctcagggcctggaggtgggagcggtgggggcagcggtgggggtggcgggggccagccgcctccattgcagaggggcaagtctcagcagttgacagtcagcgcagcccagaaaccccggccatccagcgggaatctattgcagtccccagagccaagttatggccccgcccgtccacggcaacagagcctcagcaaggagggcagcattgggggcagcgggggcagcggtggcggagggggtggggggctgaagccctccatcaccaagcagcattctcagacaccatccacattgaaccccacaatgccagcctctgagcggacagtggcctgggtctccaacatgcctcacctgtcggctgacatcgagagtgcccacatcgagcgggaagagtacaagctcaaggagtactcaaaatcgatggatgagagccggctggatagggtgaaggagtacgaggaggagattcactcactgaaagagcggctgcacatgtccaaccggaagctggaagagtatgagcggaggctgctgtcccaggaagaacaaaccagcaaaatcctgatgcagtatcaggcccgactggagcagagtgagaagaggctaaggcagcagcaggcagagaaggattcccagatcaagagcatcattggcaggctgatgctggtggaggaggagctgcgccgggaccaccccgccatggctgagccgctgccagaacccaagaagaggctgctcgacgctcagctcctcatcaggtaattctcctggttccgctttggccacgggcggaggacacagggggaggtgactccggaccactgcaggagaggcagcttccccccttgggtccaacaaacccgcgtgtgacgctggccccaccgtggaatggcctggcccccccagccccaccacccccaccccggctgcagattacggagaacggcgagttccgaaacaccgcagaccactagcccacccagcatcagagaccttctcttcctttcctgtgcaccccaccctgtaacagcaccaaccaccaggattggacatcaccgaggaacagcgggattgcctccccgaatgcctccctgggaggcacactgattgcccacccccaccactgcaccatttccaggagggagagtggggaccctcagccgcccccttttccttcccattggggtgctgccctctctttgacccccagggacccttgccccaggacaccgcctaccccgtacagaccccttcactccggggtgctatccccatcctctgcctcatcgttcccctgagcactgggggacagaccctcacccccaccctgggggtgtggcacctccaaactttcaacttcagggtgatttttttagcagtaaccagagctgacaatctaactcccctccaccgccccattttggcctcccctgccccccttgttatggggaggggaccccggg

SEQ ID NO: 187964 - DNA, 1461 bp, Homo sapiens
  Payload ID: 16991
  Gene Symbol: SYNGAP1
  Gene Name: synaptic Ras GTPase activating protein 1
  ENST ID: ENST00000355818
  CDS Start-End: 1-1461
gaggactttctgggcttcatgaatgagtttctggagctggaatggggttccatgcagcagtttttgtatgagatctccaatctggacacgctaaccaacagcagtagctttgagggttacatcgacttgggccgagagctctccacactgcatgccctactctgggaggtgctgccccagctcagcaaggaagccctcctgaagctgggtccactgccccggctcctcaacgacatcagcacagctctgaggaaccccaacatccaaaggcagccaagccgccagagtgagcggccccggcctcagcctgtggtactgcgggggccatcggctgagatgcagggctacatgatgcgggacctcaacagctctatggacatggctcgcctcccctccccaaccaaggaaaagccacccccaccaccgcctggtggtggtaaagacctgttctatgtaagccgtccacccctggcccgttcctcaccagcatactgcacgagcagctcggacatcacagagccagagcagaagatgctgagtgtcaacaagagtgtgtccatgctggacttacagggtgatgggcctggtggccgcctcaacagcagcagtgtttcgaacctggcggccgtaggggacctgctgcactcaagccaggcctcgctgacagcagccttggggctacggcctgcgcctgccggacgcctctcccaggggagtggctcatccatcacggcggctggcatgcgcctcagccagatgggtgtcaccacagacggtgtccctgcccagcaactgcgaatccccctctccttccagaaccctctcttccacatggctgctgatgggccaggtcccccaggcggccatggagggggcggtggccatggcccaccttcctcccatcaccaccaccaccaccatcaccaccaccgaggtggagagccccctggggacacctttgccccattccatggctatagcaagagtgaggacctctcttccggggtccccaagccccctgctgcctccatccttcatagccacagctacagtgatgagtttggaccctctggcactgacttcacccgtcggcagctttcactccaggacaacctgcagcacatgctgtcccctccccagatcaccattggtccccagaggccagccccctcagggcctggaggtgggagcggtgggggcagcggtgggggtggcgggggccagccgcctccattgcagaggggcaagtctcagcagttgacagtcagcgcagcccagaaaccccggccatccagcgggaatctattgcagtccccagagccaagttatggccccgcccgtccacggcaacagagcctcagcaaggagggcagcattgggggcagcgggggcagcggtggcggagggggtggggggctgaagccctccatcaccaagcagcattctcagacaccatccaca

SEQ ID NO: 187965 - DNA, 4601 bp, Homo sapiens
  Payload ID: 16991
  Gene Symbol: SYNGAP1
  Gene Name: synaptic Ras GTPase activating protein 1
  Uniprot ID: Q96PV0
  ENST ID: ENST00000395071
  CDS Start-End: 1-3900
atgagcaggtctcgagcctccatccatcgggggagcatccccgcgatgtcctatgcccccttcagagatgtacggggaccctctatgcaccgaacccaatacgttcattccccgtatgatcgtcctggttggaaccctcggttctgcatcatctcggggaaccagctgctcatgctggatgaggatgagatacaccccctactgatccgggaccggaggagcgagtccagtcgcaacaaactgctgagacgcacagtctccgtgccggtggaggggcggccccacggcgagcatgaataccacttgggtcgctcgaggaggaagagtgtcccaggggggaagcagtacagcatggagggtgcccctgctgcgcccttccggccctcgcaaggcttcctgagccgacggctaaaaagctccatcaaacgaacgaagtcacaacccaaacttgaccggaccagcagctttcgccagatcctgcctcgcttccgaagtgctgaccatgaccgggcccggctgatgcaaagctttaaggagtcacactctcatgagtccttgctgagtcctagcagtgcagctgaggcattggagctcaacttggatgaagattccattatcaagccagtgcacagctccatcctgggccaggagttctgttttgaggtaacaacttcatcaggaacaaaatgctttgcctgtcggtctgcggccgaaagagacaaatggattgagaatctgcagcgggcagtaaagcccaacaaggacaacagccgccgggtagacaatgtgctaaagctgtggatcatagaggcccgggagctgccccccaagaagcggtactactgtgagctctgcctggatgacatgctgtatgcacgcaccacctccaagccccgctctgcctctggggacaccgtcttctggggcgagcacttcgagtttaacaacctgccggctgtccgtgccctgcggctgcatctgtaccgtgactcagacaaaaagcgcaagaaggacaaggcaggctatgtcggcctggtgactgtgccagtggccaccctggctgggcgccacttcacagagcagtggtaccctgtaaccctgccaacaggcagtgggggatctgggggcatgggttcgggagggggagggggctcggggggtggctcagggggcaagggcaaaggaggttgcccggctgtgcggctgaaagcacgttaccagacaatgagcatcttgcccatggagctatataaagagtttgcagagtatgtcaccaaccattatcggatgctgtgtgcagtcttggagcccgccctgaatgtcaaaggcaaggaggaggttgccagtgcactagttcacatcctgcagagtacaggcaaggccaaggacttcctttcagacatggccatgtctgaggtagaccggttcatggaacgggagcacctcatattccgcgagaacacgcttgccactaaagccatagaagagtatatgagactgattggtcagaaatacctcaaggatgccattggagaattcatccgtgctctgtatgaatctgaggaaaactgcgaggtagaccctatcaagtgcacagcatccagtttggcagagcaccaggccaacctgcgaatgtgctgtgagttggccctgtgcaaggtggtcaactcccactgcgtgttcccgagggagctgaaggaggtgtttgcttcatggcggctgcgctgcgcagagcgaggccgggaggacatcgcagacaggcttatcagcgcctcactcttcctgcgcttcctctgcccagcgattatgtcgcccagtctctttgggcttatgcaggagtacccagatgagcagacctcacgaaccctcaccctcattgccaaggtcatccagaacctggccaacttttccaagtttacctcaaaggaggactttctgggcttcatgaatgagtttctggagctggaatggggttccatgcagcagtttttgtatgagatctccaatctggacacgctaaccaacagcagtagctttgagggttacatcgacttgggccgagagctctccacactgcatgccctactctgggaggtgctgccccagctcagcaaggaagccctcctgaagctgggtccactgccccggctcctcaacgacatcagcacagctctgaggaaccccaacatccaaaggcagccaagccgccagagtgagcggccccggcctcagcctgtggtactgcgggggccatcggctgagatgcagggctacatgatgcgggacctcaacagctccatcgaccttcagtccttcatggctcgaggcctcaacagctctatggacatggctcgcctcccctccccaaccaaggaaaagccacccccaccaccgcctggtggtggtaaagacctgttctatgtaagccgtccacccctggcccgttcctcaccagcatactgcacgagcagctcggacatcacagagccagagcagaagatgctgagtgtcaacaagagtgtgtccatgctggacttacagggtgatgggcctggtggccgcctcaacagcagcagtgtttcgaacctggcggccgtaggggacctgctgcactcaagccaggcctcgctgacagcagccttggggctacggcctgcgcctgccggacgcctctcccaggggagtggctcatccatcacggcggctggcatgcgcctcagccagatgggtgtcaccacagacggtgtccctgcccagcaactgcgaatccccctctccttccagaaccctctcttccacatggctgctgatgggccaggtcccccaggcggccatggagggggcggtggccatggcccaccttcctcccatcaccaccaccaccaccatcaccaccaccgaggtggagagccccctggggacacctttgccccattccatggctatagcaagagtgaggacctctcttccggggtccccaagccccctgctgcctccatccttcatagccacagctacagtgatgagtttggaccctctggcactgacttcacccgtcggcagctttcactccaggacaacctgcagcacatgctgtcccctccccagatcaccattggtccccagaggccagccccctcagggcctggaggtgggagcggtgggggcagcggtgggggtggcgggggccagccgcctccattgcagaggggcaagtctcagcagttgacagtcagcgcagcccagaaaccccggccatccagcgggaatctattgcagtccccagagccaagttatggccccgcccgtccacggcaacagagcctcagcaaggagggcagcattgggggcagcgggggcagcggtggcggagggggtggggggctgaagccctccatcaccaagcagcattctcagacaccatccacattgaaccccacaatgccagcctctgagcggacagtggcctgggtctccaacatgcctcacctgtcggctgacatcgagagtgcccacatcgagcgggaagagtacaagctcaaggagtactcaaaatcgatggatgagagccggctggatagggtgaaggagtacgaggaggagattcactcactgaaagagcggctgcacatgtccaaccggaagctggaagagtatgagcggaggctgctgtcccaggaagaacaaaccagcaaaatcctgatgcagtatcaggcccgactggagcagagtgagaagaggctaaggcagcagcaggcagagaaggattcccagatcaagagcatcattggcaggctgatgctggtggaggaggagctgcgccgggaccaccccgccatggctgagccgctgccagaacccaagaagaggctgctcgacgctcagctcctcatcaggtaattctcctggttccgctttggccacgggcggaggacacagggggaggtgactccggaccactgcaggagaggcagcttccccccttgggtccaacaaacccgcgtgtgacgctggccccaccgtggaatggcctggcccccccagccccaccacccccaccccggctgcagattacggagaacggcgagttccgaaacaccgcagaccactagcccacccagcatcagagaccttctcttcctttcctgtgcaccccaccctgtaacagcaccaaccaccaggattggacatcaccgaggaacagcgggattgcctccccgaatgcctccctgggaggcacactgattgcccacccccaccactgcaccatttccaggagggagagtggggaccctcagccgcccccttttccttcccattggggtgctgccctctctttgacccccagggacccttgccccaggacaccgcctaccccgtacagaccccttcactccggggtgctatccccatcctctgcctcatcgttcccctgagcactgggggacagaccctcacccccaccctgggggtgtggcacctccaaactttcaacttcagggtgatttttttagcagtaaccagagctgacaatctaactcccctccaccgccccattttggcctcccctgccccccttgttatggggaggggaccccggg

SEQ ID NO: 187966 - DNA, 5828 bp, Homo sapiens
  Payload ID: 16991
  Gene Symbol: SYNGAP1
  Gene Name: synaptic Ras GTPase activating protein 1
  Uniprot ID: Q96PV0
  ENST ID: ENST00000418600
  CDS Start-End: 1-3858
atgagcaggtctcgagcctccatccatcgggggagcatccccgcgatgtcctatgcccccttcagagatgtacggggaccctctatgcaccgaacccaatacgttcattccccgtatgatcgtcctggttggaaccctcggttctgcatcatctcggggaaccagctgctcatgctggatgaggatgagatacaccccctactgatccgggaccggaggagcgagtccagtcgcaacaaactgctgagacgcacagtctccgtgccggtggaggggcggccccacggcgagcatgaataccacttgggtcgctcgaggaggaagagtgtcccaggggggaagcagtacagcatggagggtgcccctgctgcgcccttccggccctcgcaaggcttcctgagccgacggctaaaaagctccatcaaacgaacgaagtcacaacccaaacttgaccggaccagcagctttcgccagatcctgcctcgcttccgaagtgctgaccatgaccgggcccggctgatgcaaagctttaaggagtcacactctcatgagtccttgctgagtcctagcagtgcagctgaggcattggagctcaacttggatgaagattccattatcaagccagtgcacagctccatcctgggccaggagttctgttttgaggtaacaacttcatcaggaacaaaatgctttgcctgtcggtctgcggccgaaagagacaaatggattgagaatctgcagcgggcagtaaagcccaacaaggacaacagccgccgggtagacaatgtgctaaagctgtggatcatagaggcccgggagctgccccccaagaagcggtactactgtgagctctgcctggatgacatgctgtatgcacgcaccacctccaagccccgctctgcctctggggacaccgtcttctggggcgagcacttcgagtttaacaacctgccggctgtccgtgccctgcggctgcatctgtaccgtgactcagacaaaaagcgcaagaaggacaaggcaggctatgtcggcctggtgactgtgccagtggccaccctggctgggcgccacttcacagagcagtggtaccctgtaaccctgccaacaggcagtgggggatctgggggcatgggttcgggagggggagggggctcggggggtggctcagggggcaagggcaaaggaggttgcccggctgtgcggctgaaagcacgttaccagacaatgagcatcttgcccatggagctatataaagagtttgcagagtatgtcaccaaccattatcggatgctgtgtgcagtcttggagcccgccctgaatgtcaaaggcaaggaggaggttgccagtgcactagttcacatcctgcagagtacaggcaaggccaaggacttcctttcagacatggccatgtctgaggtagaccggttcatggaacgggagcacctcatattccgcgagaacacgcttgccactaaagccatagaagagtatatgagactgattggtcagaaatacctcaaggatgccattggagaattcatccgtgctctgtatgaatctgaggaaaactgcgaggtagaccctatcaagtgcacagcatccagtttggcagagcaccaggccaacctgcgaatgtgctgtgagttggccctgtgcaaggtggtcaactcccactgcgtgttcccgagggagctgaaggaggtgtttgcttcgtggcggctgcgctgcgcagagcgaggccgggaggacatcgcagacaggcttatcagcgcctcactcttcctgcgcttcctctgcccagcgattatgtcgcccagtctctttgggcttatgcaggagtacccagatgagcagacctcacgaaccctcaccctcattgccaaggtcatccagaacctggccaacttttccaagtttacctcaaaggaggactttctgggcttcatgaatgagtttctggagctggaatggggttccatgcagcagtttttgtatgagatctccaatctggacacgctaaccaacagcagtagctttgagggttacatcgacttgggccgagagctctccacactgcatgccctactctgggaggtgctgccccagctcagcaaggaagccctcctgaagctgggtccactgccccggctcctcaacgacatcagcacagctctgaggaaccccaacatccaaaggcagccaagccgccagagtgagcggccccggcctcagcctgtggtactgcgggggccatcggctgagatgcagggctacatgatgcgggacctcaacagctccatcgaccttcagtccttcatggctcgaggcctcaacagctctatggacatggctcgcctcccctccccaaccaaggaaaagccacccccaccaccgcctggtggtggtaaagacctgttctatgtaagccgtccacccctggcccgttcctcaccagcatactgcacgagcagctcggacatcacagagccagagcagaagatgctgagtgtcaacaagagtgtgtccatgctggacttacagggtgatgggcctggtggccgcctcaacagcagcagtgtttcgaacctggcggccgtaggggacctgctgcactcaagccaggcctcgctgacagcagccttggggctacggcctgcgcctgccggacgcctctcccaggggagtggctcatccatcacggcggctggcatgcgcctcagccagatgggtgtcaccacagacggtgtccctgcccagcaactgcgaatccccctctccttccagaaccctctcttccacatggctgctgatgggccaggtcccccaggcggccatggagggggcggtggccatggcccaccttcctcccatcaccaccaccaccaccatcaccaccaccgaggtggagagccccctggggacacctttgccccattccatggctatagcaagagtgaggacctctcttccggggtccccaagccccctgctgcctccatccttcatagccacagctacagtgatgagtttggaccctctggcactgacttcacccgtcggcagctttcactccaggacaacctgcagcacatgctgtcccctccccagatcaccattggtccccagaggccagccccctcagggcctggaggtgggagcggtgggggcagcggtgggggtggcgggggccagccgcctccattgcagaggggcaagtctcagcagttgacagtcagcgcagcccagaaaccccggccatccagcgggaatctattgcagtccccagagccaagttatggccccgcccgtccacggcaacagagcctcagcaaggagggcagcattgggggcagcgggggcagcggtggcggagggggtggggggctgaagccctccatcaccaagcagcattctcagacaccatccacattgaaccccacaatgccagcctctgagcggacagtggcctgggtctccaacatgcctcacctgtcggctgacatcgagagtgcccacatcgagcgggaagagtacaagctcaaggagtactcaaaatcgatggatgagagccggctggatagggtgaaggagtacgaggaggagattcactcactgaaagagcggctgcacatgtccaaccggaagctggaagagtatgagcggaggctgctgtcccaggaagaacaaaccagcaaaatcctgatgcagtatcaggcccgactggagcagagtgagaagaggctaaggcagcagcaggcagagaaggattcccagatcaagagcatcattggcagcccgtcccttcaggctgatgctggtggaggaggagctgcgccgggaccaccccgccatggctgagccgctgccagaacccaagaagaggctgctcgacgctcaggagaggcagcttccccccttgggtccaacaaacccgcgtgtgacgctggccccaccgtggaatggcctggcccccccagccccaccacccccaccccggctgcagattacggagaacggcgagttccgaaacaccgcagaccactagcccacccagcatcagagaccttctcttcctttcctgtgcaccccaccctgtaacagcaccaaccaccaggattggacatcaccgaggaacagcgggattgcctccccgaatgcctccctgggaggcacactgattgcccacccccaccactgcaccatttccaggagggagagtggggaccctcagccgcccccttttccttcccattggggtgctgccctctctttgacccccagggacccttgccccaggacaccgcctaccccgtacagaccccttcactccggggtgctatccccatcctctgcctcatcgttcccctgagcactgggggacagaccctcacccccaccctgggggtgtggcacctccaaactttcaacttcagggtgatttttttagcagtaaccagagctgacaatctaactcccctccaccgccccattttggcctcccctgccccccttgttatggggaggggaccccgggtgagggggccctattaccccttgatttctcaggagcgtctgggggggctcagcacgcacaaactccttctccttctaccactcttaaatttactccctccccacccagaacccagatggggtggagggggccaccggggcagggagggggcggcaaggggggaatgggagttgtctccccttctccccacacctgatctgctctcggctggtcccagagcggggtgagggggcttatgcccccccctcccccagtgtgttgggtggggtggaattgaggttagggtgaggggtcagggtttaggagggtgtgtatgttgggaggacaggctagttgatctgtcctactctgacacacagtcccctctgccccttccttctctcttcttggtctctactcccagggggaggggggaacttactctaggaaaagccatgtctctctcccccagggtggggggacctgtgttggaggaggggtgttggggggcccccttccatgactctgtcccctgggggaggtaggacagggctgggcttccctctcatcctccccctcccaatctccttccacctccctccctcccgccagctccacgatttttcggtgtttctctgtacatagttttctggcgggataggggaggtaggatggatggggtttggggtgggtaggccatgggaggggagaagcccctccttggcaccccctcttccctgactgctgtcccctacccagccttgcccccttcatccttttgcgtttggtattgagactctcctagactctactcctctttcttttgtatggacagttccccttcagtcccatccccctacacatacacccagccggggccaaatttatacttatataaaagttgtaaatatgtgaaattttatccctgtgccctttccccacctcaggccctacccctggaccctccccaaccttccttctctcttctttggctgttgtaattatctggggtttgtactgtacatatccggggtgtgtgtgtgtgggctgggggcaacccttctgtacagagcttcctggccccctccccccccgcccctctgcttccctccccacccaccacctcaagggtagggagttgctcttcctacctgttttattttgttttctcgttctccctccccaccccactcccagccttatctatcccccctcactgtccccttttctccactcccagccccatttcctttttttctggagtgtgtggtgaaacagaaaaaaacatgtttaataaacggagattgttctttta

SEQ ID NO: 187967 - DNA, 4339 bp, Homo sapiens
  Payload ID: 16991
  Gene Symbol: SYNGAP1
  Gene Name: synaptic Ras GTPase activating protein 1
  Uniprot ID: Q96PV0
  ENST ID: ENST00000414753
  CDS Start-End: 181-4035
gggggaagaggaaagcctgcctatgggcaatgacctttaacccatctttccccccagctagccccttctggggtgggtgggcaccagggacctagcctccctggatctttggtgtccttcattactggggttttactgaccctctcagtcatgctcccctgctgactgccagccccagtcatgggcctaaggcctcccaccccatccccctcagggggctcctgctcaggttccttgccccctccttcccgctgccagcctctccgccgtcgctgctcttcctgctgctttccgggggaataccacttgggtcgctcgaggaggaagagtgtcccaggggggaagcagtacagcatggagggtgcccctgctgcgcccttccggccctcgcaaggcttcctgagccgacggctaaaaagctccatcaaacgaacgaagtcacaacccaaacttgaccggaccagcagctttcgccagatcctgcctcgcttccgaagtgctgaccatgaccgggcccggctgatgcaaagctttaaggagtcacactctcatgagtccttgctgagtcctagcagtgcagctgaggcattggagctcaacttggatgaagattccattatcaagccagtgcacagctccatcctgggccaggagttctgttttgaggtaacaacttcatcaggaacaaaatgctttgcctgtcggtctgcggccgaaagagacaaatggattgagaatctgcagcgggcagtaaagcccaacaaggacaacagccgccgggtagacaatgtgctaaagctgtggatcatagaggcccgggagctgccccccaagaagcggtactactgtgagctctgcctggatgacatgctgtatgcacgcaccacctccaagccccgctctgcctctggggacaccgtcttctggggcgagcacttcgagtttaacaacctgccggctgtccgtgccctgcggctgcatctgtaccgtgactcagacaaaaagcgcaagaaggacaaggcaggctatgtcggcctggtgactgtgccagtggccaccctggctgggcgccacttcacagagcagtggtaccctgtaaccctgccaacaggcagtgggggatctgggggcatgggttcgggagggggagggggctcggggggtggctcagggggcaagggcaaaggaggttgcccggctgtgcggctgaaagcacgttaccagacaatgagcatcttgcccatggagctatataaagagtttgcagagtatgtcaccaaccattatcggatgctgtgtgcagtcttggagcccgccctgaatgtcaaaggcaaggaggaggttgccagtgcactagttcacatcctgcagagtacaggcaaggccaaggacttcctttcagacatggccatgtctgaggtagaccggttcatggaacgggagcacctcatattccgcgagaacacgcttgccactaaagccatagaagagtatatgagactgattggtcagaaatacctcaaggatgccattggagaattcatccgtgctctgtatgaatctgaggaaaactgcgaggtagaccctatcaagtgcacagcatccagtttggcagagcaccaggccaacctgcgaatgtgctgtgagttggccctgtgcaaggtggtcaactcccactgcgtgttcccgagggagctgaaggaggtgtttgcttcatggcggctgcgctgcgcagagcgaggccgggaggacatcgcagacaggcttatcagcgcctcactcttcctgcgcttcctctgcccagcgattatgtcgcccagtctctttgggcttatgcaggagtacccagatgagcagacctcacgaaccctcaccctcattgccaaggtcatccagaacctggccaacttttccaagtttacctcaaaggaggactttctgggcttcatgaatgagtttctggagctggaatggggttccatgcagcagtttttgtatgagatctccaatctggacacgctaaccaacagcagtagctttgagggttacatcgacttgggccgagagctctccacactgcatgccctactctgggaggtgctgccccagctcagcaaggaagccctcctgaagctgggtccactgccccggctcctcaacgacatcagcacagctctgaggaaccccaacatccaaaggcagccaagccgccagagtgagcggccccggcctcagcctgtggtactgcgggggccatcggctgagatgcagggctacatgatgcgggacctcaacagctccatcgaccttcagtccttcatggctcgaggcctcaacagctctatggacatggctcgcctcccctccccaaccaaggaaaagccacccccaccaccgcctggtggtggtaaagacctgttctatgtaagccgtccacccctggcccgttcctcaccagcatactgcacgagcagctcggacatcacagagccagagcagaagatgctgagtgtcaacaagagtgtgtccatgctggacttacagggtgatgggcctggtggccgcctcaacagcagcagtgtttcgaacctggcggccgtaggggacctgctgcactcaagccaggcctcgctgacagcagccttggggctacggcctgcgcctgccggacgcctctcccaggggagtggctcatccatcacggcggctggcatgcgcctcagccagatgggtgtcaccacagacggtgtccctgcccagcaactgcgaatccccctctccttccagaaccctctcttccacatggctgctgatgggccaggtcccccaggcggccatggagggggcggtggccatggcccaccttcctcccatcaccaccaccaccaccatcaccaccaccgaggtggagagccccctggggacacctttgccccattccatggctatagcaagagtgaggacctctcttccggggtccccaagccccctgctgcctccatccttcatagccacagctacagtgatgagtttggaccctctggcactgacttcacccgtcggcagctttcactccaggacaacctgcagcacatgctgtcccctccccagatcaccattggtccccagaggccagccccctcagggcctggaggtgggagcggtgggggcagcggtgggggtggcgggggccagccgcctccattgcagaggggcaagtctcagcagttgacagtcagcgcagcccagaaaccccggccatccagcgggaatctattgcagtccccagagccaagttatggccccgcccgtccacggcaacagagcctcagcaaggagggcagcattgggggcagcgggggcagcggtggcggagggggtggggggctgaagccctccatcaccaagcagcattctcagacaccatccacattgaaccccacaatgccagcctctgagcggacagtggcctgggtctccaacatgcctcacctgtcggctgacatcgagagtgcccacatcgagcgggaagagtacaagctcaaggagtactcaaaatcgatggatgagagccggctggatagggtgaaggagtacgaggaggagattcactcactgaaagagcggctgcacatgtccaaccggaagctggaagagtatgagcggaggctgctgtcccaggaagaacaaaccagcaaaatcctgatgcagtatcaggcccgactggagcagagtgagaagaggctaaggcagcagcaggcagagaaggattcccagatcaagagcatcattggcaggctgatgctggtggaggaggagctgcgccgggaccaccccgccatggctgagccgctgccagaacccaagaagaggctgctcgacgctcaggagaggcagcttccccccttgggtccaacaaacccgcgtgtgacgctggccccaccgtggaatggcctggcccccccagccccaccacccccaccccggctgcagattacggagaacggcgagttccgaaacaccgcagaccactagcccacccagcatcagagaccttctcttcctttcctgtgcaccccaccctgtaacagcaccaaccaccaggattggacatcaccgaggaacagcgggattgcctccccgaatgcctccctgggaggcacactgattgcccacccccaccactgcaccatttccaggagggagagtggggaccctcagccgcccccttttccttcccattggggtgctgccctctctttgacccccagggacccttgccccaggacaccgcctaccccgtacagaccccttcactccggggtgctatccccatcct

SEQ ID NO: 187968 - DNA, 4339 bp, Homo sapiens
  Payload ID: 16991
  Gene Symbol: SYNGAP1
  Gene Name: synaptic Ras GTPase activating protein 1
  Uniprot ID: Q96PV0
  ENST ID: ENST00000428982
  CDS Start-End: 181-4035
gggggaagaggaaagcctgcctatgggcaatgacctttaacccatctttccccccagctagccccttctggggtgggtgggcaccagggacctagcctccctggatctttggtgtccttcattactggggttttactgaccctctcagccatgctcccctgctgactgccagccccagtcatgggcctaaggcctcccaccccatccccctcagggggctcctgctcaggttccttgccccctccttcccgctgccagcctctccgccgtcgctgctcttcctgctgctttccgggggaataccacttgggtcgctcgaggaggaagagtgtcccaggggggaagcagtacagcatggagggtgcccctgctgcgcccttccggccctcgcaaggcttcctgagccgacggctaaaaagctccatcaaacgaacgaagtcacaacccaaacttgaccggaccagcagctttcgccagatcctgcctcgcttccgaagtgctgaccatgaccgggcccggctgatgcaaagctttaaggagtcacactctcatgagtccttgctgagtcctagcagtgcagctgaggcattggagctcaacttggatgaagattccattatcaagccagtgcacagctccatcctgggccaggagttctgttttgaggtaacaacttcatcaggaacaaaatgctttgcctgtcggtctgcggccgaaagagacaaatggattgagaatctgcagcgggcagtaaagcccaacaaggacaacagccgccgggtagacaatgtgctaaagctgtggatcatagaggcccgggagctgccccccaagaagcggtactactgtgagctctgcctggatgacatgctgtatgcacgcaccacctccaagccccgctctgcctctggggacaccgtcttctggggcgagcacttcgagtttaacaacctgccggctgtccgtgccctgcggctgcatctgtaccgtgactcagacaaaaagcgcaagaaggacaaggcaggctatgtcggcctggtgactgtgccagtggccaccctggctgggcgccacttcacagagcagtggtaccctgtaaccctgccaacaggcagtgggggatctgggggcatgggttcgggagggggagggggctcggggggtggctcagggggcaagggcaaaggaggttgcccggctgtgcggctgaaagcacgttaccagacaatgagcatcttgcccatggagctatataaagagtttgcagagtatgtcaccaaccattatcggatgctgtgtgcagtcttggagcccgccctgaatgtcaaaggcaaggaggaggttgccagtgcactagttcacatcctgcagagtacaggcaaggccaaggacttcctttcagacatggccatgtctgaggtagaccggttcatggaacgggagcacctcatattccgcgagaacacgcttgccactaaagccatagaagagtatatgagactgattggtcagaaatacctcaaggatgccattggagaattcatccgtgctctgtatgaatctgaggaaaactgcgaggtagaccctatcaagtgcacagcatccagtttggcagagcaccaggccaacctgcgaatgtgctgtgagttggccctgtgcaaggtggtcaactcccactgcgtgttcccgagggagctgaaggaggtgtttgcttcgtggcggctgcgctgcgcagagcgaggccgggaggacatcgcagacaggcttatcagcgcctcactcttcctgcgcttcctctgcccagcgattatgtcgcccagtctctttgggcttatgcaggagtacccagatgagcagacctcacgaaccctcaccctcattgccaaggtcatccagaacctggccaacttttccaagtttacctcaaaggaggactttctgggcttcatgaatgagtttctggagctggaatggggttccatgcagcagtttttgtatgagatctccaatctggacacgctaaccaacagcagtagctttgagggttacatcgacttgggccgagagctctccacactgcatgccctactctgggaggtgctgccccagctcagcaaggaagccctcctgaagctgggtccactgccccggctcctcaacgacatcagcacagctctgaggaaccccaacatccaaaggcagccaagccgccagagtgagcggccccggcctcagcctgtggtactgcgggggccatcggctgagatgcagggctacatgatgcgggacctcaacagctccatcgaccttcagtccttcatggctcgaggcctcaacagctctatggacatggctcgcctcccctccccaaccaaggaaaagccacccccaccaccgcctggtggtggtaaagacctgttctatgtaagccgtccacccctggcccgttcctcaccagcatactgcacgagcagctcggacatcacagagccagagcagaagatgctgagtgtcaacaagagtgtgtccatgctggacttacagggtgatgggcctggtggccgcctcaacagcagcagtgtttcgaacctggcggccgtaggggacctgctgcactcaagccaggcctcgctgacagcagccttggggctacggcctgcgcctgccggacgcctctcccaggggagtggctcatccatcacggcggctggcatgcgcctcagccagatgggtgtcaccacagacggtgtccctgcccagcaactgcgaatccccctctccttccagaaccctctcttccacatggctgctgatgggccaggtcccccaggcggccatggagggggcggtggccatggcccaccttcctcccatcaccaccaccaccaccatcaccaccaccgaggtggagagccccctggggacacctttgccccattccatggctatagcaagagtgaggacctctcttccggggtccccaagccccctgctgcctccatccttcatagccacagctacagtgatgagtttggaccctctggcactgacttcacccgtcggcagctttcactccaggacaacctgcagcacatgctgtcccctccccagatcaccattggtccccagaggccagccccctcagggcctggaggtgggagcggtgggggcagcggtgggggtggcgggggccagccgcctccattgcagaggggcaagtctcagcagttgacagtcagcgcagcccagaaaccccggccatccagcgggaatctattgcagtccccagagccaagttatggccccgcccgtccacggcaacagagcctcagcaaggagggcagcattgggggcagcgggggcagcggtggcggagggggtggggggctgaagccctccatcaccaagcagcattctcagacaccatccacattgaaccccacaatgccagcctctgagcggacagtggcctgggtctccaacatgcctcacctgtcggctgacatcgagagtgcccacatcgagcgggaagagtacaagctcaaggagtactcaaaatcgatggatgagagccggctggatagggtgaaggagtacgaggaggagattcactcactgaaagagcggctgcacatgtccaaccggaagctggaagagtatgagcggaggctgctgtcccaggaagaacaaaccagcaaaatcctgatgcagtatcaggcccgactggagcagagtgagaagaggctaaggcagcagcaggcagagaaggattcccagatcaagagcatcattggcaggctgatgctggtggaggaggagctgcgccgggaccaccccgccatggctgagccgctgccagaacccaagaagaggctgctcgacgctcaggagaggcagcttccccccttgggtccaacaaacccgcgtgtgacgctggccccaccgtggaatggcctggcccccccagccccaccacccccaccccggctgcagattacggagaacggcgagttccgaaacaccgcagaccactagcccacccagcatcagagaccttctcttcctttcctgtgcaccccaccctgtaacagcaccaaccaccaggattggacatcaccgaggaacagcgggattgcctccccgaatgcctccctgggaggcacactgattgcccacccccaccactgcaccatttccaggagggagagtggggaccctcagccgcccccttttccttcccattggggtgctgccctctctttgacccccagggacccttgccccaggacaccgcctaccccgtacagaccccttcactccggggtgctatccccatcct

SEQ ID NO: 187969 - DNA, 5916 bp, Homo sapiens
  Payload ID: 16991
  Gene Symbol: SYNGAP1
  Gene Name: synaptic Ras GTPase activating protein 1
  Uniprot ID: Q96PV0
  ENST ID: ENST00000455687
  CDS Start-End: 102-4133
cctcctcctcctcctccacctcctcctccttctccccctctttctccccctctttctctcttctttctcccccgtccccccgccccctccccccaggcctgatgagcaggtctcgagcctccatccatcgggggagcatccccgcgatgtcctatgcccccttcagagatgtacggggaccctctatgcaccgaacccaatacgttcattccccgtatgatcgtcctggttggaaccctcggttctgcatcatctcggggaaccagctgctcatgctggatgaggatgagatacaccccctactgatccgggaccggaggagcgagtccagtcgcaacaaactgctgagacgcacagtctccgtgccggtggaggggcggccccacggcgagcatgaataccacttgggtcgctcgaggaggaagagtgtcccaggggggaagcagtacagcatggagggtgcccctgctgcgcccttccggccctcgcaaggcttcctgagccgacggctaaaaagctccatcaaacgaacgaagtcacaacccaaacttgaccggaccagcagctttcgccagatcctgcctcgcttccgaagtgctgaccatgaccgggcccggctgatgcaaagctttaaggagtcacactctcatgagtccttgctgagtcctagcagtgcagctgaggcattggagctcaacttggatgaagattccattatcaagccagtgcacagctccatcctgggccaggagttctgttttgaggtaacaacttcatcaggaacaaaatgctttgcctgtcggtctgcggccgaaagagacaaatggattgagaatctgcagcgggcagtaaagcccaacaaggacaacagccgccgggtagacaatgtgctaaagctgtggatcatagaggcccgggagctgccccccaagaagcggtactactgtgagctctgcctggatgacatgctgtatgcacgcaccacctccaagccccgctctgcctctggggacaccgtcttctggggcgagcacttcgagtttaacaacctgccggctgtccgtgccctgcggctgcatctgtaccgtgactcagacaaaaagcgcaagaaggacaaggcaggctatgtcggcctggtgactgtgccagtggccaccctggctgggcgccacttcacagagcagtggtaccctgtaaccctgccaacaggcagtgggggatctgggggcatgggttcgggagggggagggggctcggggggtggctcagggggcaagggcaaaggaggttgcccggctgtgcggctgaaagcacgttaccagacaatgagcatcttgcccatggagctatataaagagtttgcagagtatgtcaccaaccattatcggatgctgtgtgcagtcttggagcccgccctgaatgtcaaaggcaaggaggaggttgccagtgcactagttcacatcctgcagagtacaggcaaggccaaggacttcctttcagacatggccatgtctgaggtagaccggttcatggaacgggagcacctcatattccgcgagaacacgcttgccactaaagccatagaagagtatatgagactgattggtcagaaatacctcaaggatgccattggagaattcatccgtgctctgtatgaatctgaggaaaactgcgaggtagaccctatcaagtgcacagcatccagtttggcagagcaccaggccaacctgcgaatgtgctgtgagttggccctgtgcaaggtggtcaactcccactgcgtgttcccgagggagctgaaggaggtgtttgcttcatggcggctgcgctgcgcagagcgaggccgggaggacatcgcagacaggcttatcagcgcctcactcttcctgcgcttcctctgcccagcgattatgtcgcccagtctctttgggcttatgcaggagtacccagatgagcagacctcacgaaccctcaccctcattgccaaggtcatccagaacctggccaacttttccaagtttacctcaaaggaggactttctgggcttcatgaatgagtttctggagctggaatggggttccatgcagcagtttttgtatgagatctccaatctggacacgctaaccaacagcagtagctttgagggttacatcgacttgggccgagagctctccacactgcatgccctactctgggaggtgctgccccagctcagcaaggaagccctcctgaagctgggtccactgccccggctcctcaacgacatcagcacagctctgaggaaccccaacatccaaaggcagccaagccgccagagtgagcggccccggcctcagcctgtggtactgcgggggccatcggctgagatgcagggctacatgatgcgggacctcaacagctccatcgaccttcagtccttcatggctcgaggcctcaacagctctatggacatggctcgcctcccctccccaaccaaggaaaagccacccccaccaccgcctggtggtggtaaagacctgttctatgtaagccgtccacccctggcccgttcctcaccagcatactgcacgagcagctcggacatcacagagccagagcagaagatgctgagtgtcaacaagagtgtgtccatgctggacttacagggtgatgggcctggtggccgcctcaacagcagcagtgtttcgaacctggcggccgtaggggacctgctgcactcaagccaggcctcgctgacagcagccttggggctacggcctgcgcctgccggacgcctctcccaggggagtggctcatccatcacggcggctggcatgcgcctcagccagatgggtgtcaccacagacggtgtccctgcccagcaactgcgaatccccctctccttccagaaccctctcttccacatggctgctgatgggccaggtcccccaggcggccatggagggggcggtggccatggcccaccttcctcccatcaccaccaccaccaccatcaccaccaccgaggtggagagccccctggggacacctttgccccattccatggctatagcaagagtgaggacctctcttccggggtccccaagccccctgctgcctccatccttcatagccacagctacagtgatgagtttggaccctctggcactgacttcacccgtcggcagctttcactccaggacaacctgcagcacatgctgtcccctccccagatcaccattggtccccagaggccagccccctcagggcctggaggtgggagcggtgggggcagcggtgggggtggcgggggccagccgcctccattgcagaggggcaagtctcagcagttgacagtcagcgcagcccagaaaccccggccatccagcgggaatctattgcagtccccagagccaagttatggccccgcccgtccacggcaacagagcctcagcaaggagggcagcattgggggcagcgggggcagcggtggcggagggggtggggggctgaagccctccatcaccaagcagcattctcagacaccatccacattgaaccccacaatgccagcctctgagcggacagtggcctgggtctccaacatgcctcacctgtcggctgacatcgagagtgcccacatcgagcgggaagagtacaagctcaaggagtactcaaaatcgatggatgagagccggctggatagggtgaaggagtacgaggaggagattcactcactgaaagagcggctgcacatgtccaaccggaagctggaagagtatgagcggaggctgctgtcccaggaagaacaaaccagcaaaatcctgatgcagtatcaggcccgactggagcagagtgagaagaggctaaggcagcagcaggcagagaaggattcccagatcaagagcatcattggcaggctgatgctggtggaggaggagctgcgccgggaccaccccgccatggctgagccgctgccagaacccaagaagaggctgctcgacgctcaggagaggcagcttccccccttgggtccaacaaacccgcgtgtgacgctggccccaccgtggaatggcctggcccccccagccccaccacccccaccccggctgcagattacggagaacggcgagttccgaaacaccgcagaccactagcccacccagcatcagagaccttctcttcctttcctgtgcaccccaccctgtaacagcaccaaccaccaggattggacatcaccgaggaacagcgggattgcctccccgaatgcctccctgggaggcacactgattgcccacccccaccactgcaccatttccaggagggagagtggggaccctcagccgcccccttttccttcccattggggtgctgccctctctttgacccccagggacccttgccccaggacaccgcctaccccgtacagaccccttcactccggggtgctatccccatcctctgcctcatcgttcccctgagcactgggggacagaccctcacccccaccctgggggtgtggcacctccaaactttcaacttcagggtgatttttttagcagtaaccagagctgacaatctaactcccctccaccgccccattttggcctcccctgccccccttgttatggggaggggaccccgggtgagggggccctattaccccttgatttctcaggagcgtctgggggggctcagcacgcacaaactccttctccttctaccactcttaaatttactccctccccacccagaacccagatggggtggagggggccaccggggcagggagggggcggcaaggggggaatgggagttgtctccccttctccccacacctgatctgctctcggctggtcccagagcggggtgagggggcttatgcccccccctcccccagtgtgttgggtggggtggaattgaggttagggtgaggggtcagggtttaggagggtgtgtatgttgggaggacaggctagttgatctgtcctactctgacacacagtcccctctgccccttccttctctcttcttggtctctactcccagggggaggggggaacttactctaggaaaagccatgtctctctcccccagggtggggggacctgtgttggaggaggggtgttggggggcccccttccatgactctgtcccctgggggaggtaggacagggctgggcttccctctcatcctccccctcccaatctccttccacctccctccctcccgccagctccacgatttttcggtgtttctctgtacatagttttctggcgggataggggaggtaggatggatggggtttggggtgggtaggccatgggaggggagaagcccctccttggcaccccctcttccctgactgctgtcccctacccagccttgcccccttcatccttttgcgtttggtattgagactctcctagactctactcctctttcttttgtatggacagttccccttcagtcccatccccctacacatacacccagccggggccaaatttatacttatataaaagttgtaaatatgtgaaattttatccctgtgccctttccccacctcaggccctacccctggaccctccccaaccttccttctctcttctttggctgttgtaattatctggggtttgtactgtacatatccggggtgtgtgtgtgtgggctgggggcaacccttctgtacagagcttcctggccccctccccccccgcccctctgcttccctccccacccaccacctcaagggtagggagttgctcttcctacctgttttattttgttttctcgttctccctccccaccccactcccagccttatctatcccccctcactgtccccttttctccactcccagccccatttcctttttttctggagtgtgtggtgaaacagaaaaaaacatgtttaataaacggagattgttctttta

SEQ ID NO: 187970 - DNA, 3930 bp, Homo sapiens
  Payload ID: 16991
  Gene Symbol: SYNGAP1
  Gene Name: synaptic Ras GTPase activating protein 1
  ENST ID: ENST00000449372
  CDS Start-End: 11-3930
cccaggcctgatgagcaggtctcgagcctccatccatcgggggagcatccccgcgatgtcctatgcccccttcagagatgtacggggaccctctatgcaccgaacccaatacgttcattccccgtatgatcgtcctggttggaaccctcggttctgcatcatctcggggaaccagctgctcatgctggatgaggatgagatacaccccctactgatccgggaccggaggagcgagtccagtcgcaacaaactgctgagacgcacagtctccgtgccggtggaggggcggccccacggcgagcatgaataccacttgggtcgctcgaggaggaagagtgtcccaggggggaagcagtacagcatggagggtgcccctgctgcgcccttccggccctcgcaaggcttcctgagccgacggctaaaaagctccatcaaacgaacgaagtcacaacccaaacttgaccggaccagcagctttcgccagatcctgcctcgcttccgaagtgctgaccatgaccgggcccggctgatgcaaagctttaaggagtcacactctcatgagtccttgctgagtcctagcagtgcagctgaggcattggagctcaacttggatgaagattccattatcaagccagtgcacagctccatcctgggccaggagttctgttttgaggtaacaacttcatcaggaacaaaatgctttgcctgtcggtctgcggccgaaagagacaaatggattgagaatctgcagcgggcagtaaagcccaacaaggacaacagccgccgggtagacaatgtgctaaagctgtggatcatagaggcccgggagctgccccccaagaagcggtactactgtgagctctgcctggatgacatgctgtatgcacgcaccacctccaagccccgctctgcctctggggacaccgtcttctggggcgagcacttcgagtttaacaacctgccggctgtccgtgccctgcggctgcatctgtaccgtgactcagacaaaaagcgcaagaaggacaaggcaggctatgtcggcctggtgactgtgccagtggccaccctggctgggcgccacttcacagagcagtggtaccctgtaaccctgccaacaggcagtgggggatctgggggcatgggttcgggagggggagggggctcggggggtggctcagggggcaagggcaaaggaggttgcccggctgtgcggctgaaagcacgttaccagacaatgagcatcttgcccatggagctatataaagagtttgcagagtatgtcaccaaccattatcggatgctgtgtgcagtcttggagcccgccctgaatgtcaaaggcaaggaggaggttgccagtgcactagttcacatcctgcagagtacaggcaaggccaaggacttcctttcagacatggccatgtctgaggtagaccggttcatggaacgggagcacctcatattccgcgagaacacgcttgccactaaagccatagaagagtatatgagactgattggtcagaaatacctcaaggatgccattggagaattcatccgtgctctgtatgaatctgaggaaaactgcgaggtagaccctatcaagtgcacagcatccagtttggcagagcaccaggccaacctgcgaatgtgctgtgagttggccctgtgcaaggtggtcaactcccactgcgtgttcccgagggagctgaaggaggtgtttgcttcgtggcggctgcgctgcgcagagcgaggccgggaggacatcgcagacaggcttatcagcgcctcactcttcctgcgcttcctctgcccagcgattatgtcgcccagtctctttgggcttatgcaggagtacccagatgagcagacctcacgaaccctcaccctcattgccaaggtcatccagaacctggccaacttttccaagtttacctcaaaggaggactttctgggcttcatgaatgagtttctggagctggaatggggttccatgcagcagtttttgtatgagatctccaatctggacacgctaaccaacagcagtagctttgagggttacatcgacttgggccgagagctctccacactgcatgccctactctgggaggtgctgccccagctcagcaaggaagccctcctgaagctgggtccactgccccggctcctcaacgacatcagcacagctctgaggaaccccaacatccaaaggcagccaagccgccagagtgagcggccccggcctcagcctgtggtactgcgggggccatcggctgagatgcagggctacatgatgcgggacctcaacagctctatggacatggctcgcctcccctccccaaccaaggaaaagccacccccaccaccgcctggtggtggtaaagacctgttctatgtaagccgtccacccctggcccgttcctcaccagcatactgcacgagcagctcggacatcacagagccagagcagaagatgctgagtgtcaacaagagtgtgtccatgctggacttacagggtgatgggcctggtggccgcctcaacagcagcagtgtttcgaacctggcggccgtaggggacctgctgcactcaagccaggcctcgctgacagcagccttggggctacggcctgcgcctgccggacgcctctcccaggggagtggctcatccatcacggcggctggcatgcgcctcagccagatgggtgtcaccacagacggtgtccctgcccagcaactgcgaatccccctctccttccagaaccctctcttccacatggctgctgatgggccaggtcccccaggcggccatggagggggcggtggccatggcccaccttcctcccatcaccaccaccaccaccatcaccaccaccgaggtggagagccccctggggacacctttgccccattccatggctatagcaagagtgaggacctctcttccggggtccccaagccccctgctgcctccatccttcatagccacagctacagtgatgagtttggaccctctggcactgacttcacccgtcggcagctttcactccaggacaacctgcagcacatgctgtcccctccccagatcaccattggtccccagaggccagccccctcagggcctggaggtgggagcggtgggggcagcggtgggggtggcgggggccagccgcctccattgcagaggggcaagtctcagcagttgacagtcagcgcagcccagaaaccccggccatccagcgggaatctattgcagtccccagagccaagttatggccccgcccgtccacggcaacagagcctcagcaaggagggcagcattgggggcagcgggggcagcggtggcggagggggtggggggctgaagccctccatcaccaagcagcattctcagacaccatccacattgaaccccacaatgccagcctctgagcggacagtggcctgggtctccaacatgcctcacctgtcggctgacatcgagagtgcccacatcgagcgggaagagtacaagctcaaggagtactcaaaatcgatggatgagagccggctggatagggagtacgaggaggagattcactcactgaaagagcggctgcacatgtccaaccggaagctggaagagtatgagcggaggctgctgtcccaggaagaacaaaccagcaaaatcctgatgcagtatcaggcccgactggagcagagtgagaagaggctaaggcagcagcaggcagagaaggattcccagatcaagagcatcattggcaggctgatgctggtggaggaggagctgcgccgggaccaccccgccatggctgagccgctgccagaacccaagaagaggctgctcgacgctcaggagaggcagcttccccccttgggtccaacaaacccgcgtgtgacgctggccccaccgtggaatggcctggcccccccagcccc

SEQ ID NO: 187971 - DNA, 4264 bp, Homo sapiens
  Payload ID: 16991
  Gene Symbol: SYNGAP1
  Gene Name: synaptic Ras GTPase activating protein 1
  Uniprot ID: Q96PV0
  ENST ID: ENST00000628646
  CDS Start-End: 1-3900
atgagcaggtctcgagcctccatccatcgggggagcatccccgcgatgtcctatgcccccttcagagatgtacggggaccctctatgcaccgaacccaatacgttcattccccgtatgatcgtcctggttggaaccctcggttctgcatcatctcggggaaccagctgctcatgctggatgaggatgagatacaccccctactgatccgggaccggaggagcgagtccagtcgcaacaaactgctgagacgcacagtctccgtgccggtggaggggcggccccacggcgagcatgaataccacttgggtcgctcgaggaggaagagtgtcccaggggggaagcagtacagcatggagggtgcccctgctgcgcccttccggccctcgcaaggcttcctgagccgacggctaaaaagctccatcaaacgaacgaagtcacaacccaaacttgaccggaccagcagctttcgccagatcctgcctcgcttccgaagtgctgaccatgaccgggcccggctgatgcaaagctttaaggagtcacactctcatgagtccttgctgagtcctagcagtgcagctgaggcattggagctcaacttggatgaagattccattatcaagccagtgcacagctccatcctgggccaggagttctgttttgaggtaacaacttcatcaggaacaaaatgctttgcctgtcggtctgcggccgaaagagacaaatggattgagaatctgcagcgggcagtaaagcccaacaaggacaacagccgccgggtagacaatgtgctaaagctgtggatcatagaggcccgggagctgccccccaagaagcggtactactgtgagctctgcctggatgacatgctgtatgcacgcaccacctccaagccccgctctgcctctggggacaccgtcttctggggcgagcacttcgagtttaacaacctgccggctgtccgtgccctgcggctgcatctgtaccgtgactcagacaaaaagcgcaagaaggacaaggcaggctatgtcggcctggtgactgtgccagtggccaccctggctgggcgccacttcacagagcagtggtaccctgtaaccctgccaacaggcagtgggggatctgggggcatgggttcgggagggggagggggctcggggggtggctcagggggcaagggcaaaggaggttgcccggctgtgcggctgaaagcacgttaccagacaatgagcatcttgcccatggagctatataaagagtttgcagagtatgtcaccaaccattatcggatgctgtgtgcagtcttggagcccgccctgaatgtcaaaggcaaggaggaggttgccagtgcactagttcacatcctgcagagtacaggcaaggccaaggacttcctttcagacatggccatgtctgaggtagaccggttcatggaacgggagcacctcatattccgcgagaacacgcttgccactaaagccatagaagagtatatgagactgattggtcagaaatacctcaaggatgccattggagaattcatccgtgctctgtatgaatctgaggaaaactgcgaggtagaccctatcaagtgcacagcatccagtttggcagagcaccaggccaacctgcgaatgtgctgtgagttggccctgtgcaaggtggtcaactcccactgcgtgttcccgagggagctgaaggaggtgtttgcttcgtggcggctgcgctgcgcagagcgaggccgggaggacatcgcagacaggcttatcagcgcctcactcttcctgcgcttcctctgcccagcgattatgtcgcccagtctctttgggcttatgcaggagtacccagatgagcagacctcacgaaccctcaccctcattgccaaggtcatccagaacctggccaacttttccaagtttacctcaaaggaggactttctgggcttcatgaatgagtttctggagctggaatggggttccatgcagcagtttttgtatgagatctccaatctggacacgctaaccaacagcagtagctttgagggttacatcgacttgggccgagagctctccacactgcatgccctactctgggaggtgctgccccagctcagcaaggaagccctcctgaagctgggtccactgccccggctcctcaacgacatcagcacagctctgaggaaccccaacatccaaaggcagccaagccgccagagtgagcggccccggcctcagcctgtggtactgcgggggccatcggctgagatgcagggctacatgatgcgggacctcaacagctccatcgaccttcagtccttcatggctcgaggcctcaacagctctatggacatggctcgcctcccctccccaaccaaggaaaagccacccccaccaccgcctggtggtggtaaagacctgttctatgtaagccgtccacccctggcccgttcctcaccagcatactgcacgagcagctcggacatcacagagccagagcagaagatgctgagtgtcaacaagagtgtgtccatgctggacttacagggtgatgggcctggtggccgcctcaacagcagcagtgtttcgaacctggcggccgtaggggacctgctgcactcaagccaggcctcgctgacagcagccttggggctacggcctgcgcctgccggacgcctctcccaggggagtggctcatccatcacggcggctggcatgcgcctcagccagatgggtgtcaccacagacggtgtccctgcccagcaactgcgaatccccctctccttccagaaccctctcttccacatggctgctgatgggccaggtcccccaggcggccatggagggggcggtggccatggcccaccttcctcccatcaccaccaccaccaccatcaccaccaccgaggtggagagccccctggggacacctttgccccattccatggctatagcaagagtgaggacctctcttccggggtccccaagccccctgctgcctccatccttcatagccacagctacagtgatgagtttggaccctctggcactgacttcacccgtcggcagctttcactccaggacaacctgcagcacatgctgtcccctccccagatcaccattggtccccagaggccagccccctcagggcctggaggtgggagcggtgggggcagcggtgggggtggcgggggccagccgcctccattgcagaggggcaagtctcagcagttgacagtcagcgcagcccagaaaccccggccatccagcgggaatctattgcagtccccagagccaagttatggccccgcccgtccacggcaacagagcctcagcaaggagggcagcattgggggcagcgggggcagcggtggcggagggggtggggggctgaagccctccatcaccaagcagcattctcagacaccatccacattgaaccccacaatgccagcctctgagcggacagtggcctgggtctccaacatgcctcacctgtcggctgacatcgagagtgcccacatcgagcgggaagagtacaagctcaaggagtactcaaaatcgatggatgagagccggctggatagggtgaaggagtacgaggaggagattcactcactgaaagagcggctgcacatgtccaaccggaagctggaagagtatgagcggaggctgctgtcccaggaagaacaaaccagcaaaatcctgatgcagtatcaggcccgactggagcagagtgagaagaggctaaggcagcagcaggcagagaaggattcccagatcaagagcatcattggcaggctgatgctggtggaggaggagctgcgccgggaccaccccgccatggctgagccgctgccagaacccaagaagaggctgctcgacgctcagctcctcatcaggtaattctcctggttccgctttggccacgggcggaggacacagggggaggtgactccggaccactgcaggttggtcgtgaagcccactccctccaacacctccggagcctctcccctctcactgctgccctccacacccagagaacctccacagactccagccctccgacacctgcacagatccatctcccaagacaccacccaaagagagcatttgctgctgcttcccagaactgtccaacaataccttagcaacaccaagagttgggccctagatgggcccagcacattcacaggtcacacccacttccctgcaaaacccaccccctcccagcctcctcctgactctaagccctcctcttcctcta

SEQ ID NO: 187972 - DNA, 9862 bp, Homo sapiens
  Payload ID: 16991
  Gene Symbol: SYNGAP1
  Gene Name: synaptic Ras GTPase activating protein 1
  Uniprot ID: Q96PV0
  ENST ID: ENST00000629380
  CDS Start-End: 196-4227
tctcggctgccgctgctgccgttggctcttattctcctcctcctcctcctctctcctcctctctgcttctctctgctcctctctcctcctctctcctcctcctcctcctccacctcctcctccttctccccctctttctccccctctttctctcttctttctcccccgtccccccgccccctccccccaggcctgatgagcaggtctcgagcctccatccatcgggggagcatccccgcgatgtcctatgcccccttcagagatgtacggggaccctctatgcaccgaacccaatacgttcattccccgtatgatcgtcctggttggaaccctcggttctgcatcatctcggggaaccagctgctcatgctggatgaggatgagatacaccccctactgatccgggaccggaggagcgagtccagtcgcaacaaactgctgagacgcacagtctccgtgccggtggaggggcggccccacggcgagcatgaataccacttgggtcgctcgaggaggaagagtgtcccaggggggaagcagtacagcatggagggtgcccctgctgcgcccttccggccctcgcaaggcttcctgagccgacggctaaaaagctccatcaaacgaacgaagtcacaacccaaacttgaccggaccagcagctttcgccagatcctgcctcgcttccgaagtgctgaccatgaccgggcccggctgatgcaaagctttaaggagtcacactctcatgagtccttgctgagtcctagcagtgcagctgaggcattggagctcaacttggatgaagattccattatcaagccagtgcacagctccatcctgggccaggagttctgttttgaggtaacaacttcatcaggaacaaaatgctttgcctgtcggtctgcggccgaaagagacaaatggattgagaatctgcagcgggcagtaaagcccaacaaggacaacagccgccgggtagacaatgtgctaaagctgtggatcatagaggcccgggagctgccccccaagaagcggtactactgtgagctctgcctggatgacatgctgtatgcacgcaccacctccaagccccgctctgcctctggggacaccgtcttctggggcgagcacttcgagtttaacaacctgccggctgtccgtgccctgcggctgcatctgtaccgtgactcagacaaaaagcgcaagaaggacaaggcaggctatgtcggcctggtgactgtgccagtggccaccctggctgggcgccacttcacagagcagtggtaccctgtaaccctgccaacaggcagtgggggatctgggggcatgggttcgggagggggagggggctcggggggtggctcagggggcaagggcaaaggaggttgcccggctgtgcggctgaaagcacgttaccagacaatgagcatcttgcccatggagctatataaagagtttgcagagtatgtcaccaaccattatcggatgctgtgtgcagtcttggagcccgccctgaatgtcaaaggcaaggaggaggttgccagtgcactagttcacatcctgcagagtacaggcaaggccaaggacttcctttcagacatggccatgtctgaggtagaccggttcatggaacgggagcacctcatattccgcgagaacacgcttgccactaaagccatagaagagtatatgagactgattggtcagaaatacctcaaggatgccattggagaattcatccgtgctctgtatgaatctgaggaaaactgcgaggtagaccctatcaagtgcacagcatccagtttggcagagcaccaggccaacctgcgaatgtgctgtgagttggccctgtgcaaggtggtcaactcccactgcgtgttcccgagggagctgaaggaggtgtttgcttcgtggcggctgcgctgcgcagagcgaggccgggaggacatcgcagacaggcttatcagcgcctcactcttcctgcgcttcctctgcccagcgattatgtcgcccagtctctttgggcttatgcaggagtacccagatgagcagacctcacgaaccctcaccctcattgccaaggtcatccagaacctggccaacttttccaagtttacctcaaaggaggactttctgggcttcatgaatgagtttctggagctggaatggggttccatgcagcagtttttgtatgagatctccaatctggacacgctaaccaacagcagtagctttgagggttacatcgacttgggccgagagctctccacactgcatgccctactctgggaggtgctgccccagctcagcaaggaagccctcctgaagctgggtccactgccccggctcctcaacgacatcagcacagctctgaggaaccccaacatccaaaggcagccaagccgccagagtgagcggccccggcctcagcctgtggtactgcgggggccatcggctgagatgcagggctacatgatgcgggacctcaacagctccatcgaccttcagtccttcatggctcgaggcctcaacagctctatggacatggctcgcctcccctccccaaccaaggaaaagccacccccaccaccgcctggtggtggtaaagacctgttctatgtaagccgtccacccctggcccgttcctcaccagcatactgcacgagcagctcggacatcacagagccagagcagaagatgctgagtgtcaacaagagtgtgtccatgctggacttacagggtgatgggcctggtggccgcctcaacagcagcagtgtttcgaacctggcggccgtaggggacctgctgcactcaagccaggcctcgctgacagcagccttggggctacggcctgcgcctgccggacgcctctcccaggggagtggctcatccatcacggcggctggcatgcgcctcagccagatgggtgtcaccacagacggtgtccctgcccagcaactgcgaatccccctctccttccagaaccctctcttccacatggctgctgatgggccaggtcccccaggcggccatggagggggcggtggccatggcccaccttcctcccatcaccaccaccaccaccatcaccaccaccgaggtggagagccccctggggacacctttgccccattccatggctatagcaagagtgaggacctctcttccggggtccccaagccccctgctgcctccatccttcatagccacagctacagtgatgagtttggaccctctggcactgacttcacccgtcggcagctttcactccaggacaacctgcagcacatgctgtcccctccccagatcaccattggtccccagaggccagccccctcagggcctggaggtgggagcggtgggggcagcggtgggggtggcgggggccagccgcctccattgcagaggggcaagtctcagcagttgacagtcagcgcagcccagaaaccccggccatccagcgggaatctattgcagtccccagagccaagttatggccccgcccgtccacggcaacagagcctcagcaaggagggcagcattgggggcagcgggggcagcggtggcggagggggtggggggctgaagccctccatcaccaagcagcattctcagacaccatccacattgaaccccacaatgccagcctctgagcggacagtggcctgggtctccaacatgcctcacctgtcggctgacatcgagagtgcccacatcgagcgggaagagtacaagctcaaggagtactcaaaatcgatggatgagagccggctggatagggtgaaggagtacgaggaggagattcactcactgaaagagcggctgcacatgtccaaccggaagctggaagagtatgagcggaggctgctgtcccaggaagaacaaaccagcaaaatcctgatgcagtatcaggcccgactggagcagagtgagaagaggctaaggcagcagcaggcagagaaggattcccagatcaagagcatcattggcaggctgatgctggtggaggaggagctgcgccgggaccaccccgccatggctgagccgctgccagaacccaagaagaggctgctcgacgctcaggagaggcagcttccccccttgggtccaacaaacccgcgtgtgacgctggccccaccgtggaatggcctggcccccccagccccaccacccccaccccggctgcagattacggagaacggcgagttccgaaacaccgcagaccactagcccacccagcatcagagaccttctcttcctttcctgtgcaccccaccctgtaacagcaccaaccaccaggattggacatcaccgaggaacagcgggattgcctccccgaatgcctccctgggaggcacactgattgcccacccccaccactgcaccatttccaggagggagagtggggaccctcagccgcccccttttccttcccattggggtgctgccctctctttgacccccagggacccttgccccaggacaccgcctaccccgtacagaccccttcactccggggtgctatccccatcctctgcctcatcgttcccctgagcactgggggacagaccctcacccccaccctgggggtgtggcacctccaaactttcaacttcagggtgatttttttagcagtaaccagagctgacaatctaactcccctccaccgccccattttggcctcccctgccccccttgttatggggaggggaccccgggtgagggggccctattaccccttgatttctcaggagcgtctgggggggctcagcacgcacaaactccttctccttctaccactcttaaatttactccctccccacccagaacccagatggggtggagggggccaccggggcagggagggggcggcaaggggggaatgggagttgtctccccttctccccacacctgatctgctctcggctggtcccagagcggggtgagggggcttatgcccccccctcccccagtgtgttgggtggggtggaattgaggttagggtgaggggtcagggtttaggagggtgtgtatgttgggaggacaggctagttgatctgtcctactctgacacacagtcccctctgccccttccttctctcttcttggtctctactcccagggggaggggggaacttactctaggaaaagccatgtctctctcccccagggtggggggacctgtgttggaggaggggtgttggggggcccccttccatgactctgtcccctgggggaggtaggacagggctgggcttccctctcatcctccccctcccaatctccttccacctccctccctcccgccagctccacgatttttcggtgtttctctgtacatagttttctggcgggataggggaggtaggatggatggggtttggggtgggtaggccatgggaggggagaagcccctccttggcaccccctcttccctgactgctgtcccctacccagccttgcccccttcatccttttgcgtttggtattgagactctcctagactctactcctctttcttttgtatggacagttccccttcagtcccatccccctacacatacacccagccggggccaaatttatacttatataaaagttgtaaatatgtgaaattttatccctgtgccctttccccacctcaggccctacccctggaccctccccaaccttccttctctcttctttggctgttgtaattatctggggtttgtactgtacatatccggggtgtgtgtgtgtgggctgggggcaacccttctgtacagagcttcctggccccctccccccccgcccctctgcttccctccccacccaccacctcaagggtagggagttgctcttcctacctgttttattttgttttctcgttctccctccccaccccactcccagccttatctatcccccctcactgtccccttttctccactcccagccccatttcctttttttctggagtgtgtggtgaaacagaaaaaaacatgtttaataaacggagattgttcttttatcgctgtgccgactttcttaggcagggctctccagacctgtacggtggtaagatctgctttctgaaaggaagctgacagcctgagaggaaaaccgtatatccccacctgatgccacactctcctcatagaatgtcactctcccctcccaatgagattttttatattttagagcaggagttttgcaccggccaaacttctccaatctaactctcccctcaccactgtgtcacttagtccgaggccaggaacagcggcgttatctgataaaagagttcatgtatatatccacatttatctcttttaaaaattacctagaaataaggtttctttaattgctggttaaaatgctcccgtgcagaaaacaggaaagaacctgcctggttccttagcaaatctgagttccagtcccaggtccactactattagctgagtgacgcttccagcccgtttcccccgcctggaaactgaggacggcaacccccaccctcgcagggccggtgggaagacacaaagtgatgtgggcaagtgccaggcccacatggtaagtacccaactaatctcgcccctctcaggacctaccgggggcgggtgctacacttaatcaccgggaaacgcagctttccggggcggctgacggcccaccccctccgaccgggctgttctctcccgggccctgcctctcggtcctctgcagcggggaggacttcagcagctccccgggacgcccgttgcgaggacaccctgggcctgtgccctcctactagcaccgccctcctcgtctgcagtagccaatcaacacgaggcttgtaggctgccgttcctcgattggctacggctctagctccgcccgccgcacttggcgacggtgtccggcggggaggcggcggcttccggtctgggacggagctgtagcggcactgtaactgcgagggcagcgccgcgtgtgtaacggcgggggcgtgtcggcgggaaggacaatcgggccgggactcgcggtgtccgggtgaccgcggcttcccgggagcagacctctgtgggcactgtgaggcggaacggagcggcggggcaggagctgttctgggcaggtgaaggcaggctggtggctgaaggacctccttcttatcttccacaggggctggaagttaaaacccctgttggtgtttagtggtggtggttgttgttgttgtttgtttttgctttcttggtgtgcgggactgatttgcagaaaccgccactgacttaaaagtttccagttattgctcgtggggagggggttgtttgagaagatgtggctccctttatccagggcttctgtgacctccatctttttcctctgcagccttcatcccgcgtggagtctacccccaagcccttctcctcttcccaattcttgtcaccttcgaggaggccatggaaaccccaacacctttgccgcctgtacccgcctccccgacctgcaacccagccccacggacaatccagatcgagttcccacagcatagctcgtctctgctggaatctctgaaccgccacaggctagagggaaagttctgtgatgtgtccctcctggtgcagggccgggaacttagggctcataaagcagtgttagctgctgcctctccttacttccatgacaagctgcttctgggggatgcgcctcgtctcactctaccgagtgtcattgaagccgatgccttcgaggggctgctccagctcatttattcagggcgtctccgcctgccactggatgctcttcctgctcatctccttgtggccagtggccttcaaatgtggcaggtagtagatcagtgctcagaaattcttagagaattagaaacttcaggtggtggaatttcagcccgtggaggaaactcctaccatgcccttctttccactacatcctctacaggaggctggtgcattcgctcttcgcctttccagaccccagtacagtcctctgcttctactgaaagccctgcttccactgagagccctgtgggaggggagggaagtgaactgggagaagtgctgcaaattcaggtggaagaagaagaggaggaggaggaagatgatgatgatgaggaccaggggtcagccacactctctcagactcctcagccccagagagtatcaggggtttttccccgtcctcatggaccccacccactgcccatgactgctactccccgaaagcttccagagggtgagagtgcaccacttgagcttcctgcccctcctgcactgccccccaaaatcttctacattaagcaggaacccttcgagcctaaggaggagatatcaggaagcggaactcagcctggaggagcaaaggaggaaaccaaagtgttttctggaggggacactgaagggaatggggagctagggttcttgttgccttcagggccagggccaacatctgggggagggggtccatcctggaaaccagtggatcttcatgggaatgaaatcctgtcagggggtggaggacctgggggagcaggccaggccgtgcatgggcctgtgaagctaggggggacaccccctgcagatggaaaacgctttggttgcctgtgtgggaagcggtttgcagtgaagccaaagcgtgaccggcacatcatgctgaccttcagccttcggccttttggctgtggcatctgcaacaagcgcttcaagctgaagcaccatctgacagagcacatgaagacccatgctggagccctgcatgcctgtccccactgtggccgtcggttccgagtccatgcctgttttctccgccaccgggacctatgcaagggccagggctgggccactgcccactggacttacaagtgactgctgaggctatacactagcttctagaacaagataaccactgctgctgatggatacttttccctcactgccatggcacaccagtcatggatcttgtaatcatgccaagagaatagatacattatggacctcttgttcttagatatgggcctctcagcctggcagatgtggaaactcaaatttctcgtcccactccaggttttggctagccaaccctgcaggaaagtggtttataggccattcatacttaagttgatcacttgcccatggtggacatttttgtggtggtgatgtccattaaggaaaccagattttcaattatttagtgagagaagagttagagcaaaagacagtggtaaatgttttattccgtctccatgaggaattgaaggagttggtctccacctagagatacatttgatttacagcttaagtaattcagaggctaagctctaagcttttttctctcattgctggaatgatttaagcagaagtccttttgtgtacttttaaaattgtatctttccaggagcccctcagattgtaccttgctttctcaccaatagacaccttcccgacacttttttaatgttgtagctgagcactttaacaagttgagcattccatgtttcattcttagaaccttctttaatagagggtcttccctcaacagcctgtgcctctggtctacctttgaccaccactgataactaatatattggtcacaatgactggaatgtgactagtgatctcaggagatggcactgtcctaaagtgctgtcagggtggcaccactgctctctgaacaacttaccttggtcagagggactcaggtttgggacagcacaagctgaaggctggagagtaacttgcatagtaggaccatacctcttcctttcccatcccacccacatatgatagacagcccctctgttgagatatggaggggacagatactggaatcgggggtgggacttgcagttacttaaaattttttaataaactgtgccctgaaacct

SEQ ID NO: 187973 - DNA, 2903 bp, Homo sapiens
  Payload ID: 16992
  Gene Symbol: SV2A
  Gene Name: synaptic vesicle glycoprotein 2A
  Uniprot ID: Q7L0J3
  ENST ID: ENST00000369145
  CDS Start-End: 451-2499
ttgccgcttccctggtgccgggagcagtcgccgctgccgcctccgcccgcggccgggacccccgtcctcgcccgggactccttacccggggaacctagaccaggtctccagaggcttgtggaagagaagcaggcgacccttcctgagttatcctggcttagcctcccaatctggctccccttccccttcccattcccctgctccccctgtcccttccccatccacccaactgaactgggtataggtcaaagctcctctccttccttttccttcctaggcactcattggctaggacctgtttgctcttttttttgtgcccagagatactggaacacgcttcatctaagtaactgtggggaggggtctttttgactctacaagtccttgagcaaaaagctgaaaaagaagcaggaggtggagaagacccagtgaagtgccccaagccccatcatggaagagggcttccgagaccgggcagctttcatccgtggggccaaagacattgctaaggaagtcaaaaagcatgcggccaagaaggtggtgaagggcctggacagagtccaggacgaatattcccgaagatcgtactcccgctttgaggaggaggatgatgatgatgacttccctgctcccagtgatggttattaccgaggagaagggacccaggatgaggaggaaggtggtgcatccagtgatgctactgagggccatgacgaggatgatgagatctatgaaggggaatatcagggcattccccgggcagagtctgggggcaaaggcgagcggatggcagatggggcgcccctggctggagtaagggggggcttgagtgatggggagggtccccctgggggccggggggaggcacaacgacggaaagaacgagaagaactggcccaacagtatgaagccatcctacgggagtgtggccacggccgcttccagtggacactgtattttgtgcttggtctggcgctgatggctgacggtgtggaggtctttgtggtgggcttcgtgctgcccagcgctgagaaagacatgtgcctgtccgactccaacaaaggcatgctaggcctcatcgtctacctgggcatgatggtgggagccttcctctggggaggtctggctgaccggctgggtcggaggcagtgtctgctcatctcgctctcagtcaacagcgtcttcgccttcttctcatcttttgtccagggttacggcactttcctcttctgccgcctactttctggggttgggattggagggtccatccccattgtcttctcctatttctccgagtttctggcccaggagaaacgaggggagcatttgagctggctctgcatgttttggatgattggtggcgtgtacgcagctgctatggcctgggccatcatcccccactatgggtggagttttcagatgggttctgcctaccagttccacagctggagggtcttcgtcctcgtctgcgcctttccttctgtgtttgccattggggctctgaccacgcagcctgagagcccccgtttcttcctagagaatggaaagcatgatgaggcctggatggtgctgaagcaggtccatgataccaacatgcgagccaaaggacatcctgagcgagtgttctcagtaacccacattaagacgattcatcaggaggatgaattgattgagatccagtcggacacagggacctggtaccagcgctggggggtccgggccttgagcctaggggggcaggtttgggggaattttctctcctgttttggtcccgaatatcggcgcatcactctgatgatgatgggtgtgtggttcaccatgtcattcagctactatggcctgaccgtctggtttcctgacatgatccgccatctccaggcagtggactacgcatcccgcaccaaagtgttccccggggagcgcgtagagcatgtaacttttaacttcacgttggagaatcagatccaccgaggcgggcagtacttcaatgacaagttcattgggctgcggctcaagtcagtgtcctttgaggattccctgtttgaagagtgttattttgaggatgtcacatccagcaacacgtttttccgcaactgcacattcatcaacactgtgttctataacactgacctgttcgagtacaagtttgtgaacagccgtctgataaacagtacattcctgcacaacaaggagggctgcccgctagacgtgacagggacgggcgaaggtgcctacatggtatactttgtgagcttcctggggacactggcagtgcttcctgggaatatcgtgtctgccctgctcatggacaagatcggcaggctcagaatgcttgctggctccagcgtgatgtcctgtgtctcctgcttcttcctgtcttttgggaacagtgagtcggccatgatcgctctgctctgcctttttggcggggtcagcattgcatcctggaatgcgctggacgtgttgactgttgaactctacccctcagacaagaggtagttggaatgtgttggaggcagggcagtggattcaggggaggggtggggtgaggaaggagggctgaatgggaagagcatccttaggggtgagaggatatacatttccattttctcctctaaaatctggtagctttggccgggcacggtgactcatgcctgtaatcccagtgctttgggaggccgaggcaggcagatcacctgaggtcaggagtttgagaccagcctggccaacatggtgaaaccctgtctgtactaaaaatacaaaaagttagctgggtgcctgtaatcgcagctactcaggaggctaaggcaggagaattgcttgaacccgggaggtggagctttcagtgagccgagatcgcaccactgcactccagcctgggcaacagagcaagactccgtctc

SEQ ID NO: 187974 - DNA, 4416 bp, Homo sapiens
  Payload ID: 16992
  Gene Symbol: SV2A
  Gene Name: synaptic vesicle glycoprotein 2A
  Uniprot ID: Q7L0J3
  ENST ID: ENST00000369146
  CDS Start-End: 492-2720
aggcggggctggagtggtggaaggggggtggcaggtctgcattgccgcttccctggtgccgggagcagtcgccgctgccgcctccgcccgcggccgggacccccgtcctcgcccgggactccttacccggggaacctagaccaggtctccagaggcttgtggaagagaagcaggcgacccttcctgagttatcctggcttagcctcccaatctggctccccttccccttcccattcccctgctccccctgtcccttccccatccacccaactgaactgggtataggtcaaagctcctctccttccttttccttcctaggcactcattggctaggacctgtttgctcttttttttgtgcccagagatactggaacacgcttcatctaagtaactgtggggaggggtctttttgactctacaagtccttgagcaaaaagctgaaaaagaagcaggaggtggagaagacccagtgaagtgccccaagccccatcatggaagagggcttccgagaccgggcagctttcatccgtggggccaaagacattgctaaggaagtcaaaaagcatgcggccaagaaggtggtgaagggcctggacagagtccaggacgaatattcccgaagatcgtactcccgctttgaggaggaggatgatgatgatgacttccctgctcccagtgatggttattaccgaggagaagggacccaggatgaggaggaaggtggtgcatccagtgatgctactgagggccatgacgaggatgatgagatctatgaaggggaatatcagggcattccccgggcagagtctgggggcaaaggcgagcggatggcagatggggcgcccctggctggagtaagggggggcttgagtgatggggagggtccccctgggggccggggggaggcacaacgacggaaagaacgagaagaactggcccaacagtatgaagccatcctacgggagtgtggccacggccgcttccagtggacactgtattttgtgcttggtctggcgctgatggctgacggtgtggaggtctttgtggtgggcttcgtgctgcccagcgctgagaaagacatgtgcctgtccgactccaacaaaggcatgctaggcctcatcgtctacctgggcatgatggtgggagccttcctctggggaggtctggctgaccggctgggtcggaggcagtgtctgctcatctcgctctcagtcaacagcgtcttcgccttcttctcatcttttgtccagggttacggcactttcctcttctgccgcctactttctggggttgggattggagggtccatccccattgtcttctcctatttctccgagtttctggcccaggagaaacgaggggagcatttgagctggctctgcatgttttggatgattggtggcgtgtacgcagctgctatggcctgggccatcatcccccactatgggtggagttttcagatgggttctgcctaccagttccacagctggagggtcttcgtcctcgtctgcgcctttccttctgtgtttgccattggggctctgaccacgcagcctgagagcccccgtttcttcctagagaatggaaagcatgatgaggcctggatggtgctgaagcaggtccatgataccaacatgcgagccaaaggacatcctgagcgagtgttctcagtaacccacattaagacgattcatcaggaggatgaattgattgagatccagtcggacacagggacctggtaccagcgctggggggtccgggccttgagcctaggggggcaggtttgggggaattttctctcctgttttggtcccgaatatcggcgcatcactctgatgatgatgggtgtgtggttcaccatgtcattcagctactatggcctgaccgtctggtttcctgacatgatccgccatctccaggcagtggactacgcatcccgcaccaaagtgttccccggggagcgcgtagagcatgtaacttttaacttcacgttggagaatcagatccaccgaggcgggcagtacttcaatgacaagttcattgggctgcggctcaagtcagtgtcctttgaggattccctgtttgaagagtgttattttgaggatgtcacatccagcaacacgtttttccgcaactgcacattcatcaacactgtgttctataacactgacctgttcgagtacaagtttgtgaacagccgtctgataaacagtacattcctgcacaacaaggagggctgcccgctagacgtgacagggacgggcgaaggtgcctacatggtatactttgtgagcttcctggggacactggcagtgcttcctgggaatatcgtgtctgccctgctcatggacaagatcggcaggctcagaatgcttgctggctccagcgtgatgtcctgtgtctcctgcttcttcctgtcttttgggaacagtgagtcggccatgatcgctctgctctgcctttttggcggggtcagcattgcatcctggaatgcgctggacgtgttgactgttgaactctacccctcagacaagaggaccacagcttttggcttcctgaatgccctgtgtaagctggcagctgtgctggggatcagcatcttcacatccttcgtgggaatcaccaaggctgcacccatcctctttgcctcagctgcccttgcccttggcagctctctggccctgaagctgcctgagacccgggggcaggtgctgcagtgaaggggtctctagggctttgggattggcaggcacactgtgagaccaacaactccttccttcccctccctgccctgccatcctgacctccagagccctcactccccactccccgtgtttggtgtcttagctgtgtgtgcgtgtgcgtgtgcatgtgtgtaaaccccgtgggcagggactacagggaaggctccttcatcccagttttgagatgaagctgtactccccatttcccactgcccttgactttgcacaagagaaggctgagccccatccttctccccctgttagagaggggcccttgcttccctgttccaggggttccagaataggcttcctgccttccccatcattccctctgcctaggccctggtgaaaccacaggtatgcaattatgctaggggctggggctctggtgtagaccatggaccaaaagaacttcttagagtctgaagagtgggcctcgggtgccctctcacatctcctgttggatgctgggggagaagcaataaacctcagccctctggcctccactttcctctcaatttgggctgcaaatatgaagcctgaattttatgaaattagctttctgattcttatttattaatagattaagttctgaggcagctccgcaggactgtgtgtgaatgtgtatgtatacttacatatgtgtgtgcatgtgccatggggcggggggtatcactatactgtcctcaaatataagccaagggtaatttcagcggatgcacacacaaccctgcctcccacagttcctcccctaatctggtttctgtgttgagcctgggatggaggagccctaggccagcctgggataagagtcccacagtctagggagatctgagggcatccgacaaggcccatctccttccctcctcaagaagcagaggcctcctctggagtgagaggctccacccactacagcacaggcgggaatagcacagctgccctcccatgctccctacctgtcccctcacagggaggggagcaggggagggaaagaaaccaggcatctggtcaaaccagcagatcaaaaagcacaaagagctggggcagaggcaggaagcaggggccctcctggcagctcctctgagtggggagaggttgggcagtgagtgagggacccctaatgcagggactagaagcctcagtttccccattttacccttccacacaatagcctctgtaggttaggctgccccatcccaccctactctgtgtggctgctttctttggtgccctcccctcaccccactgtagctgtgacgtgttgtagtttttagatgtttgtaaaatgtttaaaaaaatgttaaaaggaaaaaagtgaaaataacaaaaaagaaaatcaaaattcaccttcgtcatgctgcgtccagtgccccaaccctgtggtcactctccccattttgtaacactgtaccaggtggtgactgtttaactctttggtgtctgtgctcaaaagactgccttctccagtgcccagtgtatgagtgtgtgccctgtgcccttgtccctcactccccacatgctggacgtagccctcttcctcgcacccctgggagggacccatccatctcccttgctctcctggggaaccctaaacccaactctgttgatgtgaaaaatgcagtgaaaaatattgacgaaaaataaaacggaaacaaatcctcaaaatacaaaa

SEQ ID NO: 187975 - DNA, 11202 bp, Homo sapiens
  Payload ID: 16993
  Gene Symbol: SV2B
  Gene Name: synaptic vesicle glycoprotein 2B
  Uniprot ID: Q7L1I2
  ENST ID: ENST00000330276
  CDS Start-End: 395-2446
cagagcataaccttcggtggcaggacaaatcaggccagcacgcagtctgccaagtcctgctcgctccctgtcaagaaaaacagctggatccatttctaatcaacacttcccaacgcaacacttctgagtctctgaaggagaccagagcttgaaactttccagacttccaacagacatcgagtgcaaaaggatatttaggttgtctttgcacaaatctggttgatttgagagataaagggggggggaaccagtgtgactttcacctaagaagtcacatgaacatatttcacatttgaactacataatgaatgatggttattgaaatagcccaaacctctaccacagagcgagggatatagctcaaggggcaaccaggcagtcgcagaaccaaggaatggatgactacaagtatcaggacaattatgggggctatgctcccagtgatggctattaccgcggcaatgagtccaacccagaagaagatgcacagagtgatgtcaccgaaggccatgatgaggaagacgagatctatgagggcgagtaccagggtatccctcacccagatgatgtcaaggccaagcaggccaagatggcgccctccagaatggacagccttcggggccagacagacctgatggctgagaggctggaagatgaggagcagttggcccaccagtacgagaccatcatggatgagtgtggccatggccgcttccagtggatcctctttttcgtcttgggtttggccctgatggccgatggggtggaagtgttcgtggtgagttttgccctgcccagtgcagagaaggacatgtgtctgtccagttccaaaaaaggaatgctagggatgatagtctacttgggaatgatggcgggcgccttcatcctgggaggcctggctgataagctgggaaggaagcgagtcctcagcatgtctctggccgtcaatgcctccttcgcctccctctcttccttcgtgcagggatatggagccttcctcttctgccgactcatctcaggcatcggtattgggggtgctctaccgattgtttttgcctatttttctgaattcttgtctcgggagaagcgaggagaacacctcagttggctgggcatcttctggatgactgggggcctgtacgcatctgccatggcctggagcatcatcccacactatggctggggcttcagcatggggaccaattaccacttccatagctggagagtgtttgtcatcgtctgtgctctgccctgcaccgtgtccatggtggccctgaagttcatgccagagagcccaaggtttctgctagagatgggcaaacatgatgaagcctggatgattctcaagcaagtccatgacaccaacatgagagctaaggggaccccagagaaagtgttcacggtttccaacatcaaaactcccaagcaaatggatgaattcattgagatccaaagttcaacaggaacctggtaccagcgctggctggtcagattcaagaccattttcaagcaggtctgggataatgccctgtactgtgtgatggggccctacagaatgaatacactgattctggccgtggtttggtttgccatggcattcagttactatggactgacagtttggtttcctgatatgatccgctattttcaagatgaagaatacaagtctaaaatgaaggtgttttttggtgagcatgtgtacggcgccacaatcaacttcacgatggaaaatcagatccaccaacatgggaaacttgtgaatgataagttcacaagaatgtactttaaacatgtactctttgaggacacattctttgacgagtgctattttgaagacgtaacatcaacagatacctacttcaaaaattgtaccattgaatcaaccatcttttacaacacagacctctacgagcacaagttcatcaactgtcggtttatcaactccaccttcctggagcagaaggagggctgccacatggacttggagcaagataatgacttcctgatttacctcgtcagcttcctgggcagcctgtctgtcttacccgggaacatcatttctgccctgctcatggatagaattggaaggctcaagatgattggtggctccatgctaatctctgcagtctgctgcttcttcctgttttttggcaacagtgagtctgcaatgatcggctggcagtgcctgttctgtgggacaagcattgcagcctggaatgctctggatgtgatcacagtggagctgtatcccaccaaccagagagcaacagccttcggcattctcaatggattatgcaaatttggcgccatcctgggaaacaccatctttgcttcttttgttgggataaccaaagtggtccccatccttctggctgctgcttctctggttgggggtggcctgattgcccttcgactgccagagactcgagaacaggtcctgatgtgaacaacctatgggaaaaggaaaggtcgagagaatcttgtccaggacactgaaatgcatccacacttcctgcctatcacggtccggaggacaccttggatagcacgggaggagaagttgactttgtgacccctagtttaggacccacttcagctgtcaatatgtttgtaactcaggtgactgatttgggggtgccctgagccacccttagaatcacagagctgcgtgtttaacttcaagtcttcccagtccaaggcagggagaggattctccagtgagtgcacacactatgcgaggagcaagcatttctctaagtcaagtgcaaggacttaacttgcgtttgaaaaggaattagagggtcagaaacacccaggttcctccagaaagctccttggagcccaacaacttaacaaatcaacttggctggaagttagagtcattatatgaagattgggcttgaagtatatatttttgcatttaaaagtatcacctatcatattttccactcgaaaattgacatagtagcattgaggatactctgatctagaaagccaagtatttgagcaacatctatagagatctacttttctcctatgtctcctaggctttccatgataattaggtaatacatttaagaaggatatttatttctgttttgctctattcaaagaaacggaatgggatagttattctgtaaactaagtttgtatataactttatttgggtttaatttccacaactggtatctgcaaatattgccagcattttagccatattttgggagaacttggtgtttgaggtcccaggaaatgaggtctgatcaaatgaaatgcaagcacaatttcttacagccatttaactttctgttgggaggatgaattaacaaactcacattgtgcagtctgcttaatccaggcacttttctttgtgcaggtgtagtgagtagttacttctctcccttacacagatgacttgtgaaactcaagctcaccatcttcagtgctggcattttactttgccactacccaaaaacaatgtgagatgtgttcagtggcctctggtactctttgcaggcaagaatcaaacaacatggggactgagggaaggatggggaagtgtagccacagttcttccaaatgtaaatactttttgtttgttctagtggtaaaatgcaaatgcaatccatatttgttaggatggtcaggtctcatgagaaatctatgctatgtgtccagagcttttgaaacagagtccattggagtgggagttagggagtgtagtggatgccaaatatgtttttcttcagtgcttaagagaactgtttcctgaagtccagctttgaacataaacaggggtgtgggttgggggaggagcttaggacaaacctctctgatgaaggtcagcaatagactgaagtcttgactgcatggaagaggaaaaacatcagaactgtctgacaatggaggggacagtgagctacgcacaactgccagcggaggtgaacttgcacctgcccaggccggatgaacatcagcctgcaagaactagttgtttgagttgatttgcagtgctctcaatgggcaagtgccacattttccctggcagagatctccaaaaatttaaaacagaataataatggctatatcgagtgttttctcagtattggagaaatgcttaggtcctatgatagcttcgggacatctttctgtaattttcctcaattaacgggttggtaggggtaaatcttatgacacctttccaccgtcgatttgagatcagttttaatggttaaaatgtttactctccttctgtcaaccctcacctttttatttacacccctccctttttttctgtacagggagagaagacatattgactctgactggacaccctgattcctccaaatatatataccactgtgtattaatctttctctcagtgttttataggagtactaacatttattgctctgtcaataatgaaaggctcgatgtaatatagctgtaatttactttccatatgaatacagtggctaggttcataaaagagaattgtgtgagtctgggattaccacatctaaaacattattctttaatgggataatacaattcattgagcagctaccacttaaaaaacttgcaggacagttagagcctgcatttctagttaagatggatcttgtaaatttaaaattggattaacattggagtgctggggtggctgcaataatttgggggctaactccatttggtttccaagatctcacttctgcattatctttatggctctttaaaccagccacctagccaatcaagggcaattcccatctcatccatcactcaggtctttgtaaagggtgcagccaagctctgcagacttttgcaggattgtctagcctgagtaccgggctacttcttaaatgccgtcactcctgctgagataaatgcgtctttaaaaatagtctctgtggcaggtcactgggggacaatgtacagcattctggccatccacttctttttcacttcatgttctaccccaagagactcccgatgtcggctgtggagggttaaagggatgaggctttcctttgtttagcaaatctgttcacagttcttgatgatgtattttatgatgcccagcttggaaatagttgctttccatagtctcaactgtattgtgtcatctcctgatgctgatttttgatcttttgttttattaaaaataattagtgaaagaggtgtgcctatctgtgaagtttgtagtacatcatcctgaggtcatgtaacaagtaaaccccaacccagcgttccctcctacgttgtgttagttcattaaaactaaataataaaaataactgtaagaaaaccttaaggactggggttagagattattttcaggcactaaggtctcttctgtattccaaaattgattgaatcagctgggagaaacattgagaatcgcttccttcaacttttattttgcaacatggggaccttgagaggttaaacgatgtggcccagattacatgtaatgtgaggagtgggcgagaaggcctaaggtgatgctctcatgacagttctggggaagcctgcagtttggggaatgggacaatgtgacaaatactcgccattccctgagaccattcattgactattcccttgatggctttactataatgagaggaagcatcagtttaaacataaaaagattagtatttatccatccatttattcattcagcaaatccttattgagccctgaccatgggccagtctctctgccaagccctggggacacagtgatgaaaaaactggccacagtttctgcttcctgcctcattccacttgcagtgagcggatattaaattggccataaacaccgagtacgatgaccttacaatccgcaaactgcacctttcatgtgtaaaaggattgctactactttacttgtcagctgtggatttccaaatgtggtggctccctcttatttttttttctttgaggagtgtaccaattttttatctttataaaccaggtaagggaaatgatgcccttgcccattttctacagacctaatcgatttttacctaatcagttttacagaaagggttacatggaagaagagataggggccaggaatgcaagagggacattggtgagtggggtaagaatccccgtagccctgggaaaggtgtctccacttccacatctggcttttctagggggcatctgtgctaactgacctgggattatgttggatggcatatgactgcaaattcaaagaaaccaatttataataagtttatagtaagttaaaggtttgttttactctcatgtgaagggaatctggaggaaggaaagccagggctggagtggctgcctttgatcatgggagcacactccttctgcccgatcattgggagcacactccttctgcctgatcgttgggagcacactcctgcctgatcatgggcgcacgttccttctgcctgatcgttgggagcacactccttctgcctgatcatgggagcacactccttctgcctgatcattgggagcacgctccttctgcctgatcgttgggagcacactctttctgcctgatcgttgggagcacaccccttctgcctgatcattgggagcacactccttctgcctgatcatgggcacacgctccttctgcccgatcatgggcacacgctccttctgcccgatcgttgggagcacactccttctgcccaatcattgggctcacgctccttctgcccgatcgctgggctcacgctccttctgcccgatcttgggcgcacgctccttctgcccgatcgttgggcgcacgctccttctgcccgatcgttgggcgcatgctccttctgcccgatcgttgggagcacgctcattctgcccgattgttgggagcacgctccttctgcccgatcgttgggcgcacgctccttctgcccgatcgttgggcgcacgcttcttctgcctgatcgttgggcgcacgctccttctgcctgatcgttgggcgcacgctccttctgcctgatcgttgggagcacgctccttctgcctgattgttggaagcacgctccttctgccttcagactccttgatttttagtgcagtttccatcactgaggctgcctcatgggctgagatggctgttgaagcactgaacctcacatccacaattcaggcaggaagcagaaggaagggcaatgggcaaaggggctgtgccttgcagccgatccagcctccctttgctgcagaggaggcagggaaatgcggtatttactgggaacattgctgcccctcctccaaattgagggtcttggctcgaaggacaaaagccagaaaggataggtggattagtgcttcttaaacttttgcgtgcatcagaatcacccagaaagatgttaaaactcactcttcaaggccccatccccagagattcggattctggggatttggaatctggggtggggtctgaagaatctgcattttttaacaaactcccaggtgacatagatggcatcaattctcaagccatattttgagtagcactgacactcttccaataggtggtactttgacttgtcagggaagttctattgctctgataacttaaaaccaacccaaccagaagctcacaaaaactagcagcctgtgaaaaatgatcaccattttcctagagctccgagacaactagtggtagtgcaacagtaacccaaaaatgtcaatgaaaatatttccttccccagaaactgcttggtttcactcaggtcctgtccttatgggcctgtgtctggttgcagggcttgaagtatttcggaagctcagcagaggttgaaccctttcccctgggggttggtgatctttgttttggccatttccacctggtgaagattttcatagacaaatatgcttgtggcatcctgtaattcattgtgccttatgatggacctctgattctataagcttccccctagctagggatgcacgggggtgatcaagacatgactagatgtgaacctgacctgcagacagtccacctgaacgtgcctggaaatgtctcccgaaaaggatgaaaagcctcctcctttagacaaggaagacagagtggagcaaatttctctacatagatctcattcgaaaacaaatttacagaatgcagaatggctactgtgtgtcttgtgctatgctaggtctctctctctctaagtggactctgaccctgtccaaaacattgtgcttttgcatgtagctgtgtcgcatttaggcccagctctaagaaccgtttggaaataaatcacatagagcctttgattgtgaggcaggcttaaagtacattttgtttgatttgcagaggcatggtgaggaatttatatgcatggctgttgtggcagcagcgagatttccaaaaagatgaatgatgaaatgaaacagactgaagctatctcacaaatgttaaatggagaaataaaagttgttatagtcattgctaattacagaatgagcaagagatttatttagcaggaccatactatgccccctggaaggttcagtttatgagctggagcacaaggatttactgtcatttcacctgaaaacacacatttagctgtccatttacctttaatcctacaggcttaaaatactttaaaatttcagagaccattaatatgtattcctttagaaagcaaaggtctttcagaagctgtcctctaccaaagttaatgtggtcaccacatttgatgattttgctaggtagggaggtttatttaatcacagctactgtcactcaggaggatgagccatttaaaaatggtggccctgtcctccacttcttacctaccatatataatctcagtaattcagatttctctaaatcagcattagtgatcatttcaatagggtatgaacaaaaggcctataaaaatagctttccaattcgccaccaaaaatgcaaaaatgacaagtaagtgaggtaacgcatgagctaaatagcttgatttagtcactctaaaatgtgggtgtgtatatatacatacatatatatacacacacacattatgttatacaccataaatatatagaagttttacttgtcaattaaaactataaataaagtggctttccagaaaaattagatattggactctatcacaaaggaattgcataaaaatacttacaaacataactataagcaattgatgagcaaattacaaatgactgttttttattaaaacattcctccaaaagaacggcaaagcaaatcccatagacacccaaaatactaaaagtgacaaaacaatacttctttaaaaatgtattttatgatctatttattgatattctaatggttttaagaaggataattttccaaaacctaaatgctacacattttacagtggcaatatcaaccttatcatgagctaaagatttgcaatcagaacattggtagagtgcattgctgagttataacaagtgtctcaggacgaggatatttggtaggtatccttaaatatatagatgcttaccagtaggtttaatagaagatttctgaaaggtagcgcaagtttttatttcattatttttatttttatttttttgagacagagtctcactctgtcatctaggctggagtgcagtggtgcaatcttggcttgctgcaatctccacctcccaggttcaagcgattctcccacctcagcctcccgagtagctgggattacaggcatgcgccaccatgcctggctaatttttgtatttttagtagagacggggtttcgccatgttggccaggctcgtctcgaactcctggcctcaagtgatctgcccgcctcagcctcccaaagtgctgggattacaaatgtgagctactatgcctggtcccaacttcttaaaattaaattttggggaagttcatggagatatttttgacatgtaaaagtagaaaacaaaccatccatagtgtgtgcatatatacacacaaggtttggtttaatatacttgctgtgcactagtcagttttgattcaggttacataagggataaaatatagaaagacattttaaagtttgaaatatgtgctaagtagttagagatttggcagttttgccacatttcaaatgggccaaacattaaaataacttatccatgaatttcaggtttcaaggaaggaggaatatctgactatttttttttgtgtgtgagatttggtctcagctttttggtccatctgaatcctggaagtccccaactctaccagaccaaaagggtgtctctattttttgttgttacttctctgttcttgatgtaatgagttaagtagatgaaagagattaaggtgcagggaagggctcttaaaagtttaatgtttcagctttccatagtcattcatacttgtgaatcttcttcctcttctacttcaaagtagccaaaacttggaaagttcaaattaatctttgggctccaaagagcaattctgaaggattaacaggtttcattctctccagtgggaggtggcctagacaggtgccggttttggggagaggtgagagtacccagatgtgggtgactatttcctgttcttccctgaaagtcaggccagtggtctcgaatcattcccacagcaactgctacaaaagtgactatcttaatcctttggctagatgggatacctcttctaccttttcagaggtgagctgttgagtagtaatgtccgctacaacaccacgctcccggaatggtggttcctaagagcaaagtcagttaatacaatttctccaggtatccagctatctccaggtgtgcggtcctgtgaagcactctaagaactgtaaaaaatatttcataggtatagaaggcatttgtaatactgttggttcaaatgtgctgacatgtagccagtggaggaagatgtttctttggaagcctgccatctttctgtaacgcaccttcaacctgagataattaagagtcattacgtttcccagtcccatgtcacattgaccagtcctgtggtcctatggctaagcggaggacacggccacaagctgtgagtcatgaaaaggagggtgcaggtgataggcaaagggacccattagccagtttacaatgactggcaactgaccagatagagcttaccgtatgtccatgtagagttgctcatattagtctgtaaataattctatgcatagtgaatgcagcttctgaattattaaactgatgctataaatgtgaactgacaaaaccc

SEQ ID NO: 187976 - DNA, 11279 bp, Homo sapiens
  Payload ID: 16993
  Gene Symbol: SV2B
  Gene Name: synaptic vesicle glycoprotein 2B
  Uniprot ID: Q7L1I2
  ENST ID: ENST00000394232
  CDS Start-End: 471-2522
ggagctgcacgcggggctgccggggcggacgctgctctgcctgcatccggaggcggccgccagcggatttgccacccagagcataaccttcggtggcaggacaaatcaggccagcacgcagtctgccaagtcctgctcgctccctgtcaagaaaaacagctggatccatttctaatcaacacttcccaacgcaacacttctgagtctctgaaggagaccagagcttgaaactttccagacttccaacagacatcgagtgcaaaaggatatttaggttgtctttgcacaaatctggttgatttgagagataaagggggggggaaccagtgtgactttcacctaagaagtcacatgaacatatttcacatttgaactacataatgaatgatggttattgaaatagcccaaacctctaccacagagcgagggatatagctcaaggggcaaccaggcagtcgcagaaccaaggaatggatgactacaagtatcaggacaattatgggggctatgctcccagtgatggctattaccgcggcaatgagtccaacccagaagaagatgcacagagtgatgtcaccgaaggccatgatgaggaagacgagatctatgagggcgagtaccagggtatccctcacccagatgatgtcaaggccaagcaggccaagatggcgccctccagaatggacagccttcggggccagacagacctgatggctgagaggctggaagatgaggagcagttggcccaccagtacgagaccatcatggatgagtgtggccatggccgcttccagtggatcctctttttcgtcttgggtttggccctgatggccgatggggtggaagtgttcgtggtgagttttgccctgcccagtgcagagaaggacatgtgtctgtccagttccaaaaaaggaatgctagggatgatagtctacttgggaatgatggcgggcgccttcatcctgggaggcctggctgataagctgggaaggaagcgagtcctcagcatgtctctggccgtcaatgcctccttcgcctccctctcttccttcgtgcagggatatggagccttcctcttctgccgactcatctcaggcatcggtattgggggtgctctaccgattgtttttgcctatttttctgaattcttgtctcgggagaagcgaggagaacacctcagttggctgggcatcttctggatgactgggggcctgtacgcatctgccatggcctggagcatcatcccacactatggctggggcttcagcatggggaccaattaccacttccatagctggagagtgtttgtcatcgtctgtgctctgccctgcaccgtgtccatggtggccctgaagttcatgccagagagcccaaggtttctgctagagatgggcaaacatgatgaagcctggatgattctcaagcaagtccatgacaccaacatgagagctaaggggaccccagagaaagtgttcacggtttccaacatcaaaactcccaagcaaatggatgaattcattgagatccaaagttcaacaggaacctggtaccagcgctggctggtcagattcaagaccattttcaagcaggtctgggataatgccctgtactgtgtgatggggccctacagaatgaatacactgattctggccgtggtttggtttgccatggcattcagttactatggactgacagtttggtttcctgatatgatccgctattttcaagatgaagaatacaagtctaaaatgaaggtgttttttggtgagcatgtgtacggcgccacaatcaacttcacgatggaaaatcagatccaccaacatgggaaacttgtgaatgataagttcacaagaatgtactttaaacatgtactctttgaggacacattctttgacgagtgctattttgaagacgtaacatcaacagatacctacttcaaaaattgtaccattgaatcaaccatcttttacaacacagacctctacgagcacaagttcatcaactgtcggtttatcaactccaccttcctggagcagaaggagggctgccacatggacttggagcaagataatgacttcctgatttacctcgtcagcttcctgggcagcctgtctgtcttacccgggaacatcatttctgccctgctcatggatagaattggaaggctcaagatgattggtggctccatgctaatctctgcagtctgctgcttcttcctgttttttggcaacagtgagtctgcaatgatcggctggcagtgcctgttctgtgggacaagcattgcagcctggaatgctctggatgtgatcacagtggagctgtatcccaccaaccagagagcaacagccttcggcattctcaatggattatgcaaatttggcgccatcctgggaaacaccatctttgcttcttttgttgggataaccaaagtggtccccatccttctggctgctgcttctctggttgggggtggcctgattgcccttcgactgccagagactcgagaacaggtcctgatgtgaacaacctatgggaaaaggaaaggtcgagagaatcttgtccaggacactgaaatgcatccacacttcctgcctatcacggtccggaggacaccttggatagcacgggaggagaagttgactttgtgacccctagtttaggacccacttcagctgtcaatatgtttgtaactcaggtgactgatttgggggtgccctgagccacccttagaatcacagagctgcgtgtttaacttcaagtcttcccagtccaaggcagggagaggattctccagtgagtgcacacactatgcgaggagcaagcatttctctaagtcaagtgcaaggacttaacttgcgtttgaaaaggaattagagggtcagaaacacccaggttcctccagaaagctccttggagcccaacaacttaacaaatcaacttggctggaagttagagtcattatatgaagattgggcttgaagtatatatttttgcatttaaaagtatcacctatcatattttccactcgaaaattgacatagtagcattgaggatactctgatctagaaagccaagtatttgagcaacatctatagagatctacttttctcctatgtctcctaggctttccatgataattaggtaatacatttaagaaggatatttatttctgttttgctctattcaaagaaacggaatgggatagttattctgtaaactaagtttgtatataactttatttgggtttaatttccacaactggtatctgcaaatattgccagcattttagccatattttgggagaacttggtgtttgaggtcccaggaaatgaggtctgatcaaatgaaatgcaagcacaatttcttacagccatttaactttctgttgggaggatgaattaacaaactcacattgtgcagtctgcttaatccaggcacttttctttgtgcaggtgtagtgagtagttacttctctcccttacacagatgacttgtgaaactcaagctcaccatcttcagtgctggcattttactttgccactacccaaaaacaatgtgagatgtgttcagtggcctctggtactctttgcaggcaagaatcaaacaacatggggactgagggaaggatggggaagtgtagccacagttcttccaaatgtaaatactttttgtttgttctagtggtaaaatgcaaatgcaatccatatttgttaggatggtcaggtctcatgagaaatctatgctatgtgtccagagcttttgaaacagagtccattggagtgggagttagggagtgtagtggatgccaaatatgtttttcttcagtgcttaagagaactgtttcctgaagtccagctttgaacataaacaggggtgtgggttgggggaggagcttaggacaaacctctctgatgaaggtcagcaatagactgaagtcttgactgcatggaagaggaaaaacatcagaactgtctgacaatggaggggacagtgagctacgcacaactgccagcggaggtgaacttgcacctgcccaggccggatgaacatcagcctgcaagaactagttgtttgagttgatttgcagtgctctcaatgggcaagtgccacattttccctggcagagatctccaaaaatttaaaacagaataataatggctatatcgagtgttttctcagtattggagaaatgcttaggtcctatgatagcttcgggacatctttctgtaattttcctcaattaacgggttggtaggggtaaatcttatgacacctttccaccgtcgatttgagatcagttttaatggttaaaatgtttactctccttctgtcaaccctcacctttttatttacacccctccctttttttctgtacagggagagaagacatattgactctgactggacaccctgattcctccaaatatatataccactgtgtattaatctttctctcagtgttttataggagtactaacatttattgctctgtcaataatgaaaggctcgatgtaatatagctgtaatttactttccatatgaatacagtggctaggttcataaaagagaattgtgtgagtctgggattaccacatctaaaacattattctttaatgggataatacaattcattgagcagctaccacttaaaaaacttgcaggacagttagagcctgcatttctagttaagatggatcttgtaaatttaaaattggattaacattggagtgctggggtggctgcaataatttgggggctaactccatttggtttccaagatctcacttctgcattatctttatggctctttaaaccagccacctagccaatcaagggcaattcccatctcatccatcactcaggtctttgtaaagggtgcagccaagctctgcagacttttgcaggattgtctagcctgagtaccgggctacttcttaaatgccgtcactcctgctgagataaatgcgtctttaaaaatagtctctgtggcaggtcactgggggacaatgtacagcattctggccatccacttctttttcacttcatgttctaccccaagagactcccgatgtcggctgtggagggttaaagggatgaggctttcctttgtttagcaaatctgttcacagttcttgatgatgtattttatgatgcccagcttggaaatagttgctttccatagtctcaactgtattgtgtcatctcctgatgctgatttttgatcttttgttttattaaaaataattagtgaaagaggtgtgcctatctgtgaagtttgtagtacatcatcctgaggtcatgtaacaagtaaaccccaacccagcgttccctcctacgttgtgttagttcattaaaactaaataataaaaataactgtaagaaaaccttaaggactggggttagagattattttcaggcactaaggtctcttctgtattccaaaattgattgaatcagctgggagaaacattgagaatcgcttccttcaacttttattttgcaacatggggaccttgagaggttaaacgatgtggcccagattacatgtaatgtgaggagtgggcgagaaggcctaaggtgatgctctcatgacagttctggggaagcctgcagtttggggaatgggacaatgtgacaaatactcgccattccctgagaccattcattgactattcccttgatggctttactataatgagaggaagcatcagtttaaacataaaaagattagtatttatccatccatttattcattcagcaaatccttattgagccctgaccatgggccagtctctctgccaagccctggggacacagtgatgaaaaaactggccacagtttctgcttcctgcctcattccacttgcagtgagcggatattaaattggccataaacaccgagtacgatgaccttacaatccgcaaactgcacctttcatgtgtaaaaggattgctactactttacttgtcagctgtggatttccaaatgtggtggctccctcttatttttttttctttgaggagtgtaccaattttttatctttataaaccaggtaagggaaatgatgcccttgcccattttctacagacctaatcgatttttacctaatcagttttacagaaagggttacatggaagaagagataggggccaggaatgcaagagggacattggtgagtggggtaagaatccccgtagccctgggaaaggtgtctccacttccacatctggcttttctagggggcatctgtgctaactgacctgggattatgttggatggcatatgactgcaaattcaaagaaaccaatttataataagtttatagtaagttaaaggtttgttttactctcatgtgaagggaatctggaggaaggaaagccagggctggagtggctgcctttgatcatgggagcacactccttctgcccgatcattgggagcacactccttctgcctgatcgttgggagcacactcctgcctgatcatgggcgcacgttccttctgcctgatcgttgggagcacactccttctgcctgatcatgggagcacactccttctgcctgatcattgggagcacgctccttctgcctgatcgttgggagcacactctttctgcctgatcgttgggagcacaccccttctgcctgatcattgggagcacactccttctgcctgatcatgggcacacgctccttctgcccgatcatgggcacacgctccttctgcccgatcgttgggagcacactccttctgcccaatcattgggctcacgctccttctgcccgatcgctgggctcacgctccttctgcccgatcttgggcgcacgctccttctgcccgatcgttgggcgcacgctccttctgcccgatcgttgggcgcatgctccttctgcccgatcgttgggagcacgctcattctgcccgattgttgggagcacgctccttctgcccgatcgttgggcgcacgctccttctgcccgatcgttgggcgcacgcttcttctgcctgatcgttgggcgcacgctccttctgcctgatcgttgggcgcacgctccttctgcctgatcgttgggagcacgctccttctgcctgattgttggaagcacgctccttctgccttcagactccttgatttttagtgcagtttccatcactgaggctgcctcatgggctgagatggctgttgaagcactgaacctcacatccacaattcaggcaggaagcagaaggaagggcaatgggcaaaggggctgtgccttgcagccgatccagcctccctttgctgcagaggaggcagggaaatgcggtatttactgggaacattgctgcccctcctccaaattgagggtcttggctcgaaggacaaaagccagaaaggataggtggattagtgcttcttaaacttttgcgtgcatcagaatcacccagaaagatgttaaaactcactcttcaaggccccatccccagagattcggattctggggatttggaatctggggtggggtctgaagaatctgcattttttaacaaactcccaggtgacatagatggcatcaattctcaagccatattttgagtagcactgacactcttccaataggtggtactttgacttgtcagggaagttctattgctctgataacttaaaaccaacccaaccagaagctcacaaaaactagcagcctgtgaaaaatgatcaccattttcctagagctccgagacaactagtggtagtgcaacagtaacccaaaaatgtcaatgaaaatatttccttccccagaaactgcttggtttcactcaggtcctgtccttatgggcctgtgtctggttgcagggcttgaagtatttcggaagctcagcagaggttgaaccctttcccctgggggttggtgatctttgttttggccatttccacctggtgaagattttcatagacaaatatgcttgtggcatcctgtaattcattgtgccttatgatggacctctgattctataagcttccccctagctagggatgcacgggggtgatcaagacatgactagatgtgaacctgacctgcagacagtccacctgaacgtgcctggaaatgtctcccgaaaaggatgaaaagcctcctcctttagacaaggaagacagagtggagcaaatttctctacatagatctcattcgaaaacaaatttacagaatgcagaatggctactgtgtgtcttgtgctatgctaggtctctctctctctaagtggactctgaccctgtccaaaacattgtgcttttgcatgtagctgtgtcgcatttaggcccagctctaagaaccgtttggaaataaatcacatagagcctttgattgtgaggcaggcttaaagtacattttgtttgatttgcagaggcatggtgaggaatttatatgcatggctgttgtggcagcagcgagatttccaaaaagatgaatgatgaaatgaaacagactgaagctatctcacaaatgttaaatggagaaataaaagttgttatagtcattgctaattacagaatgagcaagagatttatttagcaggaccatactatgccccctggaaggttcagtttatgagctggagcacaaggatttactgtcatttcacctgaaaacacacatttagctgtccatttacctttaatcctacaggcttaaaatactttaaaatttcagagaccattaatatgtattcctttagaaagcaaaggtctttcagaagctgtcctctaccaaagttaatgtggtcaccacatttgatgattttgctaggtagggaggtttatttaatcacagctactgtcactcaggaggatgagccatttaaaaatggtggccctgtcctccacttcttacctaccatatataatctcagtaattcagatttctctaaatcagcattagtgatcatttcaatagggtatgaacaaaaggcctataaaaatagctttccaattcgccaccaaaaatgcaaaaatgacaagtaagtgaggtaacgcatgagctaaatagcttgatttagtcactctaaaatgtgggtgtgtatatatacatacatatatatacacacacacattatgttatacaccataaatatatagaagttttacttgtcaattaaaactataaataaagtggctttccagaaaaattagatattggactctatcacaaaggaattgcataaaaatacttacaaacataactataagcaattgatgagcaaattacaaatgactgttttttattaaaacattcctccaaaagaacggcaaagcaaatcccatagacacccaaaatactaaaagtgacaaaacaatacttctttaaaaatgtattttatgatctatttattgatattctaatggttttaagaaggataattttccaaaacctaaatgctacacattttacagtggcaatatcaaccttatcatgagctaaagatttgcaatcagaacattggtagagtgcattgctgagttataacaagtgtctcaggacgaggatatttggtaggtatccttaaatatatagatgcttaccagtaggtttaatagaagatttctgaaaggtagcgcaagtttttatttcattatttttatttttatttttttgagacagagtctcactctgtcatctaggctggagtgcagtggtgcaatcttggcttgctgcaatctccacctcccaggttcaagcgattctcccacctcagcctcccgagtagctgggattacaggcatgcgccaccatgcctggctaatttttgtatttttagtagagacggggtttcgccatgttggccaggctcgtctcgaactcctggcctcaagtgatctgcccgcctcagcctcccaaagtgctgggattacaaatgtgagctactatgcctggtcccaacttcttaaaattaaattttggggaagttcatggagatatttttgacatgtaaaagtagaaaacaaaccatccatagtgtgtgcatatatacacacaaggtttggtttaatatacttgctgtgcactagtcagttttgattcaggttacataagggataaaatatagaaagacattttaaagtttgaaatatgtgctaagtagttagagatttggcagttttgccacatttcaaatgggccaaacattaaaataacttatccatgaatttcaggtttcaaggaaggaggaatatctgactatttttttttgtgtgtgagatttggtctcagctttttggtccatctgaatcctggaagtccccaactctaccagaccaaaagggtgtctctattttttgttgttacttctctgttcttgatgtaatgagttaagtagatgaaagagattaaggtgcagggaagggctcttaaaagtttaatgtttcagctttccatagtcattcatacttgtgaatcttcttcctcttctacttcaaagtagccaaaacttggaaagttcaaattaatctttgggctccaaagagcaattctgaaggattaacaggtttcattctctccagtgggaggtggcctagacaggtgccggttttggggagaggtgagagtacccagatgtgggtgactatttcctgttcttccctgaaagtcaggccagtggtctcgaatcattcccacagcaactgctacaaaagtgactatcttaatcctttggctagatgggatacctcttctaccttttcagaggtgagctgttgagtagtaatgtccgctacaacaccacgctcccggaatggtggttcctaagagcaaagtcagttaatacaatttctccaggtatccagctatctccaggtgtgcggtcctgtgaagcactctaagaactgtaaaaaatatttcataggtatagaaggcatttgtaatactgttggttcaaatgtgctgacatgtagccagtggaggaagatgtttctttggaagcctgccatctttctgtaacgcaccttcaacctgagataattaagagtcattacgtttcccagtcccatgtcacattgaccagtcctgtggtcctatggctaagcggaggacacggccacaagctgtgagtcatgaaaaggagggtgcaggtgataggcaaagggacccattagccagtttacaatgactggcaactgaccagatagagcttaccgtatgtccatgtagagttgctcatattagtctgtaaataattctatgcatagtgaatgcagcttctgaattattaaactgatgctataaatgtgaactgacaaaaccca

SEQ ID NO: 187977 - DNA, 2099 bp, Homo sapiens
  Payload ID: 16993
  Gene Symbol: SV2B
  Gene Name: synaptic vesicle glycoprotein 2B
  Uniprot ID: Q7L1I2
  ENST ID: ENST00000545111
  CDS Start-End: 417-2015
atatttattggtctgcaaatccggagaccttgcggcctcactggtcctccttccctctgagctatctccacacccagccttcgatcagaaggagatttagaagcagagctgcccgcagcgaatacttttaatgcccgggccgggaagaaagcgggttaggatctgatcccgctgagtagaggacccaggagcctcccgccccgcgtgctctgtagcgcgggggcgcgctgcgcgctgcgcctgggcggctggcgggggcggcgtgggcgcggtgatgcaggtgtgacacccgccggcgcctgcctccgcccggatcgcccagctccgcgttagccggagctgcacgcggggctgccggggcggacgctgctctgcctgcatccggaggcggccgccagcggatttgccacccagggatgatagtctacttgggaatgatggcgggcgccttcatcctgggaggcctggctgataagctgggaaggaagcgagtcctcagcatgtctctggccgtcaatgcctccttcgcctccctctcttccttcgtgcagggatatggagccttcctcttctgccgactcatctcaggcatcggtattgggggtgctctaccgattgtttttgcctatttttctgaattcttgtctcgggagaagcgaggagaacacctcagttggctgggcatcttctggatgactgggggcctgtacgcatctgccatggcctggagcatcatcccacactatggctggggcttcagcatggggaccaattaccacttccatagctggagagtgtttgtcatcgtctgtgctctgccctgcaccgtgtccatggtggccctgaagttcatgccagagagcccaaggtttctgctagagatgggcaaacatgatgaagcctggatgattctcaagcaagtccatgacaccaacatgagagctaaggggaccccagagaaagtgttcacggtttccaacatcaaaactcccaagcaaatggatgaattcattgagatccaaagttcaacaggaacctggtaccagcgctggctggtcagattcaagaccattttcaagcaggtctgggataatgccctgtactgtgtgatggggccctacagaatgaatacactgattctggccgtggtttggtttgccatggcattcagttactatggactgacagtttggtttcctgatatgatccgctattttcaagatgaagaatacaagtctaaaatgaaggtgttttttggtgagcatgtgtacggcgccacaatcaacttcacgatggaaaatcagatccaccaacatgggaaacttgtgaatgataagttcacaagaatgtactttaaacatgtactctttgaggacacattctttgacgagtgctattttgaagacgtaacatcaacagatacctacttcaaaaattgtaccattgaatcaaccatcttttacaacacagacctctacgagcacaagttcatcaactgtcggtttatcaactccaccttcctggagcagaaggagggctgccacatggacttggagcaagataatgacttcctgatttacctcgtcagcttcctgggcagcctgtctgtcttacccgggaacatcatttctgccctgctcatggatagaattggaaggctcaagatgattggtggctccatgctaatctctgcagtctgctgcttcttcctgttttttggcaacagtgagtctgcaatgatcggctggcagtgcctgttctgtgggacaagcattgcagcctggaatgctctggatgtgatcacagtggagctgtatcccaccaaccagagagcaacagccttcggcattctcaatggattatgcaaatttggcgccatcctgggaaacaccatctttgcttcttttgttgggataaccaaagtggtccccatccttctggctgctgcttctctggttgggggtggcctgattgcccttcgactgccagagactcgagaacaggtcctgatgtgaacaacctatgggaaaaggaaaggtcgagagaatcttgtccaggacactgaaatgcatccacacttcctgcctatcacggtccgg

SEQ ID NO: 187978 - DNA, 4077 bp, Homo sapiens
  Payload ID: 16993
  Gene Symbol: SV2B
  Gene Name: synaptic vesicle glycoprotein 2B
  Uniprot ID: Q7L1I2
  ENST ID: ENST00000557410
  CDS Start-End: 529-2580
gctgctctgcctgcatccggaggcggccgccagcggatttgccacccaggtcctaagactctcagtccagagagggccctgccccacacccagaaggaaggaatgctgcccagagatgaccagaggaatctagacagagcataaccttcggtggcaggacaaatcaggccagcacgcagtctgccaagtcctgctcgctccctgtcaagaaaaacagctggatccatttctaatcaacacttcccaacgcaacacttctgagtctctgaaggagaccagagcttgaaactttccagacttccaacagacatcgagtgcaaaaggatatttaggttgtctttgcacaaatctggttgatttgagagataaagggggggggaaccagtgtgactttcacctaagaagtcacatgaacatatttcacatttgaactacataatgaatgatggttattgaaatagcccaaacctctaccacagagcgagggatatagctcaaggggcaaccaggcagtcgcagaaccaaggaatggatgactacaagtatcaggacaattatgggggctatgctcccagtgatggctattaccgcggcaatgagtccaacccagaagaagatgcacagagtgatgtcaccgaaggccatgatgaggaagacgagatctatgagggcgagtaccagggtatccctcacccagatgatgtcaaggccaagcaggccaagatggcgccctccagaatggacagccttcggggccagacagacctgatggctgagaggctggaagatgaggagcagttggcccaccagtacgagaccatcatggatgagtgtggccatggccgcttccagtggatcctctttttcgtcttgggtttggccctgatggccgatggggtggaagtgttcgtggtgagttttgccctgcccagtgcagagaaggacatgtgtctgtccagttccaaaaaaggaatgctagggatgatagtctacttgggaatgatggcgggcgccttcatcctgggaggcctggctgataagctgggaaggaagcgagtcctcagcatgtctctggccgtcaatgcctccttcgcctccctctcttccttcgtgcagggatatggagccttcctcttctgccgactcatctcaggcatcggtattgggggtgctctaccgattgtttttgcctatttttctgaattcttgtctcgggagaagcgaggagaacacctcagttggctgggcatcttctggatgactgggggcctgtacgcatctgccatggcctggagcatcatcccacactatggctggggcttcagcatggggaccaattaccacttccatagctggagagtgtttgtcatcgtctgtgctctgccctgcaccgtgtccatggtggccctgaagttcatgccagagagcccaaggtttctgctagagatgggcaaacatgatgaagcctggatgattctcaagcaagtccatgacaccaacatgagagctaaggggaccccagagaaagtgttcacggtttccaacatcaaaactcccaagcaaatggatgaattcattgagatccaaagttcaacaggaacctggtaccagcgctggctggtcagattcaagaccattttcaagcaggtctgggataatgccctgtactgtgtgatggggccctacagaatgaatacactgattctggccgtggtttggtttgccatggcattcagttactatggactgacagtttggtttcctgatatgatccgctattttcaagatgaagaatacaagtctaaaatgaaggtgttttttggtgagcatgtgtacggcgccacaatcaacttcacgatggaaaatcagatccaccaacatgggaaacttgtgaatgataagttcacaagaatgtactttaaacatgtactctttgaggacacattctttgacgagtgctattttgaagacgtaacatcaacagatacctacttcaaaaattgtaccattgaatcaaccatcttttacaacacagacctctacgagcacaagttcatcaactgtcggtttatcaactccaccttcctggagcagaaggagggctgccacatggacttggagcaagataatgacttcctgatttacctcgtcagcttcctgggcagcctgtctgtcttacccgggaacatcatttctgccctgctcatggatagaattggaaggctcaagatgattggtggctccatgctaatctctgcagtctgctgcttcttcctgttttttggcaacagtgagtctgcaatgatcggctggcagtgcctgttctgtgggacaagcattgcagcctggaatgctctggatgtgatcacagtggagctgtatcccaccaaccagagagcaacagccttcggcattctcaatggattatgcaaatttggcgccatcctgggaaacaccatctttgcttcttttgttgggataaccaaagtggtccccatccttctggctgctgcttctctggttgggggtggcctgattgcccttcgactgccagagactcgagaacaggtcctgatgtgaacaacctatgggaaaaggaaaggtcgagagaatcttgtccaggacactgaaatgcatccacacttcctgcctatcacggtccggaggacaccttggatagcacgggaggagaagttgactttgtgacccctagtttaggacccacttcagctgtcaatatgtttgtaactcaggtgactgatttgggggtgccctgagccacccttagaatcacagagctgcgtgtttaacttcaagtcttcccagtccaaggcagggagaggattctccagtgagtgcacacactatgcgaggagcaagcatttctctaagtcaagtgcaaggacttaacttgcgtttgaaaaggaattagagggtcagaaacacccaggttcctccagaaagctccttggagcccaacaacttaacaaatcaacttggctggaagttagagtcattatatgaagattgggcttgaagtatatatttttgcatttaaaagtatcacctatcatattttccactcgaaaattgacatagtagcattgaggatactctgatctagaaagccaagtatttgagcaacatctatagagatctacttttctcctatgtctcctaggctttccatgataattagggagagaagacatattgactctgactggacaccctgattcctccaaatatatataccactgtgtattaatctttctctcagtgttttataggagtactaacatttattgctctgtcaataatgaaaggctcgatgtaatatagctgtaatttactttccatatgaatacagtggctaggttcataaaagagaattgtgtgagtctgggattaccacatctaaaacattattctttaatgggataatacaattcattgagcagctaccacttaaaaaacttgcaggacagttagagcctgcatttctagttaagatggatcttgtaaatttaaaattggattaacattggagtgctggggtggctgcaataatttgggggctaactccatttggtttccaagatctcacttctgcattatctttatggctctttaaaccagccacctagccaatcaagggcaattcccatctcatccatcactcaggtctttgtaaagggtgcagccaagctctgcagacttttgcaggattgtctagcctgagtaccgggctacttcttaaatgccgtcactcctgctgagataaatgcgtctttaaaaatagtctctgtggcaggtcactgggggacaatgtacagcattctggccatccacttctttttcacttcatgttctaccccaagagactcccgatgtcggctgtggagggttaaagggatgaggctttcctttgtttagcaaatctgttcacagttcttgatgatgtattttatgatgcccagcttggaaatagttgctttccatagtctcaactgtattgtgtcatctcctgatgctgatttttgatcttttgttttattaaaaataattagtgaaaga

SEQ ID NO: 187979 - DNA, 3010 bp, Homo sapiens
  Payload ID: 16994
  Gene Symbol: SV2C
  Gene Name: synaptic vesicle glycoprotein 2C
  ENST ID: ENST00000322285
  CDS Start-End: 201-2231
gacggaggcagcccggggaagcgagccggagcggcgcccgcactgaggcggctgcagtgctgacaccactcagggcaagggtgtccgacggctggagcgttctgttttgaacccaaagtggatgatgctgtcagagctgaaccactgaaaggaggctgtgaaaatttcccatcttctcattggccatcagttgagataagatggaagactcttacaaggataggacttcactgatgaagggtgccaaggacattgccagagaggtgaagaaacaaacagtaaagaaggtgaatcaagctgtggaccgagcccaggatgaatacacccagaggtcctacagtcggttccaagatgaagaagatgatgatgactactacccggctggagaaacctataatggtgaggccaacgatgacgaaggctcaagtgaagccactgaggggcatgatgaagatgatgagatctatgagggggagtatcagggcatccccagtatgaaccaagcgaaggacagcatcgtgtcagtggggcagcccaagggcgatgagtacaaggaccggcgggagctggaatcagaaaggagagctgacgaggaagagttagcccagcagtatgagctgataatccaagaatgcggtcatggtcgttttcagtgggcccttttcttcgtcctgggcatggctcttatggcagacggtgtagaggtgtttgtcgttggcttcgtgttacccagtgctgagacagacctctgcatcccaaattcaggatctggatggctaggcagcatagtgtacctcgggatgatggtgggggcgttcttctggggaggactggcagacaaagtgggaaggaaacagtctcttctgatttgcatgtctgtcaacggattctttgccttcctttcttcatttgtccaaggttatggcttctttctcttctgtcgcttactttctggattcgggattggaggagccatacccactgtgttctcgtactttgctgaagtcctggcccgggaaaagcggggcgaacacttgagctggctctgcatgttctggatgatcggtggcatctacgcctctgccatggcctgggccatcatcccgcactacgggtggagcttcagcatgggatcggcctaccagtttcacagttggcgtgtgtttgtcatcgtctgtgcactcccctgtgtctcctccgtggtggccctcacattcatgcctgaaagcccacgattcttgttggaggttggaaaacatgatgaagcttggatgattctgaagttaattcatgacaccaacatgagagcccggggtcagcctgagaaggtcttcacggtaaacaaaataaaaactcctaaacaaatagatgagctgattgaaattgagagtgacacaggaacatggtataggaggtgttttgttcggatccgcaccgagctgtacggaatttggttgacttttatgagatgtttcaactacccagtcagggataatacaataaagcttacaattgtttggttcaccctgtcctttgggtactatggattatccgtttggttccctgatgtcattaaacctctgcagtccgatgaatatgcattgctaaccagaaatgtggagagagataaatatgcaaatttcactattaactttacaatggaaaatcagattcatactggaatggaatacgacaatggcagattcataggggtcaagttcaaatctgtaactttcaaagactctgtttttaagtcctgcacctttgaggatgtaacttcagtgaacacctacttcaagaactgcacatttattgacactgtttttgacaacacagattttgagccatataaattcattgacagtgaatttaaaaactgctcgttttttcacaacaagacgggatgtcagattacctttgatgatgactatagtgcctactggatttattttgtcaactttctggggacattggcagtattgccagggaacattgtgtctgctctgctgatggacagaattgggcgcttaacaatgctaggtggctctatggtgctttcggggatcagctgtttcttcctttggttcggcaccagtgaatccatgatgataggcatgctgtgtctgtacaatggattgaccatctcagcctggaactctcttgacgtggtcactgtggaactgtaccccacagaccggagacgcagagtcttgccatgttgccccggctgatcttgaactcctggcctcaagcaatcctcctgcctcagcctcccaaagttctgggattacagtctcgagccactgcacctggctttctttccatttttgaggattaaaattacttgaaattttccaaatatattatacaaggtcttgctaagaacttagtagatttctttattgttgtcttttttctctctcttttgccttgtagaaatatcccacaaagtgaagtaaccaagtcaacaagtgtgaacaattttatagctctccttaaatttactatacagctctcagaaacaacggagccagtttatagcaggagccattagtgggtgtggacctcttttctaagatctgcttctaaacttggctttatcacataaagagagaaaagcattacaaacaatttgaaggaattctttgtcttataaaaaaaattctgaaaacctccttgtattcccactaggaggtatagttaaccttgcaactccacaaacagaccactttacacacttgcccaggggcctttgtttttgcttgcccctcctctgaaatgctctctacaggtgattaagtggcttttccctttacttaggtgtctactcaggtaaaatcttaaccaagacgcctttacttaaaatgtccctctgccccaccctgaggcttttaacttgcatagccctcatcatcacctgacataatatgtacttctttgcttttatagatattatctgtgtccctccactaggatgtccatttcatgggaataaagactttgtctcttt

SEQ ID NO: 187980 - DNA, 11035 bp, Homo sapiens
  Payload ID: 16994
  Gene Symbol: SV2C
  Gene Name: synaptic vesicle glycoprotein 2C
  Uniprot ID: Q496J9
  ENST ID: ENST00000502798
  CDS Start-End: 443-2626
gacttgccggagcaccgcgagtggcgcgcgggtcccgcctcccccgcgcgccgtgactccctgcgcaccgctggtactctcgccacgccgccgcccggcactgcagcaccagggggaggaggcaggcggaggagaggaggaggaccgcagcgtgcaagccgggagccactttcccgcccctcctctcgccgctgacacgctcagaggagtcaccactccgcgcgctgcaggcgagagtggcagacggaggcagcccggggaagcgagccggagcggcgcccgcactgaggcggctgcagtgctgacaccactcagggcaagggtgtccgacggctggagcgttctgttttgaacccaaagtggatgatgctgtcagagctgaaccactgaaaggaggctgtgaaaatttcccatcttctcattggccatcagttgagataagatggaagactcttacaaggataggacttcactgatgaagggtgccaaggacattgccagagaggtgaagaaacaaacagtaaagaaggtgaatcaagctgtggaccgagcccaggatgaatacacccagaggtcctacagtcggttccaagatgaagaagatgatgatgactactacccggctggagaaacctataatggtgaggccaacgatgacgaaggctcaagtgaagccactgaggggcatgatgaagatgatgagatctatgagggggagtatcagggcatccccagtatgaaccaagcgaaggacagcatcgtgtcagtggggcagcccaagggcgatgagtacaaggaccggcgggagctggaatcagaaaggagagctgacgaggaagagttagcccagcagtatgagctgataatccaagaatgcggtcatggtcgttttcagtgggcccttttcttcgtcctgggcatggctcttatggcagacggtgtagaggtgtttgtcgttggcttcgtgttacccagtgctgagacagacctctgcatcccaaattcaggatctggatggctaggcagcatagtgtacctcgggatgatggtgggggcgttcttctggggaggactggcagacaaagtgggaaggaaacagtctcttctgatttgcatgtctgtcaacggattctttgccttcctttcttcatttgtccaaggttatggcttctttctcttctgtcgcttactttctggattcgggattggaggagccatacccactgtgttctcgtactttgctgaagtcctggcccgggaaaagcggggcgaacacttgagctggctctgcatgttctggatgatcggtggcatctacgcctctgccatggcctgggccatcatcccgcactacgggtggagcttcagcatgggatcggcctaccagtttcacagttggcgtgtgtttgtcatcgtctgtgcactcccctgtgtctcctccgtggtggccctcacattcatgcctgaaagcccacgattcttgttggaggttggaaaacatgatgaagcttggatgattctgaagttaattcatgacaccaacatgagagcccggggtcagcctgagaaggtcttcacggtaaacaaaataaaaactcctaaacaaatagatgagctgattgaaattgagagtgacacaggaacatggtataggaggtgttttgttcggatccgcaccgagctgtacggaatttggttgacttttatgagatgtttcaactacccagtcagggataatacaataaagcttacaattgtttggttcaccctgtcctttgggtactatggattatccgtttggttccctgatgtcattaaacctctgcagtccgatgaatatgcattgctaaccagaaatgtggagagagataaatatgcaaatttcactattaactttacaatggaaaatcagattcatactggaatggaatacgacaatggcagattcataggggtcaagttcaaatctgtaactttcaaagactctgtttttaagtcctgcacctttgaggatgtaacttcagtgaacacctacttcaagaactgcacatttattgacactgtttttgacaacacagattttgagccatataaattcattgacagtgaatttaaaaactgctcgttttttcacaacaagacgggatgtcagattacctttgatgatgactatagtgcctactggatttattttgtcaactttctggggacattggcagtattgccagggaacattgtgtctgctctgctgatggacagaattgggcgcttaacaatgctaggtggctctatggtgctttcggggatcagctgtttcttcctttggttcggcaccagtgaatccatgatgataggcatgctgtgtctgtacaatggattgaccatctcagcctggaactctcttgacgtggtcactgtggaactgtaccccacagaccggagggcaacaggctttggcttcttaaatgcgctatgcaaggcagcagccgtcctgggaaacttaatatttggctctctggtcagcatcaccaaatcaatccccatcctgctggcttctactgtgctcgtgtgtggaggactcgttgggctgtgcctgcctgacacacgaacccaggttctgatgtaatgggaaaaaaagccatccttcctgcgtttcttcctcctgccctgggtcaattctccttcctgactcaaggcttcagagttttcctatatagaaaggtgatcaagtatcagaacataaacacgtgctgtgacttaaaatttagaagcatatcatcttgcccctttgtgattttgcacaggttgtttgtttgttttgttttgtttgaatgcattgttatctttccaaactgtgatgctactgcctcccgcaaatcagtggaagcatttctaaaatgccctaggcagccaggcttccctggggttctgctcattgaaagtttagaagctaagaagactgggctggtgtaagaaatagatcctgctcctaatttaacattaacaggaaatataagtcggcacattattgcatttgtgctgagaagagggattctttttttttttttttctaacagagtgatatttcctgtttacttagaaaaggacacccagtaattctcactgttatagcagagcctttcaaagaaaaccatgtggcaccaaacagggctgggtggggctctttggggcaagacaattaaggtgaccgctgacaagaaaaataaaagctctgcaattagcagcaaaaatctgagtgtgctgcataagcaagatttctgtcagaaagcccaattaaacctctgaaaagtgtgaggaaaaagaactgtaacagtatctgtgactgtggcatgtggttcagaatgtttgaaaatcagagatccgagagagagcttctgcctccatttaccactcccactccttcagctgcccttggtcttgccagacagcagattcagggaaagaaagctgcttcttaaaaactgtctgcctacctgattctgccacttacccacactgtctctagtctagagattgccagtggatagctaaattgtaaattgcaaattaggaagaaattcacacccagagccatttggaaatacaaaatggtacctctttccagtacctctttgctgtgggactggcccgccaggacccccaccccacctggcccgcagttgacattcagcttcccagctggcatcagcaaagagggtttgtccctctagcttccccagggctggcccactgctcaatgcgctcctggctccctgtaaaatcacagcccgcctgcactcctgagggcccctctcacagacagaccatctccctgtggttgtttgactgctcattttacctctggaatctgcctgggcttggaagaaagaggtcagccaggacattcccacgggcccgctgtcagctacatgaccttctcgcctctcaggctccccttcccccaggctcgtcctttttacacctcttctttgaaatctgaaccttccttgtagacttgcagccaatgaccagaagccaggaataaatcccatatttaaacaatattccttttttaactgcctcgatagaggtttattcttgttacttattataggcattttcaggcaagccatagcttggggcctccaggaagggaaagcttttgtttccactgatcattattttcagagatgtcctaactcccctgaggcccccctgcctccccctccccttcctaatgatccctcgcagagctcagactaagtgaaaagcttctttcattaacataagccattaatcgacttccccttgaagtaattcaggtctgcagaggggggaagactggtgttgggggcagtgggaagagggtggttccctgggggtctgtgatcagggctagaacatcaggaaaacccgaaccaaaaactgcaaaggtggcaggaagaagaaaaatcactgaaggctagacaagatgcatttgaaagataccaaccgcacagggaaagaaacaactttctctcacttctgcctcctatcattttattggagaacaaagacagcagtcaaacaacccaagaaagtaccctgtatgtttttcttcttccacatgtacccattttcccacctatctctccctgatttgtcttctttaaaaagacatttggggacctgagcaggtcttttagttgaatgcagcatgtgcagaaataactgcaaaagccaggagtgcatctccatcaacccatcaaaagaaaaatagaaatgtacatgggcatcgctgtctctagtcctctgtgatagttcactttgctaactagactacctttacttttcaaaatatctctaatgtctgctctggggtctaaatgcataaaacatctcccaagctgcagagcacagttattcagaattttatttgaacactgggttgggtcagcataggataaaccagcaaaaccttacttcatgagacctgccatccgtgtcccctgcagaaggaccgttcttggcctacttgttacctaatccaagcatccttggtggcctaagagggatcttttctcatctcctggacagtctgtggtcacaaaccttcttggtcaccacctctcccaccttttgtgcactcttccctgcctccttgagactgttcatcaccttgattttctaagagagctcaaatcatttccaaagcatgtggtgtggcctgtatagcttgctccagatttagctggagattaagaaacagccaggatattaaacagaaactctcagttgtatcagtgtagcaggccactggcacctaaacacgcaactggcatctcatttcgcctacagtagaaggaaaatgaaaatttgtacaaaaatgaaaacctaggaaatagtccacttgctcctatatttttaccaccttttctaactaaaatttccctgttgctctttggaatcaatccagaatgctcccaagtcccattattatcacagaatcttctcagtagggaaaaacaaacaactgcttcaaactgtgaattctgtatgtaccacattctatcccaggtattgggttttaaggcacccaactcacattcagtcctgctgcctgaatcatctcacaccagagtacagaccttggagacgcgatagatgggtcctagcctgaccttcaccactaagcggtacagggacccagatcttgctgtggagactgtaagtcgttgaacatctctagttctcactttccccgtgcacaaaataaaggattgggactagtctgctctccactctccagcattgtagaagacagtaatgaaaatagcttcatcttatctgccttcttatgctaaactcattttttttttttttaggtggagtttcactctgttgcccaggctggagtgcagtggtgggaactctgctcactgcaacctccgcctcccaggttcaagtgattctcccacctcagcctcccaagtagctgggaccacacgcatgcgccaccacgcccagctaatttttgtatcttttagtagaggtggggtttcaccgtgttggtcaggctggtctcgaactcctgacctcaagtgatcggcccacctcagcctcccaaaatgctgggattacaggcgtgagccactggcggcctcaactcatttttacaagcactaaataggtttagtttataaactgaaaaattaggaaataggcacgcataaaaagagtgtaggaagttgtttgggaagcccgcatggaataggccagaaagcacagtccccatgctgtctgccctgccagcatctcagcatcctgactagtatctctgttcactgcaggtttgacagttaccatcacccagccagaaaagggccccgccttgccagataaacgcgcttaggttagaagactataattgcaatattaccctacagctctcctgactgtttattccattattttcttgaaacatggccttaagtattatacataggcttcagaaacagtttttcagtgattttacctatattggcaaatagacaaatctcaccaaatcagagttcaggttttcaccaaaaactgcttagttgtctttcaagataccttaagagatcaaaggggaggtgggaaaagaaatgtagtgacagaagggagagtccaagataccactgataaggttccagcaaagagattaggacacagcagagactttctaaatgctggggtcatttccaaagcagtccaggggaatactttctgattccctctgccaatcaaaatagatagaatatgatattctccaattttttttctgtttgatgtcaaaatggcctttacctatttcttcagtaatatacctgatctgttcatgcactaaaggctctggagccaggaatgtctgaatttggccttcacctggtatcacagaaagacaactgggatattggtgttaaggggcatatcggctgtatgttaggttttctttaatcctcacatcgtgccaaacttagtctggttactaagcctaaaaacaccagtattgcaacaacttctgaaactctgaagtggactatatgtttctcacagtttttgtttatgctcagcaaagtatgtattttaagtaaagcttctcttgttatctgtaatgtagacaaaaaaaaaaaaaaacctgttagtatattctggatgtattgtgtgtcccttcattgtttcaggtatggcgtaacagttctccgtgtgatgttcttttgctctaaatgttgaccattcctcttgtcgcccgtctctcaccaaccagtcacagagccattgccagggctcccttcagtctttcttaaacaatatctaaatgcagtttagtaatcccaggattttgagttacaagaatacagtttatgggtctgtttcagctcttacttaaggctagcatggttgggcaggggaagagctgagccgagccttcactgatctcttgtcatttcatatgattatccagtaaatacttattgagcacctcccatgtgatacgtattgagacactgctgtgtgcaataattaagcctatggaggacttaaatgagggcaaggaaaacagaatgagagaagacactctcacactgacccccattacatgtgaaccctccgcgcccccccccataaatacaaagtgttatttttccacatttaaaacaaataatagccttcagcaggcagtgcaggaactattcagtcattgagataacctttgatgagaggagaaagctccttgattacctggtttttgttggagagactattaactagtacttggaaaatgagaaaaatgaaaccacacataagttgttcccttaaataatctcagcaggatattgcactaagatattattcaaggaaaagaatcaggagcagagatagccccatctctctagagcattttttttttttttttgggcgggggggcgggggacggagtctcgctctattacttaggccggagtgcagtggtgcaatctcggctcaatgcaacttccgcctcccaggttcaagcaattctcctgcctcagcctcccaggtagctgggattacaggtgcatgccactatgtccggctaattttttgtatttttagtagagacgaggtttcaccattttggccaggctggtctccaactcctaacttcaagtgatctacccaccttggcctcccaaagtgctgggattacaggcatgagccactacacctggcctaaagtcccgctttcttctgaggtgttcttttcatggtgtgaaaccagagacaggagctagggggtctgttccccagcgaatagtgttggggttttctcttcagagctaagtcagcaaagcctgcagctgctgccactcccctggtctgtgcctcccagggtgtttcctttctgattttgaagatttgtgggtgagtcaattatctttgcagacatcctaaagcagcttccctcctcgctaccctcagcagataagccatccagaaaacaggttctgacagccagtagcaggggtattttgggtttcagtttaaaactggtgcgtgttgttgcaagtgtcttgaagttgcaaaggatgtttggggttctagggcctgcaggggggcagagcagaaagagggtagttgtcagtgaccctctaccctcctctgagagccccattgccatttttgcccaccagttctcttcttacctcctcagggcagtgcccactcatttcctttatttcccttttgttttttttcttttcctcctctggtcgacaacctcttaattctagcagtgtacaaaagcaaggccaagctttcctggggcacttgggatgaaaggcccatccatgcctgttgtggaggcacagaggaggagaaggtgaagaacaggaatgggtgcagggggagtgtgaacgcaaggctgctggctttggcacagctccctgtgcagggctggatttccaattgcttttcagtgcctgtgccctgataggatgggcacagctggtatggaatcagagcagcccatctccagagcagaagtctgagagctcagcgtttgactcctgaaagaccaggatgttcctacctgggttcttgagattcattggctagtggaggtagatggtactctccatgtctgcagaagattccccacttggtgctgaaggctaggtgccttccagtcaggtctgaatgctgaaattgctgagattgtccactctctgcctactttattgcattcatgctccccttagatccaagagtgcccaggactaggagcagaaagcagttttcaaccctttgttcagactcagacgggtttcaactcaagcgggtaatctaccccagcagcaggggtgcaaagtccaaaacagctttgtggtgcctggggagtgactaggcagcctgctcacaggggctggagtcatctaaagctagtgatgagctggaatagctttgaaccggttcatccgaactgattgttaaactttcagaacttttgagagtcagttgagaaacatagctattactaaaaaattaaataagattagataaattatagctaaaagcaaaggcaacatatagtcaaagctcatcactttctacttattttactacattttaccattatctgtgcccatgaggtaatgtatgcctattatgtctgtatggtagaaatactgtatacaggtatactactacacacaccttcccaagtgacagtatttttgtagtttgagatcagctatagtggtggtatttataccatggaaagcaacaaagccatggaaagcaacaaagccatgcaaatcagactcctcctaacccctaagacagttgttaaacatttgccagcataccaccatctaaagccctaaagaatgcttggcctcccactgcatagacacaggccacatcacattgagtatcatggatttatgggtcagcattgcccctaagtccaaggaaggggaaagacttagcaagctcaacctcatgtgattcacaaagggtttctttctgcatttgtattgactcagaataggacccagtacagagaatccactgttatctatgggtgtcattccttcagaaagaatgtacagtaaaattggctatttcatgctatgcaaacaaaatgaaactagtttgaagttgcaaagtgtctcccctcttgcgcccacgtagtcatccaagaaggaaactcctttcttgccttgatattcaccaggcctacctagatagaacttgacaaattggcctaacttcatctccgctgctattgttatatatttgctttactgaatctatgtcctatgtcagtcagaagaaaaaagaaatgtcttttttaatatacactttcttagcatccatgcagttatgtatcctcatcctgatccaggaacatattgaacagatcatatgtcttttgttactatctagatacactaaataacatgatagaagagttttctctttcaggtgaacttccattttgaacatatgctaaacgtactatccactgtctattttaatgagatcttggcaatggtcctgtcggttttggtgtttggattgtttggctttgttttccttttttattcttcctgtttttaatgctgtgtaagatctcctgctatgaatgttccagttacccctattgtactgtatatacgtgtgctgcatgtgtaaattctgtttcaggttttggagttttcatcttaagtacagctggtcctgttgtgaactcatctttcctgtatgctcctctgtgtctgatttccaattgccaaaatgtttgaccaaatgtgttttgacaaatatcccgagacagccatgcgtatccttgtgaaagggcatgctccatgtgggatggctcgtgtacagcataaatctatcaaacttggaattgtgtatacatttatatgccagataactaacattcatgtaacagctgcaaagatatttagtgtatatcagattaataaaagagcattttttttttgctccattatattcaaataca

SEQ ID NO: 187981 - DNA, 497 bp, Homo sapiens
  Payload ID: 16995
  Gene Symbol: SYNGR1
  Gene Name: synaptogyrin 1
  ENST ID: ENST00000216155
  CDS Start-End: 63-419
cgcgcacgcgcacgggccggcggcgcgcgccgagcggggggcaccgcgcgggtgcagccacgatggaagggggtgcgtacggagcgggcaaagccgggggcgccttcgacccctacaccctggtccggcagccgcacaccatcctgcgcgtcgtgtcttggctgttctccatagtggtgttcggctccatcgtgaacgagggctacctcaacagcgcctccgagggggaggagttctgcatctacaaccgcaaccccaacgcctgcagctatggcgtggccgtgggcgtgctcgccttcctcacctgcctgctgtacctggccctggacgtgtacttcccgcagatcagcagcgtcaaggaccgcaagaaagccgtcctgtccgacatcggtgtctcggcatgggagatgcactcttgaatgtccctctgttcctcggcttccccattttctccccactcaccctctcccccatgtgtggcactgcctattctgccc

SEQ ID NO: 187982 - DNA, 1361 bp, Homo sapiens
  Payload ID: 16995
  Gene Symbol: SYNGR1
  Gene Name: synaptogyrin 1
  Uniprot ID: O43759
  ENST ID: ENST00000318801
  CDS Start-End: 87-662
gcgcaggggagggggcgggggcgccgcgcacgcgcacgggccggcggcgcgcgccgagcggggggcaccgcgcgggtgcagccacgatggaagggggtgcgtacggagcgggcaaagccgggggcgccttcgacccctacaccctggtccggcagccgcacaccatcctgcgcgtcgtgtcttggctgttctccatagtggtgttcggctccatcgtgaacgagggctacctcaacagcgcctccgagggggaggagttctgcatctacaaccgcaaccccaacgcctgcagctatggcgtggccgtgggcgtgctcgccttcctcacctgcctgctgtacctggccctggacgtgtacttcccgcagatcagcagcgtcaaggaccgcaagaaagccgtcctgtccgacatcggtgtctcggccttctgggctttcctctggttcgtgggattctgctacctggccaaccagtggcaggtctccaagcccaaggacaacccactgaacgaagggacggacgcagcccgggccgccatcgccttctcctttttctccatcttcacctggagcctgaccgcagccctggccgtgcggagattcaaggacctaagcttccaggaggagtacagcacactgttccctgcctcggcacagccgtaggcctccccggcttgcagaggccggcagccctgtatcacccctggcagtgaggtggcaggagcagcctagtgccagaaatgtccaagatgccagggcatgcagggcagtggaaggctggcttgaggaaccaattcaggttctccactgactcattcattccttcaccgcctccttcattgattcttcatgcgttcattcattcagtaaacatttattgagcagctgttttgtgcctagtgatgaattaggtggggtccttggctccaggagcccacaggctggggaggagaaaacaaacacatcaatatctcttccaaatggacagccgtggacagttaccaggtaggtagcggccccatacatgggctgcctagaggcgttcatggtccccattgctgagctgtgggtgcagagcaatagcctctcccttcacagcggtgtgaagagtgacctcactgtccttagggttagcatcctggccgaggatgtcacagggctcctggtctggctctgtcctcatgtgctatgtgaccctgacaaacccgtgcacctctctcagcctcagtccacttacctgaactgaggggtgataatggaccaacctctcaaggctgttgtgccaatgaaacaaaggccagcccagggcttagcacaagcatgctcaataaatgtaagctcttttgttcattcattcattca

SEQ ID NO: 187983 - DNA, 4391 bp, Homo sapiens
  Payload ID: 16995
  Gene Symbol: SYNGR1
  Gene Name: synaptogyrin 1
  Uniprot ID: O43759
  ENST ID: ENST00000328933
  CDS Start-End: 16-717
gcgggtgcagccacgatggaagggggtgcgtacggagcgggcaaagccgggggcgccttcgacccctacaccctggtccggcagccgcacaccatcctgcgcgtcgtgtcttggctgttctccatagtggtgttcggctccatcgtgaacgagggctacctcaacagcgcctccgagggggaggagttctgcatctacaaccgcaaccccaacgcctgcagctatggcgtggccgtgggcgtgctcgccttcctcacctgcctgctgtacctggccctggacgtgtacttcccgcagatcagcagcgtcaaggaccgcaagaaagccgtcctgtccgacatcggtgtctcggccttctgggctttcctctggttcgtgggattctgctacctggccaaccagtggcaggtctccaagcccaaggacaacccactgaacgaagggacggacgcagcccgggccgccatcgccttctcctttttctccatcttcacctgggcgggccaggctgtgctggccttccagcggtaccagattggcgccgactcggccctcttctcccaggactacatggaccccagccaggactccagcatgccttacgcgccctacgtggagcccactgggccggatcccgccggtatgggcggcacctaccagcagccggccaacaccttcgacaccgagccccagggctaccagtcgcagggctactgagccacagtgaccgcctgcccccgcccctccccatctgtcccctctctccacacccagcccctgctcctgcccaggctgccctgcccagcgcctcatcagcctctgccttgtcccactgaggtccagggtagctcggggcaggggtggggcagtccagtgttggggactgtctacgtatgtgcaagtatatcccagggcatgtgccccgcaggggcctagagggtgggggccaggggtatttgcattcatacattgtgtcatcaagcattccttgagcgcctactgggcatccggcctgtgctgggcatgggtggtgacattggcagaaatggccactggaaaggggagcgatgagctgtggaggaagccctggtggtaccagaggccagaatggtgggaaagacagatccagataatgctgggaagtgtggctacaccgtggcttggtcatagggtgagtgtaaacacccacaggacactgggggctgtcaccctgctctggcagtcctgctaagagtgtcagggccgtctccattttatggttgaggaaactgaggtctagagaggtcaagattacttgcccagaatcactcaggcagctagtgatagaggtggggccaagcccaggctgcccgactgcagaccacgtgctcttccctggccacccacctcctaccatccccacgcttggggcttccctgctcagtgttactgtcattctgggaggccttggggccctcagccccttgagacaccctgattctgctgcatgccaagggcctgttctgccccagctgttcctcctcccctggggacagccccacctccgggtccctccacccacatccccctggtcctacccctggcccttggcctcctccaagagggctcaccccgggtgctgctctgtgctctgcgtgtcccacagacgcttgttccagggggctccagcaaaccccttcgtggtctctcaaaggactgatcactgtccttgcctctaggaggggtcactaagcccttacctagggctgggtggacaacaaggcacagatgagggtgtgactggcccgaggtcacggtgagtgagtggcaaagctggccctgacgcctgggtttcttggccccagctgcccagcaggtgcctcgattccctgcccttgtgacctcccaggaaacagaactgatctgggacactatgtcacctctcctctcatctggggtcagtcagggttcgggggctgcagcagccaagcgcatgagaggtgtttccttggccttccagaaggcccactgtggagccagcctccctatgggaggcagagcggcaaggacagggctttggaatcagccaggtcggctcctgggctgtggccgtggagagacactgcccccaggatgacacaggcaagagcccctgaggcatgggaggcccagggaagaccatgggctgtaggggagagtgtggcaggtgacccaaaggcccaaagagggccgtggggcctgaggaggtcataatctcttctgagtgggggcaggtcgattcttgcacaaggtgggctcttcactgagccataagggacagggaggtatgggagagcgctgggggcccatccccctgtccacccagtgtccactggcctgtccttcagggagcagagcagagcaggtggtggacgggcccagtgctgggtgttttcaccaccatccccccatcccccatctaagaatcctaagaggcaggcgatccctcacctgcttactcactcagcagttacccggcccctgtgctggagataccaagggcatgggtggtccctgcttcgatggccccaaagctgggccagagttaagggaaagaggaggaagtcctaagcagagaagtagcaccattatccccatttaacagaagggaaactgaggctcggcaagcataggcgagttggcagtggaacacggatctaaactcaggtgtgtccaagtcctcccaaaggacagcagtgatggagaggaccccagccagctgtgtgacagctggttgttgctgacttcattttccaatccggagaaggggctctgtccacagtcccccgccgccaggtggcccacatgggaccagcatgggggcaggttatctgttggcctgaagagtgaaacctgtaccaggccaaaggtgagggcgtgagtgagggcaggagtgtttatggcagagtgaagttctgtgcccaccacaagaggctgtgagatgttctgaccctcacccactgtccaccaaaagcctctcctgctgatgggcactaggagacctcagggtactgcccatctgtttctcctcgggtgccagccagctgctggtgatcctcagccggagggcagggtaccaggtaagcttaactccatcttgggtgtttgtgacaggccctgcctgccaccctaggcagggaaagctgtcaagactcctgccaggaatggggggtgctgagtcatctcacgaagaatccctcactcttcccgggttcagcccagaagcccttccaggcatgatcttccccatcaggctgggctctggcagggacctgcccaggatggagatgagagagggtgagagatggagggcgagatttggatgggacccagggctcctgactctgccctggaaggttcatggggaaactcgctccttctgttggcagaggacagcccctggggaaccccaggcccaactctgtccggtatcccttttcctcccagctgccctcccctacttctcccttgctcccaaagctttccttggagaagggccctcctgcagctggaccctgcagggtggctccctcctccccatcaagcacaagagagggcccaggaaaaaaggtttcacataagtgtagagtcgcaaggacgcttagagtcggcagagtctggggtagggagacagcgacttgtccaaggtcaagcacagagggagaggttcaggagtcaggtcttctgccttctgagttggctcatcctgggcagtcacagactgtcctgcctgcacggctcctatccacctgggggtgtcgcagttgaggggctaattcccaggggactgacgttagttccctactccatccttccctggtgattcttgatcttcaaagcctcggggatcccaggtttccccatgtaactgagacaccctgcctgttagccctgggagacccctaaccttggcccaagacccctttgattctctaaggagcacgaaagggggaatgcccctcccaggagtttatgggagaagggactgggccggctgcctcccagcgatgcacttgacctgacactccccatgtcctggtgcgcacagcccttgtcggtgccccggcccctcccgcagcgttactgcctgtgtatagtataaatatatatattttctatatataagatgtataatataaggctccacaaatatatctgtgtgtgtgtgtgcgtgtgtgtgcggtgaagggcggtccccatcctgggcccccactctagacccccccaccacctggttaagtctcgagtgaatccagtggccccgtggcaccctcctttatgacatccatccatctgtggtgaaccaagtgaaggtggtgacttctggtgacatagtaataaagtgaagactcagaacccaccagcgattgcaa

SEQ ID NO: 187984 - DNA, 1295 bp, Homo sapiens
  Payload ID: 16995
  Gene Symbol: SYNGR1
  Gene Name: synaptogyrin 1
  Uniprot ID: O43759
  ENST ID: ENST00000381535
  CDS Start-End: 26-604
ccagcaggcatgcctccttggtctcatgttgaccttagagtttgggattctggaattcgatccttcatggataggcagctggacacagaggtcgtgggtgagctggaggagcaggcccggatgtgagctgttctccatagtggtgttcggctccatcgtgaacgagggctacctcaacagcgcctccgagggggaggagttctgcatctacaaccgcaaccccaacgcctgcagctatggcgtggccgtgggcgtgctcgccttcctcacctgcctgctgtacctggccctggacgtgtacttcccgcagatcagcagcgtcaaggaccgcaagaaagccgtcctgtccgacatcggtgtctcggccttctgggctttcctctggttcgtgggattctgctacctggccaaccagtggcaggtctccaagcccaaggacaacccactgaacgaagggacggacgcagcccgggccgccatcgccttctcctttttctccatcttcacctggagcctgaccgcagccctggccgtgcggagattcaaggacctaagcttccaggaggagtacagcacactgttccctgcctcggcacagccgtaggcctccccggcttgcagaggccggcagccctgtatcacccctggcagtgaggtggcaggagcagcctagtgccagaaatgtccaagatgccagggcatgcagggcagtggaaggctggcttgaggaaccaattcaggttctccactgactcattcattccttcaccgcctccttcattgattcttcatgcgttcattcattcagtaaacatttattgagcagctgttttgtgcctagtgatgaattaggtggggtccttggctccaggagcccacaggctggggaggagaaaacaaacacatcaatatctcttccaaatggacagccgtggacagttaccaggtaggtagcggccccatacatgggctgcctagaggcgttcatggtccccattgctgagctgtgggtgcagagcaatagcctctcccttcacagcggtgtgaagagtgacctcactgtccttagggttagcatcctggccgaggatgtcacagggctcctggtctggctctgtcctcatgtgctatgtgaccctgacaaacccgtgcacctctctcagcctcagtccacttacctgaactgaggggtgataatggaccaacctctcaaggctgttgtgccaatgaaacaaaggccagcccagggcttagcacaagcatgctcaataaatgtaagctcttttgttcattca

SEQ ID NO: 187985 - DNA, 564 bp, Homo sapiens
  Payload ID: 16995
  Gene Symbol: SYNGR1
  Gene Name: synaptogyrin 1
  ENST ID: ENST00000406293
  CDS Start-End: 21-530
accgcgcgggtgcagccacgatggaagggggtgcgtacggagcgggcaaagccgggggcgccttcgacccctacaccctggtccggcagccgcacaccatcctgcgcgtcgtgtcttggctgttctccatagtggtgttcggctccatcgtgaacgagggctacctcaacagcgcctccgagggggaggagttctgcatctacaaccgcaaccccaacgcctgcagctatggcgtggccgtgggcgtgctcgccttcctcacctgcctgctgtacctggccctggacgtgtacttcccgcagatcagcagcgtcaaggaccgcaagaaagccgtcctgtccgacatcggtgtctcggccttctgggctttcctctggttcgtgggattctgctacctggccaaccagtggcaggtctccaagcccaaggacaacccactgaacgaagggacggacgcagcccgggccgccatcgccttctcctttttctccatcttcacctggagatctggggccacatcacctccatagccccatcccaagagccctccccataacccacagc

SEQ ID NO: 187986 - DNA, 928 bp, Homo sapiens
  Payload ID: 16995
  Gene Symbol: SYNGR1
  Gene Name: synaptogyrin 1
  ENST ID: ENST00000415332
  CDS Start-End: 25-459
gggcaccgcgcgggtgcagccacgatggaagggggtgcgtacggagcgggcaaagccgggggcgccttcgacccctacaccctggtccggcagccgcacaccatcctgcgcgtcgtgtcttggctgttctccatagtggtgttcggctccatcgtgaacgagggctacctcaacagcgcctccgagggggaggagttctgcatctacaaccgcaaccccaacgcctgcagctatggcgtggccgtgggcgtgctcgccttcctcacctgcctgctgtacctggccctggacgtgtacttcccgcagatcagcagcgtcaaggaccgcaagaaagccgtcctgtccgacatcggtgtctcgggtgagccccacccagcaggtaccccctgcacagagtctacagagggctgtcccggccataggaggcggctgccacccttcttcccatgtttcagatgaggaaatgagccttctgggctttcctctggttcgtgggattctgctacctggccaaccagtggcaggtctccaagcccaaggacaacccactgaacgaagggacggacgcagcccgggccgccatcgccttctcctttttctccatcttcacctggagcctgaccgcagccctggccgtgcggagattcaaggacctaagcttccaggaggagtacagcacactgttccctgcctcggcacagccgtaggcctccccggcttgcagaggccggcagccctgtatcacccctggcagtgaggtggcaggagcagcctagtgccagaaatgtccaagatgccagggcatgcagggcagtggaaggctggcttgaggaaccaattcaggttctccactgactcattcattccttcaccgcctccttcattgattcttcatgcgttcattcattcagtaaacatttattgagca

SEQ ID NO: 187987 - DNA, 2325 bp, Homo sapiens
  Payload ID: 16996
  Gene Symbol: SYNGR2
  Gene Name: synaptogyrin 2
  Uniprot ID: O43760
  ENST ID: ENST00000225777
  CDS Start-End: 60-734
cggggcgccgggcaggttcctctgcgttccgcggcggcggcagcggcggcgacggcgacatggagagcggggcctacggcgcggccaaggcgggcggctccttcgacctgcggcgcttcctgacgcagccgcaggtggtggcgcgcgccgtgtgcttggtcttcgccttgatcgtgttctcctgcatctatggtgagggctacagcaatgcccacgagtctaagcagatgtactgcgtgttcaaccgcaacgaggatgcctgccgctatggcagtgccatcggggtgctggccttcctggcctcggccttcttcttggtggtcgacgcgtatttcccccagatcagcaacgccactgaccgcaagtacctggtcattggtgacctgctcttctcagctctctggaccttcctgtggtttgttggtttctgcttcctcaccaaccagtgggcagtcaccaacccgaaggacgtgctggtgggggccgactctgtgagggcagccatcaccttcagcttcttttccatcttctcctggggtgtgctggcctccctggcctaccagcgctacaaggctggcgtggacgacttcatccagaattacgttgaccccactccggaccccaacactgcctacgcctcctacccaggtgcatctgtggacaactaccaacagccacccttcacccagaacgcggagaccaccgagggctaccagccgccccctgtgtactgagcggcggttagcgtgggaagggggacagagagggccctcccctctgccctggactttcccatgagcctcctggaactgccagcccctctctttcacctgttccatcctgtgcagctgacacacagctaaggagcctcatagcctggcgggggctggcagagccacaccccaagtgcctgtgcccagagggcttcagtcagccgctcactcctccagggcacttttaggaaagggtttttagctagtgtttttcctcgcttttaatgacctcagccccgcctgcagtggctagaagccagcaggtgcccatgtgctactgacaagtgcctcagcttccccccggcccgggtcaggccgtgggagccgctattatctgcgttctctgccaaagactcgtgggggccatcacacctgccctgtgcagcggagccggaccaggctcttgtgtcctcactcaggtttgcttcccctgtgcccactgctgtatgatctgggggccaccaccctgtgccggtggcctctgggctgcctcccgtggtgtgagggcggggctggtgctcatggcacttcctccttgctcccacccctggcagcagggaagggctttgcctgacaacacccagctttatgtaaatattctgcagttgttacttaggaagcctggggagggcaggggtgccccatggctcccagactctgtctgtgccgagtgtattataaaatcgtgggggagatgcccggcctgggatgctgtttggagacggaataaatgttttctcattcagtctccagtcattggttgagccacagcctaggggttggaggaagactccactctgggtacacccttaggggctggctttatggaacttgtagtttgaacaaggcagtggcaatccgccccctccagcctgcctggctggcccccttccctctgtctggggtcgcattccgcacaagcctttcatcaacatcttaaaatagtaactgtgctcagcttgtaaacaagatgatttttctggcctgcagtgccagggtcctgctgctcccttcctagagtgggggtgggggtacctgggagttgtcggtgaatgcccctttcttgcactgaataggggtaccataggtaagaccaggtttctaccttcctccagggtcagcacctctggagccttcctgggacacggccttggccgtccagcccacccctcggagataaggcccatctctggaagaggtcaaggccctaaagcaacttctggcttcttcttttgagcaatgacagagggagctgtcatcggcaagtcccgattgtttaaaaatccccagtacgaactaacagggcactgctcccagcctcacccgatggctttggcttgggacacatcactagcgaaggggagagggaggctggggaggccctgggagtggtgaccctgcctgcacaggacacaccttaccccagcgatgcttgcccccaagtgagctgccaacagcccatctctgaggcacagctgagagatgtcttgactcctgaattaccaagagtttgtttcacaaacaaaacctgacctcacaggcccagcgggca

SEQ ID NO: 187988 - DNA, 2239 bp, Homo sapiens
  Payload ID: 16996
  Gene Symbol: SYNGR2
  Gene Name: synaptogyrin 2
  ENST ID: ENST00000590201
  CDS Start-End: 142-648
ctcggggcaggccacgggtccgccttcccacccgaagttgagggaccccaagatgtaccccctccctgtaaggtcttcgccttgatcgtgttctcctgcatctatggtgagggctacagcaatgcccacgagtctaagcagatgtactgcgtgttcaaccgcaacgaggatgcctgccgctatggcagtgccatcggggtgctggccttcctggcctcggccttcttcttggtggtcgacgcgtatttcccccagatcagcaacgccactgaccgcaagtacctggtcattggtgacctgctcttctcagctctctggaccttcctgtggtttgttggtttctgcttcctcaccaaccagtgggcagtcaccaacccgaaggacgtgctggtgggggccgactctgtgagggcagccatcaccttcagcttcttttccatcttctcctggggtgtgctggcctccctggcctaccagcgctacaaggctggcgtggacgacttcatccagaattacgttgaccccactccggaccccaacactgcctacgcctcctacccaggtgcatctgtggacaactaccaacagccacccttcacccagaacgcggagaccaccgagggctaccagccgccccctgtgtactgagcggcggttagcgtgggaagggggacagagagggccctcccctctgccctggactttcccatgagcctcctggaactgccagcccctctctttcacctgttccatcctgtgcagctgacacacagctaaggagcctcatagcctggcgggggctggcagagccacaccccaagtgcctgtgcccagagggcttcagtcagccgctcactcctccagggcacttttaggaaagggtttttagctagtgtttttcctcgcttttaatgacctcagccccgcctgcagtggctagaagccagcaggtgcccatgtgctactgacaagtgcctcagcttccccccggcccgggtcaggccgtgggagccgctattatctgcgttctctgccaaagactcgtgggggccatcacacctgccctgtgcagcggagccggaccaggctcttgtgtcctcactcaggtttgcttcccctgtgcccactgctgtatgatctgggggccaccaccctgtgccggtggcctctgggctgcctcccgtggtgtgagggcggggctggtgctcatggcacttcctccttgctcccacccctggcagcagggaagggctttgcctgacaacacccagctttatgtaaatattctgcagttgttacttaggaagcctggggagggcaggggtgccccatggctcccagactctgtctgtgccgagtgtattataaaatcgtgggggagatgcccggcctgggatgctgtttggagacggaataaatgttttctcattcagtctccagtcattggttgagccacagcctaggggttggaggaagactccactctgggtacacccttaggggctggctttatggaacttgtagtttgaacaaggcagtggcaatccgccccctccagcctgcctggctggcccccttccctctgtctggggtcgcattccgcacaagcctttcatcaacatcttaaaatagtaactgtgctcagcttgtaaacaagatgatttttctggcctgcagtgccagggtcctgctgctcccttcctagagtgggggtgggggtacctgggagttgtcggtgaatgcccctttcttgcactgaataggggtaccataggtaagaccaggtttctaccttcctccagggtcagcacctctggagccttcctgggacacggccttggccgtccagcccacccctcggagataaggcccatctctggaagaggtcaaggccctaaagcaacttctggcttcttcttttgagcaatgacagagggagctgtcatcggcaagtcccgattgtttaaaaatccccagtacgaactaacagggcactgctcccagcctcacccgatggctttggcttgggacacatcactagcgaaggggagagggaggctggggaggccctgggagtggtgaccctgcctgcacaggacacaccttaccccagcgatgcttgcccccaagtgagctgccaacagcccatctctgaggcacagctgagagatgtcttgactcctgaattaccaagagtttgtttcacaaacaaaacctgacctcacaggcccagcgggca

SEQ ID NO: 187989 - DNA, 949 bp, Homo sapiens
  Payload ID: 16996
  Gene Symbol: SYNGR2
  Gene Name: synaptogyrin 2
  Uniprot ID: O43760
  ENST ID: ENST00000585591
  CDS Start-End: 24-698
gcggcagcggcggcgacggcgacatggagagcggggcctacggcgcggccaaggcgggcggctccttcgacctgcggcgcttcctgacgcagccgcaggtggtggcgcgcgccgtgtgcttggtcttcgccttgatcgtgttctcctgcatctatggtgagggctacagcaatgcccacgagtctaagcagatgtactgcgtgttcaaccgcaacgaggatgcctgccgctatggcagtgccatcggggtgctggccttcctggcctcggccttcttcttggtggtcgacgcgtatttcccccagatcagcaacgccactgaccgcaagtacctggtcattggtgacctgctcttctcagctctctggaccttcctgtggtttgttggtttctgcttcctcaccaaccagtgggcagtcaccaacccgaaggacgtgctggtgggggccgactctgtgagggcagccatcaccttcagcttcttttccatcttctcctggggtgtgctggcctccctggcctaccagcgctacaaggctggcgtggacgacttcatccagaattacgttgaccccactccggaccccaacactgcctacgcctcctacccaggtgcatctgtggacaactaccaacagccacccttcacccagaacgcggagaccaccgagggctaccagccgccccctgtgtactgagcggcgggtcagcacctctggagccttcctgggacacggccttggccgtccagcccacccctcggagataaggcccatctctggaagaggtcaaggccctaaagcaacttctggcttcttcttttgagcaatgacagagggagctgtcatcggcaagtcccgattgtttaaaaatccccagtacgaactaacagggcactgctcccagcctcacccgatggctttggcttgggacacatcactagcgaagg

SEQ ID NO: 187990 - DNA, 2041 bp, Homo sapiens
  Payload ID: 16996
  Gene Symbol: SYNGR2
  Gene Name: synaptogyrin 2
  ENST ID: ENST00000589711
  CDS Start-End: 14-211
cggcgacggcgacatggagagcggggcctacggcgcggccaaggcgggcggctccttcgacctgcggcgcttcctgacgcagccgcaggtggtggcgcgcgccgtgtgcttgctctctggaccttcctgtggtttgttggtttctgcttcctcaccaaccagtgggcagtcaccaacccgaaggacgtgctggtgggggccgactctgtgagggcagccatcaccttcagcttcttttccatcttctcctggggtgtgctggcctccctggcctaccagcgctacaaggctggcgtggacgacttcatccagaattacgttgaccccactccggaccccaacactgcctacgcctcctacccaggtgcatctgtggacaactaccaacagccacccttcacccagaacgcggagaccaccgagggctaccagccgccccctgtgtactgagcggcggttagcgtgggaagggggacagagagggccctcccctctgccctggactttcccatgagcctcctggaactgccagcccctctctttcacctgttccatcctgtgcagctgacacacagctaaggagcctcatagcctggcgggggctggcagagccacaccccaagtgcctgtgcccagagggcttcagtcagccgctcactcctccagggcacttttaggaaagggtttttagctagtgtttttcctcgcttttaatgacctcagccccgcctgcagtggctagaagccagcaggtgcccatgtgctactgacaagtgcctcagcttccccccggcccgggtcaggccgtgggagccgctattatctgcgttctctgccaaagactcgtgggggccatcacacctgccctgtgcagcggagccggaccaggctcttgtgtcctcactcaggtttgcttcccctgtgcccactgctgtatgatctgggggccaccaccctgtgccggtggcctctgggctgcctcccgtggtgtgagggcggggctggtgctcatggcacttcctccttgctcccacccctggcagcagggaagggctttgcctgacaacacccagctttatgtaaatattctgcagttgttacttaggaagcctggggagggcaggggtgccccatggctcccagactctgtctgtgccgagtgtattataaaatcgtgggggagatgcccggcctgggatgctgtttggagacggaataaatgttttctcattcagtctccagtcattggttgagccacagcctaggggttggaggaagactccactctgggtacacccttaggggctggctttatggaacttgtagtttgaacaaggcagtggcaatccgccccctccagcctgcctggctggcccccttccctctgtctggggtcgcattccgcacaagcctttcatcaacatcttaaaatagtaactgtgctcagcttgtaaacaagatgatttttctggcctgcagtgccagggtcctgctgctcccttcctagagtgggggtgggggtacctgggagttgtcggtgaatgcccctttcttgcactgaataggggtaccataggtaagaccaggtttctaccttcctccagggtcagcacctctggagccttcctgggacacggccttggccgtccagcccacccctcggagataaggcccatctctggaagaggtcaaggccctaaagcaacttctggcttcttcttttgagcaatgacagagggagctgtcatcggcaagtcccgattgtttaaaaatccccagtacgaactaacagggcactgctcccagcctcacccgatggctttggcttgggacacatcactagcgaaggggagagggaggctggggaggccctgggagtggtgaccctgcctgcacaggacacaccttaccccagcgatgcttgcccccaagtgagctgccaacagcccatctctgaggcacagctgagagatgtcttgactcctgaattaccaagagtttgtttcacaaacaaaacctgacctcacaggcccagcgggca

SEQ ID NO: 187991 - DNA, 2125 bp, Homo sapiens
  Payload ID: 16996
  Gene Symbol: SYNGR2
  Gene Name: synaptogyrin 2
  ENST ID: ENST00000589168
  CDS Start-End: 1-407
tggagagcggggcctacggcgcggccaaggcgggcggctccttcgacctgcggcgcttcctgacgcagccgcaggtggtggcgcgcgccgtgtgcttggtcttcgccttgatcgtgttctcctgcatctatggtgagggctacagcaatgcccacgagtctaagcagatgtactgcgtgttcaaccgcaacgaggatgcctgccgctatggcagtgccatcggggtgctggccttcctggcctcggccttcttcttggtggtcgacgcgtatttcccccagatcagcaacgccactgaccgcaagtacctggtcattggtgacctgctcttctcagggtgtgctggcctccctggcctaccagcgctacaaggctggcgtggacgacttcatccagaattacgttgaccccactccggaccccaacactgcctacgcctcctacccaggtgcatctgtggacaactaccaacagccacccttcacccagaacgcggagaccaccgagggctaccagccgccccctgtgtactgagcggcggttagcgtgggaagggggacagagagggccctcccctctgccctggactttcccatgagcctcctggaactgccagcccctctctttcacctgttccatcctgtgcagctgacacacagctaaggagcctcatagcctggcgggggctggcagagccacaccccaagtgcctgtgcccagagggcttcagtcagccgctcactcctccagggcacttttaggaaagggtttttagctagtgtttttcctcgcttttaatgacctcagccccgcctgcagtggctagaagccagcaggtgcccatgtgctactgacaagtgcctcagcttccccccggcccgggtcaggccgtgggagccgctattatctgcgttctctgccaaagactcgtgggggccatcacacctgccctgtgcagcggagccggaccaggctcttgtgtcctcactcaggtttgcttcccctgtgcccactgctgtatgatctgggggccaccaccctgtgccggtggcctctgggctgcctcccgtggtgtgagggcggggctggtgctcatggcacttcctccttgctcccacccctggcagcagggaagggctttgcctgacaacacccagctttatgtaaatattctgcagttgttacttaggaagcctggggagggcaggggtgccccatggctcccagactctgtctgtgccgagtgtattataaaatcgtgggggagatgcccggcctgggatgctgtttggagacggaataaatgttttctcattcagtctccagtcattggttgagccacagcctaggggttggaggaagactccactctgggtacacccttaggggctggctttatggaacttgtagtttgaacaaggcagtggcaatccgccccctccagcctgcctggctggcccccttccctctgtctggggtcgcattccgcacaagcctttcatcaacatcttaaaatagtaactgtgctcagcttgtaaacaagatgatttttctggcctgcagtgccagggtcctgctgctcccttcctagagtgggggtgggggtacctgggagttgtcggtgaatgcccctttcttgcactgaataggggtaccataggtaagaccaggtttctaccttcctccagggtcagcacctctggagccttcctgggacacggccttggccgtccagcccacccctcggagataaggcccatctctggaagaggtcaaggccctaaagcaacttctggcttcttcttttgagcaatgacagagggagctgtcatcggcaagtcccgattgtttaaaaatccccagtacgaactaacagggcactgctcccagcctcacccgatggctttggcttgggacacatcactagcgaaggggagagggaggctggggaggccctgggagtggtgaccctgcctgcacaggacacaccttaccccagcgatgcttgcccccaagtgagctgccaacagcccatctctgaggcacagctgagagatgtcttgactcctgaattaccaagagtttgtttcacaaacaaaacctgacctcacaggcccagcgggca

SEQ ID NO: 187992 - DNA, 796 bp, Homo sapiens
  Payload ID: 16996
  Gene Symbol: SYNGR2
  Gene Name: synaptogyrin 2
  ENST ID: ENST00000589183
  CDS Start-End: 16-357
ggcggcgacggcgacatggagagcggggcctacggcgcggccaaggcgggcggctccttcgacctgcggcgcttcctgacgcagccgcaggtggtggcgcgcgccgtgtgcttggaggcagaggatgcagtgagccgagatcgcactattgcactccagcctgggcaacaagagcaagactccatctcaaacaacaacaaaaacccaaaaggggacagcagtagtgggagaggccagcatctgtacaccccatcagggtccccgctgtgtgtgcccctcaggcggccaccagccctaccaggtcctcccctcccggcaggtcttcgccttgatcgtgttctcctgcatctatggtgagggctacagcaatgcccacgagtctaagcagatgtactgcgtgttcaaccgcaacgaggatgcctgccgctatggcagtgccatcggggtgctggccttcctggcctcggccttcttcttggtggtcgacgcgtatttcccccagatcagcaacgccactgaccgcaagtacctggtcattggtgacctgctcttctcagggtgtgctggcctccctggcctaccagcgctacaaggctggcgtggacgacttcatccagaattacgttgaccccactccggaccccaacactgcctacgcctcctacccaggtgcatctgtggacaactaccaacagccacccttcacccagaacgcggagaccaccgagggctaccagccgccccctgtgtactgagcggcggttagcgtgggaagggggacagagagggccctccc

SEQ ID NO: 187993 - DNA, 1553 bp, Homo sapiens
  Payload ID: 16996
  Gene Symbol: SYNGR2
  Gene Name: synaptogyrin 2
  Uniprot ID: O43760
  ENST ID: ENST00000588282
  CDS Start-End: 7-834
ggcgacatggagagcggggcctacggcgcggccaaggcgggcggctccttcgacctgcggcgcttcctgacgcagccgcaggtggtggcgcgcgccgtgtgcttggtcttcgccttgatcgtgttctcctgcatctatggtgagggctacagcaatgcccacgagtctaagcagatgtactgcgtgttcaaccgcaacgaggatgcctgccgctatggcagtgccatcggggtgctggccttcctggcctcggccttcttcttggtggtcgacgcgtatttcccccagatcagcaacgccactgaccgcaagtacctggtcattggtgacctgctcttctcagctctctggaccttcctgtggtttgttggtttctgcttcctcaccaaccagtgggcagtcaccaacccgaaggacgtgctggtgggggccgactctgtgagggcagccatcaccttcagcttcttttccatcttctcctgggtaggatggccaggggccggttcttgggtcaagggtggtggagggtggggtcccccacccacctgtaccctgctgtgctccccctgcagggtgtgctggcctccctggcctaccagcgctacaaggctggcgtggacgacttcatccagaattacgttgaccccactccggaccccaacactgcctacgcctcctacccaggtgcatctgtggacaactaccaacagccacccttcacccagaacgcggagaccaccgagggctaccagccgccccctgtgtactgagcggcggttagcgtgggaagggggacagagagggccctcccctctgccctggactttcccatgagcctcctggaactgccagcccctctctttcacctgttccatcctgtgcagctgacacacagctaaggagcctcatagcctggcgggggctggcagagccacaccccaagtgcctgtgcccagagggcttcagtcagccgctcactcctccagggcacttttaggaaagggtttttagctagtgtttttcctcgcttttaatgacctcagccccgcctgcagtggctagaagccagcaggtgcccatgtgctactgacaagtgcctcagcttccccccggcccgggtcaggccgtgggagccgctattatctgcgttctctgccaaagactcgtgggggccatcacacctgccctgtgcagcggagccggaccaggctcttgtgtcctcactcaggtttgcttcccctgtgcccactgctgtatgatctgggggccaccaccctgtgccggtggcctctgggctgcctcccgtggtgtgagggcggggctggtgctcatggcacttcctccttgctcccacccctggcagcagggaagggctttgcctgacaacacccagctttatgtaaatattctgcagttgttacttaggaagcctggggagggcaggggtgccccatggctcccagactctgtctgtgccgagtgtattataaaatcgtgggggagatgcccggcctgggatgctgtttggagacggaataaatgttttctcattc

SEQ ID NO: 187994 - DNA, 2051 bp, Homo sapiens
  Payload ID: 16997
  Gene Symbol: SYNGR3
  Gene Name: synaptogyrin 3
  Uniprot ID: O43761
  ENST ID: ENST00000248121
  CDS Start-End: 159-848
cgccgcggccggcgcgcgctcccgggaggcggcagcggctgcagcgttggtagcatcagcatcagcatcagcggcagcggcagcggcctcgggcggggccggccggacggacaggcggacagaaggcgccaggggcgcgcgtcccgcccgggccggccatggagggcgcctccttcggcgcgggccgcgcaggggccgccctggaccccgtgagctttgcgcggcggccccagaccctgctccgggtcgcgtcctgggtgttctccatcgccgtcttcgggcccatcgtcaacgagggctacgtgaacaccgacagcggccccgagctgcgctgcgtgttcaacgggaacgcgggcgcctgccgcttcggcgtcgcgctgggcctcggagccttcctcgcctgcgccgccttcctgctgctcgatgtgcgcttccagcaaatcagcagcgtccgcgaccgccggcgcgcggtgttgctggacctgggcttctcaggactctggtccttcctgtggttcgtgggcttctgcttcctcaccaatcagtggcagcgcacggcgccagggccggccacgacgcaggcgggggacgcggcgcgggccgccatcgccttcagcttcttctccatcctcagctgggtggcgctcaccgtgaaggccctgcagcggttccgcctgggcaccgacatgtcactcttcgccaccgaacagctgagcaccggggcgagccaggcctaccccggctatccggtgggcagcggcgtggagggcaccgagacctaccagagcccgcccttcaccgagaccctggacaccagccccaaagggtaccaggtgcccgcctactagcggctggcaggcacagaccagggctccaaggccaccccaccaacgcaggccccagggtctccgggacctcccttgggtccttccagctcagtgccgcggacagagtaggtggccgctttgcgccatccggggccaagagggggtggacccgcgtgtctgggctgcccctgccaagttcccccagtccctcagcacctggccccaggactgaggtcctgagaaggggatagcactgcccaggacgtgtgtccctagcctggaatggactggcctggggaaggctttcccctcttgggccacacctgctcactctggggttgggggtccagctgccctctacgatcaggtgcaggggctgcccaggacaaagcgggggcaggggaaagacaccaccctcgccccaagactggggatcctggccactgttcccatcccatgtccctgtgggtagtgactgtctcgtttctgtcatggtggtgcgtcccgtccggagccactctccactttctctcacaggctgctagaacagcccagccctgtcagtgttgtgatcatggtccagtcttcgggtttcacctcctagtactccacaagctgctcctctctctgtggccccggcccctgcccaggtgtgggtggttctggccaggaaggcacaaggtagctgtgggccaagacaccagccctgtcctagcccttcagtaagaccttgccaggagaggagaaggatgcctgggtgccaggcaagacaagcccctcagcaggagagaggcccagaggctccagctggccaccgtgccccacaagatggcccctgtgtggttccctttaccttggcttcctggcccagtccctgcctctccacctgcaccctgcttcctggcccagtcccaggttggagtccctctgcatagctgactactcatgcattgctcaaagctggcttttcacattaagtcaacaccaaacgtggttgccacatttcatcagacagacacctccctctggagatgcagttgagtgacaaccttgttacattgtagcctagaccaattctgtgtggatatttaagtgaacatgtttacaatttttgtatatatcactctctccctctcctgaaagaccagagattgtgtattttcagtgtcccatgttccgactgcaccttctttacaataaagactgtaactgagctgactgtga

SEQ ID NO: 187995 - DNA, 533 bp, Homo sapiens
  Payload ID: 16997
  Gene Symbol: SYNGR3
  Gene Name: synaptogyrin 3
  ENST ID: ENST00000568896
  CDS Start-End: 1-533
agctttgcgcggcggccccagaccctgctccgggtcgcgtcctggcccttactccgtttttcctgttctcgtgacctggaagcagggacggggtggggacggaattctccgaggggcaggagggggctacgggaaccgagaagcgcctccccttcccccgcacacacaccctcgggtctccttggcagggagcctgtcccctggcccccagttccagctgtgttctccatcgccgtcttcgggcccatcgtcaacgagggctacgtgaacaccgacagcggccccgagctgcgctgcgtgttcaacgggaacgcgggcgcctgccgcttcggcgtcgcgctgggcctcggagccttcctcgcctgcgccgccttcctgctgctcgatgtgcgcttccagcaaatcagcagcgtccgcgaccgccggcgcgcggtgttgctggacctgggcttctcaggactctggtccttcctgtggttcgtgggcttctgcttcctcaccaatcagtggcagcgcacggcgccagggccggc

SEQ ID NO: 187996 - DNA, 860 bp, Homo sapiens
  Payload ID: 16997
  Gene Symbol: SYNGR3
  Gene Name: synaptogyrin 3
  ENST ID: ENST00000563869
  CDS Start-End: 142-860
cctacccctttactccctcacccaagtgcccttcccagaggagcggactcctcctgtctgtcctcccggctctagcaaagtctgcgcccagcacccgagccccaccctgcccccggggacctggctggtgggttcctgaggatggtctccatctcgggaccggggcaggcaggtgttctccatcgccgtcttcgggcccatcgtcaacgagggctacgtgaacaccgacagcggccccgagctgcgctgcgtgttcaacgggaacgcgggcgcctgccgcttcggcgtcgcgctgggcctcggagccttcctcgcctgcgccgccttcctgctgctcgatgtgcgcttccagcaaatcagcagcgtccgcgaccgccggcgcgcggtgttgctggacctgggcttctcaggactctggtccttcctgtggttcgtgggcttctgcttcctcaccaatcagtggcagcgcacggcgccagggccggccacgacgcaggcgggggacgcggcgcgggccgccatcgccttcagcttcttctccatcctcagctgggtggcgctcaccgtgaaggccctgcagcggttccgcctgggcaccgacatgtcactcttcgccaccgaacagctgagcaccggggcgagccaggcctaccccggctatccggtgggcagcggcgtggagggcaccgagacctaccagagcccgcccttcaccgagaccctggacaccagccccaaagggtaccaggtgcccgcctactagcggctggcaggcacagaccagggctccaaggccaccccaccaacgcaggccccagggtctccgggacctcccttgggtccttccagctcagtgccgc

SEQ ID NO: 187997 - DNA, 1743 bp, Homo sapiens
  Payload ID: 16997
  Gene Symbol: SYNGR3
  Gene Name: synaptogyrin 3
  ENST ID: ENST00000562045
  CDS Start-End: 1017-1247
ccgtgcagcgctggttaaaatgactgcggtccccctcatgcctgtctcccggaactggtgggcaggaggcattgaggtttgacggaacctcagaggtcaacggtgtcatcttttcagcccaaacacttacaggtgatattaataatcagtcacgtgggggctgtcatccctcgggtacccaccacgtgcaggaagctgggtggacatgtctgtcccagcactgcatgagctgtgcccgtcaccctatttgcatgctagaaaacaggccagacagttcccaaccgcgcaggaagcaacagctccgctgcctccataccctccctcccgccccgctctgcctgctgcactctcacctccccttcgccgttccggctccagcctgggaatcgcgggcccaggtgaaggctcctgttcccacactcttgagtgggctctgaggggactccacgggcccacgcggtgcagagtacctggcttgaatcaaccccggcttttgtcagccatgtgatcccggacaagtcacttcacctgttggggtcccaatgtcccccgcatttataaagagaataagaacaatggcgatcccacggggactttctgaggatttggtgaggggacgcatgtaaagtggctgtttaacacaatgtctgggcatagtagatgctcactaaacggcccgtgttgtcaataattactaaatacgcgagggttcgggaaagaaagaggtgacaccgccccccacccagatacgggcctgggaacgcagggacaggcccaggggcgtgggcgctcgaggcgggctcgcagaggtcgggtcgccgcagggccctgagcgccgcgccgcacgcaggtgttctccatcgccgtcttcgggcccatcgtcaacgagggctacgtgaacaccgacagcggccccgagctgcgctgcgtgttcaacgggaacgcgggcgcctgccgcttcggcgtcgcgctgggcctcggagccttcctcgcctgcgccgccttcctgctgctcgatgtgcgcttccagcaaatcagcagcgtccgcgaccgccggcgcgcggtgttgctggacctgggcttctcaggactctggtccttcctgtggttcgtgggcttctgcttcctcaccaatcagtggcagcgcacggcgccagggccggccacgacgcaggcgggggacgcggcgcgggccgccatcgccttcagcttcttctccatcctcagctgggtggcgctcaccgtgaaggccctgcagcggttccgcctgggcaccgacatgtcactcttcgccaccgaacagctgagcaccggggcgagccaggcctaccccggctatccggtgggcagcggcgtggagggcaccgagacctaccagagcccgcccttcaccgagaccctggacaccagccccaaagggtaccaggtgcccgcctactagcggctggcaggcacagaccagggctccaaggccaccccaccaacgcaggccccagggtctccgggacctcccttgggtccttccagctcagtgccgcggacagagtaggtggccgctttgcgccatccggggccaagagggggtggacccgcgtgtctgggctgcccctgccaagttcccccagtccctcagcacctggccccaggactgaggtcctgagaaggggatagcactgcccaggacgtgtgtccctagcctggaatggactggcctggggaaggctttcccctcttgggccacac

SEQ ID NO: 187998 - DNA, 1213 bp, Homo sapiens
  Payload ID: 16997
  Gene Symbol: SYNGR3
  Gene Name: synaptogyrin 3
  ENST ID: ENST00000618464
  CDS Start-End: 105-542
atcagcatcagcatcagcggcagcggcagcggcctcgggcggggccggccggacggacaggcggacagaaggcgccaggggcgcgcgtcccgcccgggccggccatggagggcgcctccttcggcgcgggccgcgcaggggccgccctggaccccgtgagctttgcgcggcggccccagaccctgctccgggtcgcgtcctgggtgttctccatcgccgtcttcgggcccatcgtcaacgagggctacgtgaacaccgacagcggccccgagctgcgctgcgtgttcaacgggaacgcgggcgcctgccgcttcggcgtcgcgctgggcctcggagccttcctcgcctgcgccgccttcctgctgctcgatgtgcgcttccagcaaagcgggggcaggggaaagacaccaccctcgccccaagactggggatcctggccactgttcccatcccatgtccctgtgggtagtgactgtctcgtttctgtcatggtggtgcgtcccgtccggagccactctccactttctctcacaggctgctagaacagcccagccctgtcagtgttgtgatcatggtccagtcttcgggtttcacctcctagtactccacaagctgctcctctctctgtggccccggcccctgcccaggtgtgggtggttctggccaggaaggcacaaggtagctgtgggccaagacaccagccctgtcctagcccttcagtaagaccttgccaggagaggagaaggatgcctgggtgccaggcaagacaagcccctcagcaggagagaggcccagaggctccagctggccaccgtgccccacaagatggcccctgtgtggttccctttaccttggcttcctggcccagtccctgcctctccacctgcaccctgcttcctggcccagtcccaggttggagtccctctgcatagctgactactcatgcattgctcaaagctggcttttcacattaagtcaacaccaaacgtggttgccacatttcatcagacagacacctccctctggagatgcagttgagtgacaaccttgttacattgtagcctagaccaattctgtgtggatatttaagtgaacatgtttacaatttttgtatatatcactctctccctctcctgaaagaccagagattgtgtattttcagtgtcccatgttccgactgcaccttctttacaataaagactgtaactgagct

SEQ ID NO: 187999 - DNA, 1000 bp, Homo sapiens
  Payload ID: 16998
  Gene Symbol: SYNGR4
  Gene Name: synaptogyrin 4
  Uniprot ID: O95473
  ENST ID: ENST00000344846
  CDS Start-End: 251-955
ggggtggcgaaaggaagggcgggccctcaggtgacgcagattggccctccagagaaggggcggccccttctcaggtgccgtcacccccaaacctcagcactgccattccaggtccttaaaggggagaccgcgattctaagaagcagccaagcccagggctggcctgaagcccccggacggcagtgcccagcaggcagcgcccagcaccctggctcccacctcccagtggccccaaaggaaaacagctgccatgcacatccccaaaagcctccaggagctggccaacagcgaagccgtgcagtttctgagaaggcccaagaccatcacgcgggtcttcgaaggggtcttctccctgatcgtcttctcctccctgctgaccgacggctaccagaacaagatggagtctccgcagctccactgcattctcaacagcaacagcgtggcctgcagctttgccgtgggagccggcttcctggccttcctcagctgcctggccttcctcgtcctggacacacaggagacccgcattgccggcacccgcttcaagacagccttccagctcctggacttcatcctggctgttctctgggcagttgtctggttcatgggtttctgcttcctggccaaccaatggcagcattcgccgcccaaagagttcctcctggggagcagcagtgcccaggcagccatcgccttcaccttcttctccatccttgtctggatattccaggcctacctggcattccaggacctccgaaatgatgctccagtcccttacaagcgcttcctggatgagggtggcatggtgctgaccaccctccccttgccctctgccaacagccctgtgaacatgcccaccactggccccaacagcctgagttatgctagctctgccctgtccccctgtctgaccgctccaaagtccccccggcttgctatgatgcctgacaactaaatatccttatccaaatcaataaagagagaatcctccctccagaag

SEQ ID NO: 188000 - DNA, 533 bp, Homo sapiens
  Payload ID: 16998
  Gene Symbol: SYNGR4
  Gene Name: synaptogyrin 4
  ENST ID: ENST00000595322
  CDS Start-End: 163-387
agtgagggaagcggagactctgcagggcctccaaggccaggcttcagggctgggactcagtcctgaggcactggggagccatgaggggctgtggcagggaggggcagggtcttctccctgatcgtcttctcctccctgctgaccgacggctaccagaacaagatggagtctccgcagctccactgcattctcaacagcaacagcgtggcctgcagctttgccgtgggagccggcttcctggccttcctcagctgcctggccttcctcgtcctggacacacaggagacccgcattgccggcacccgcttcaagacagccttccagctcctggacttcatcctggctgatattccaggcctacctggcattccaggacctccgaaatgatgctccagtcccttacaagcgcttcctggatgagggtggcatggtgctgaccaccctccccttgccctctgccaacagccctgtgaacatgcccaccactggccccaacagcctgagttatgctagctctgccctgtccccctgtc

SEQ ID NO: 188001 - DNA, 365 bp, Homo sapiens
  Payload ID: 16998
  Gene Symbol: SYNGR4
  Gene Name: synaptogyrin 4
  ENST ID: ENST00000600863
  CDS Start-End: 93-365
gggtttggtggcagaaggagagtgtgggggaggcaggggtcttctccctgatcgtcttctcctccctgctgaccgacggctaccagaacaagatggagtctccgcagctccactgcattctcaacagcaacagcgtggcctgcagctttgccgtgggagccggcttcctggccttcctcagctgcctggccttcctcgtcctggacacacaggagacccgcattgccggcacccgcttcaagacagccttccagctcctggacttcatcctggctgttctctgggcagttgtctggttcatgggtttctgcttcctggccaaccaatggcagcattcgccgcccaaagagttcctcctggggagc

SEQ ID NO: 188002 - DNA, 859 bp, Homo sapiens
  Payload ID: 16998
  Gene Symbol: SYNGR4
  Gene Name: synaptogyrin 4
  ENST ID: ENST00000601610
  CDS Start-End: 168-608
ggaagagtgagggaagcggagactctgcagggcctccaaggccaggcttcagggctgggactcagtcctgaggcactggggagccatgaggggctgtggcagggaggggcagggtcttctccctgatcgtcttctcctccctgctgaccgacggctaccagaacaagatggagtctccgcagctccactgcattctcaacagcaacagcgtggcctgcagctttgccgtgggagccggcttcctggccttcctcagctgcctggccttcctcgtcctggacacacaggagacccgcattgccggcacccgcttcaagacagccttccagctcctggacttcatcctggctgttctctgggcagttgtctggttcatgggtttctgcttcctggccaaccaatggcagcattcgccgcccaaagagttcctcctggggagcagcagtgcccaggcagccatcgccttcaccttcttctccatccttgtctgggccagtccccagcccagtccctctcctgacctgcccagcccaagtcagccttcagcacgcgcttttctgcccacagatattccaggcctacctggcattccaggacctccgaaatgatgctccagtcccttacaagcgcttcctggatgagggtggcatggtgctgaccaccctccccttgccctctgccaacagccctgtgaacatgcccaccactggccccaacagcctgagttatgctagctctgccctgtccccctgtctgaccgctccaaagtccccccggcttgctatgatgcctgacaactaaatatccttatccaaatcaataaagagagaatcctccctccagaagggtttctaaaaac

SEQ ID NO: 188003 - DNA, 7059 bp, Homo sapiens
  Payload ID: 16999
  Gene Symbol: SYNJ1
  Gene Name: synaptojanin 1
  Uniprot ID: O43426
  ENST ID: ENST00000357345
  CDS Start-End: 126-4013
aagccggcggggggcggggagctgctgcggccagacccacgggcagccgggcgggcggacgcctccaagaccagtctctgcctccgcagcgtcagcgggagcgggctgcctccgaagaaaggagaatggcgttcagtaaaggattccggatctatcacaaattggatcccccacctttcagcctcatagtggaaactaggcataaggaagaatgtctcatgttcgagtctggggctgtcgctgtgctctcatctgcagaaaaagaggcaatcaagggtacatactccaaagtactggatgcatatggactcttaggtgttctgcggttaaatcttggtgatactatgttacattatctggtcctagtcactggatgtatgtctgttggaaaaattcaagaatctgaagttttccgagttacttccactgagtttatatcactgcgaatcgattcttcagatgaggatcgcatttcagaagtgcggaaagttttgaattcaggaaacttttattttgcatggtctgcatctggcatcagtttagatttgagtcttaatgcgcatcgtagcatgcaagaacagacaactgataatagatttttctggaatcagtctttgcatttgcatctcaaacactatggcgtgaattgtgatgactggttattacgtcttatgtgtggaggagtagaaatcagaacaatttatgctgctcataaacaggcgaaggcttgcctcatttcaagattaagctgtgaacgagctgggaccaggtttaatgtccggggaacaaatgatgatggtcatgttgccaattttgtagaaacagaacaggttgtgtacttagatgactcagtttcttccttcatacaaatccgaggatctgttccattgttctgggagcaaccagggttgcaagtgggatctcatcgtgtccgtatgtcaaggggatttgaagccaatgcacctgcttttgacaggcattttagaacacttaagaacttatatggtaaacaaataatagtaaatttgcttggatctaaggaaggtgaacatatgctaagtaaagctttccagagtcatttgaaagcttctgaacatgctgctgatatccagatggtgaattttgactatcatcaaatggttaagggaggaaaggcagaaaaattacatagtgttcttaaacctcaagtccagaagtttctagattatggatttttttatttcaatggaagtgaagttcaaagatgccagagtggtacagttcgaacaaactgcttggattgtcttgatagaacaaatagtgtgcaggcatttcttggcttagagatgctagctaaacagttggaagctcttggtttagctgaaaagcctcagttggtgactcgctttcaagaagtttttcggtcaatgtggtccgtgaatggtgattcaatcagtaagatatatgcaggaactggagctcttgaagggaaagcgaagttaaaagatggtgctcgctctgttacccgaacaattcagaataacttctttgacagctccaagcaagaggccattgatgttttgctactgggaaatactctgaatagtgatttagctgacaaagctcgagcacttttaactactggaagtttgcgtgtttctgagcagacattacagtcagcatcttctaaagtactaaagagcatgtgtgagaatttctacaaatattcaaagcctaagaaaattcgagtatgtgtcggaacctggaatgtgaatggtgggaagcaatttcgcagcatagcttttaagaatcagacactcactgactggcttcttgatgcacccaagttagctggcatccaggagtttcaagataaaagaagtaagccaactgatatatttgcaattggttttgaagaaatggtagaattgaatgctggaaacattgtgagtgcaagcacaacaaatcagaagctctgggctgtagaacttcagaagacaatctccagagacaacaagtatgtgctgctggcttctgaacagttggtgggcgtctgtttgtttgtttttatcagaccacagcatgctccttttatcagggatgttgcagttgatactgtgaagactggaatgggaggtgcaactggaaataagggagcagttgcaatccgaatgctcttccatacaaccagcctttgcttcgtctgtagccactttgctgcagggcagtcacaagtcaaagaaagaaatgaagattttatagaaatagcacgaaaattgagttttcctatgggaaggatgctattttcccatgactatgtattttggtgtggtgatttcaactatcgaatcgatctccctaacgaagaagttaaagagctcataagacagcaaaattgggattctcttatagcaggagatcaacttatcaatcagaaaaatgctggacaggtttttagaggatttttagaaggaaaggtaacctttgctccgacatataagtatgacttgttttctgacgactatgacaccagtgaaaagtgccgcacccctgcctggacagaccgtgtcctttggagaaggaggaaatggccttttgatagatcagctgaagatctagatcttctaaatgctagttttcaagatgaaagcaaaattctgtacacgtggactccaggcactttgctgcactatggaagagctgagctgaagacttctgaccacaggcctgtcgttgccctgattgatatagatatatttgaagttgaagctgaagagaggcaaaacatttataaagaagtaattgcagttcagggtccaccagatggtacagtattggtctcaatcaaaagttctttaccagaaaataatttttttgatgatgccttgattgatgagcttctgcagcagtttgcaagttttggtgaagttatacttataagatttgtagaagataaaatgtgggttacatttttggagggaagctctgccttgaatgttctgagcctaaatggtaaagagttattgaatcggactataactattgctttaaaaagtccagactggatcaaaaatttggaagaagaaatgagtttagagaaaattagcattgcattgccatcatcaacaagctctaccctgcttggtgaagatgcagaggttgcagcagattttgatatggaaggtgatgttgatgactatagtgctgaagtggaggaacttcttcctcagcatctccagccatcttcaagttccggccttggtacttcccccagctcttcaccccgaactagtccctgccagtcacctacaatatcagagggtcctgtaccttcccttcccatcagaccaagccgagcaccgtcaagaactcctgggcctcccagtgcacagagttctcctattgacgcgcagccagcaacgccgctgccgcagaaagaccccgcccagcccttggagcccaagcggccgccgccgccccgcccggtcgcccctcccacacgcccggctcccccacagagacctcctccgccttcaggggctaggagtcctgcacccactagaaaggaatttggagcacccaaaagccctggaacaacaaggaaagataatataggacgcagtcagccttcacctcaagcaggacttgcaggcccaggacctgctggatacagtacagccagaccgacgattcctcctcgtgctggagttatcagtgccccacagagccacgcgcgggcatctgctggaagactgactcctgaaagccaaagcaaaacatcagaaacgtcgaaaggttcaactttccttcctgaaccactgaagcctcaggctgcttttcctccgcagtcttctttgcccccgcctgctcaaaggttgcaagagcctcttgtccctgtggcagcacctatgcctcagtctggcccccagccaaatttggaaaccccaccacaaccaccacctcgaagcaggtcatcccatagcttgccttcagaagcttcctcacaaccgcaacaggagcaaccatcagggtaacaggtaaaaacaaatggaatctctgatggcaaaagagaatcaccattaaagattgacccatttgaagatctgtcatttaatctgcttgctgtatcaaaggctcagctatctgttcaaacgtcacctgttcccaccccagacccaaagaggttgattcagttgccttctgcaacgcaaagtaatgttttgagttctgtaagttgcatgccaacaatgcctccaattccagctcggagtcaatcccaggaaaatatgcgaagttctccaaacccatttattactggcttgaccaggacaaatcctttcagtgacaggactgctgctcctggaaacccatttagagccaagtctgaagaatcagaggcaacttcatggttctccaaagaagagcccgttactatcagtcctttcccttctctgcagcctcttggtcataacaaaagcagggcttcatcttcacttgatggctttaaggacagttttgatctacagggccagtctacattaaaaattagcaacccgaaaggatgggtaaccttcgaggaagaagaggattttggtgtgaaagggaagtcaaagtcagcttgttcagacttactgggtaatcagccaagttcattttctggctccaacctgacattgaatgatgactggaataaaggtacaaatgtctccttctgtgtgttgccgtcaagaagacctcctccacctcctgtccctctgctcccgcccggcaccagccctccagtagatcctttcacgaccttggcctctaaggcttcacccacactggactttacagaaagataacgccatgcaatagaaaacagtgggtacttgcttttggcaggatagagctaagagaattgggcattagtatttcattatgtgcaataagtcattgtaagtgcactgatatcttcacaaaacaccactatttgatgtgtacagagttggactatgtgtatattggaaataaggaaaaacccttctcattgttaactggagttttgatgtatttctctttggatgaataggagacagtagtagccataaaaagtacttatactttagaaaacagtccttattcagaaacttttcggtcagtcttctgaagaatctcaaaaagcccacccaactttcagctgacatttccaccagccctctcatacttgttaacaattggtatctttgagtatttaccaaagagctgccaaggttacagtgaacagagttttgaaaggcattgctttaaaggaaaaaagtataggtatgtgtacatatataatacatacaaacacatgtacttctgtatacatttacatatttttacaattcatactttaatttctaggctataactcagaccaaattatacctaaaagttccaacaaagtccctttttcaatatcacattaccaaaaagatggctgcaaatgtaatttggacctttcattaattttgttttcaaaactagaataatctcaccacagaatcagaattttctaccgttccacacccaaccccttcaaatacacacaaccttgttacttttcactccagcaccttcatacgcttttctccaggaggaggttcttgcagctggaaacagcctattttgtggtcactgtcaagtggatggatattctagcgctcccaaaaaagcactatggccttatatgcagggaaggcacataccaccaagttcaatgagaaatattagagctaaccgtactctcttctctgcgtacgttcgagtatacgttgcccatatccctcccatattttctttttgctgcttttgctctggaactttgcttttagcagggaaagcagctgtcccctgagtgctttgaattgggaatatacccagtgtgtgttctcccccctcttacgaggctacataacacatctatgatgctgctttaagtttttagaggctatacctcaaagtagctgcggattttgtctcctgcactgccaatatgcaactgatcccgcttttattaattttttgaagaagtacacagaatttttacagaatgtagtattttgatatcattaagtaaaccaatcagaaaactccttgagcaatagttgtttctttgtcagtttcagttacaatcatctttacccattaagacttacattaacattccttttatataaagagttgtatatgtccacctaaattcctatgtccacacttaacctttaaagatgtacattgagggaatatcaaaaaatagcgttcatggctacgaatatgtagaatgttaaaagcacagcaaactgcactgcacttataaagcaaatctattagaaaaaaagcatttttctaaatgctcaaatgttatcaaaatactatatttatagaagtaatcttctctgttaacagccaagatttgctgttagaaataactcttgtgagttttatattgtgctttttggaggttctaatcatttcagcagtagcgtcttaaacagcagtattactataagcagttgcttcaaaatgtgaattaacttgttgaaactgtggctttaacatccatgtgactagtgtatatggtatttgctctccattagcaaaataattcattgttaggtaaacttcactagtgcaaattgcagatctgtgagcaatgtttcctattgaatataaactactgtctaaaatatacatatcagcagcccagcctttatcaggaaaattatacttggcaagttgctgaaaatgcacaaagttatgaaagttaaaggtatgctgcaaataactagccattattctatgtattattaaatatttactagttctgttaaaagcagagcagaagttagacactaaggatctctttgtgaactctgtgttctctatattagattgctgtttatatgtaagaattttattgcttatgtggcatacaatatttataactataaactttatagaagtacagtattaaagtcagtggtacacagacattctgtacatatcctgtgaaacgtgctgtcatatgaaataaatatatctgtctttaccatg

SEQ ID NO: 188004 - DNA, 6958 bp, Homo sapiens
  Payload ID: 16999
  Gene Symbol: SYNJ1
  Gene Name: synaptojanin 1
  ENST ID: ENST00000382491
  CDS Start-End: 118-3912
atgcggaagagatgggcctgctggagcggaagtgacgctcccggcggctgtggcggcggctgcgggagaaggaggaggaggagccggaggaagagggctgcctccgaagaaaggagaatggcgttcagtaaaggattccggatctatcacaaattggatcccccacctttcagcctcatagtggaaactaggcataaggaagaatgtctcatgttcgagtctggggctgtcgctgtgctctcatctgcagaaaaagaggcaatcaagggtacatactccaaagtactggatgcatatggactcttaggtgttctgcggttaaatcttggtgatactatgttacattatctggtcctagtcactggatgtatgtctgttggaaaaattcaagaatctgaagttttccgagttacttccactgagtttatatcactgcgaatcgattcttcagatgaggatcgcatttcagaagtgcggaaagttttgaattcaggaaacttttattttgcatggtctgcatctggcatcagtttagatttgagtcttaatgcgcatcgtagcatgcaagaacagacaactgataatagatttttctggaatcagtctttgcatttgcatctcaaacactatggcgtgaattgtgatgactggttattacgtcttatgtgtggaggagtagaaatcagaacaatttatgctgctcataaacaggcgaaggcttgcctcatttcaagattaagctgtgaacgagctgggaccaggtttaatgtccggggaacaaatgatgatggtcatgttgccaattttgtagaaacagaacaggttgtgtacttagatgactcagtttcttccttcatacaaatccgaggatctgttccattgttctgggagcaaccagggttgcaagtgggatctcatcgtgtccgtatgtcaaggggatttgaagccaatgcacctgcttttgacaggcattttagaacacttaagaacttatatggtaaacaaataatagtaaatttgcttggatctaaggaaggtgaacatatgctaagtaaagctttccagagtcatttgaaagcttctgaacatgctgctgatatccagatggtgaattttgactatcatcaaatggttaagggaggaaaggcagaaaaattacatagtgttcttaaacctcaagtccagaagtttctagattatggatttttttatttcaatggaagtgaagttcaaagatgccagagtggtacagttcgaacaaactgcttggattgtcttgatagaacaaatagtgtgcaggcatttcttggcttagagatgctagctaaacagttggaagctcttggtttagctgaaaagcctcagttggtgactcgctttcaagaagtttttcggtcaatgtggtccgtgaatggtgattcaatcagtaagatatatgcaggaactggagctcttgaagggaaagcgaaggctggaaagttaaaagatggtgctcgctctgttacccgaacaattcagaataacttctttgacagctccaagcaagaggccattgatgttttgctactgggaaatactctgaatagtgatttagctgacaaagctcgagcacttttaactactggaagtttgcgtgcatcttctaaagtactaaagagcatgtgtgagaatttctacaaatattcaaagcctaagaaaattcgagtatgtgtcggaacctggaatgtgaatggtgggaagcaatttcgcagcatagcttttaagaatcagacactcactgactggcttcttgatgcacccaagttagctggcatccaggagtttcaagataaaagaagtaagccaactgatatatttgcaattggttttgaagaaatggtagaattgaatgctggaaacattgtgagtgcaagcacaacaaatcagaagctctgggctgtagaacttcagaagacaatctccagagacaacaagtatgtgctgctggcttctgaacagttggtgggcgtctgtttgtttgtttttatcagaccacagcatgctccttttatcagggatgttgcagttgatactgtgaagactggaatgggaggtgcaactggaaataagggagcagttgcaatccgaatgctcttccatacaaccagcctttgcttcgtctgtagccactttgctgcagggcagtcacaagtcaaagaaagaaatgaagattttatagaaatagcacgaaaattgagttttcctatgggaaggatgctattttcccatgactatgtattttggtgtggtgatttcaactatcgaatcgatctccctaacgaagaagttaaagagctcataagacagcaaaattgggattctcttatagcaggagatcaacttatcaatcagaaaaatgctggacaggtttttagaggatttttagaaggaaaggtaacctttgctccgacatataagtatgacttgttttctgacgactatgacaccagtgaaaagtgccgcacccctgcctggacagaccgtgtcctttggagaaggaggaaatggccttttgatagatcagctgaagatctagatcttctaaatgctagttttcaagatgaaagcaaaattctgtacacgtggactccaggcactttgctgcactatggaagagctgagctgaagacttctgaccacaggcctgtcgttgccctgattgatatagatatatttgaagttgaagctgaagagaggcaaaacatttataaagaagtaattgcagttcagggtccaccagatggtacagtattggtctcaatcaaaagttctttaccagaaaataatttttttgatgatgccttgattgatgagcttctgcagcagtttgcaagttttggtgaagttatacttataagatttgtagaagataaaatgtgggttacatttttggagggaagctctgccttgaatgttctgagcctaaatggtaaagagttattgaatcggactataactattgctttaaaaagtccagactggatcaaaaatttggaagaagaaatgagtttagagaaaattagcattgcattgccatcatcaacaagctctaccctgcttggtgaagatgcagaggttgcagcagattttgatatggaaggtgatgttgatgactatagtgctgaagtggaggaacttcttcctcagcatctccagccatcttcaagttccggccttggtacttcccccagctcttcaccccgaactagtccctgccagtcacctacaatatcagagggtcctgtaccttcccttcccatcagaccaagccgagcaccgtcaagaactcctgggcctcccagtgcacagagttctcctattgacgcgcagccagcaacgccgctgccgcagaaagaccccgcccagcccttggagcccaagcggccgccgccgccccgcccggtcgcccctcccacacgcccggctcccccacagagacctcctccgccttcaggacgcagtcagccttcacctcaagcaggacttgcaggcccaggacctgctggatacagtacagccagaccgacgattcctcctcgtgctggagttatcagtgccccacagagccacgcgcgggcatctgctggaagactgactcctgaaagccaaagcaaaacatcagaaacgtcgaaaggttcaactttccttcctgaaccactgaagcctcaggctgcttttcctccgcagtcttctttgcccccgcctgctcaaaggttgcaagagcctcttgtccctgtggcagcacctatgcctcagtctggcccccagccaaatttggaaaccccaccacaaccaccacctcgaagcaggtcatcccatagcttgccttcagaagcttcctcacaaccgcaacaggagcaaccatcagggtaacaggtaaaaacaaatggaatctctgatggcaaaagagaatcaccattaaagattgacccatttgaagatctgtcatttaatctgcttgctgtatcaaaggctcagctatctgttcaaacgtcacctgttcccaccccagacccaaagaggttgattcagttgccttctgcaacgcaaagtaatgttttgagttctgtaagttgcatgccaacaatgcctccaattccagctcggagtcaatcccaggaaaatatgcgaagttctccaaacccatttattactggcttgaccaggacaaatcctttcagtgacaggactgctgctcctggaaacccatttagagccaagtctgaagaatcagaggcaacttcatggttctccaaagaagagcccgttactatcagtcctttcccttctctgcagcctcttggtcataacaaaagcagggcttcatcttcacttgatggctttaaggacagttttgatctacagggccagtctacattaaaaattagcaacccgaaaggatgggtaaccttcgaggaagaagaggattttggtgtgaaagggaagtcaaagtcagcttgttcagacttactgggtaatcagccaagttcattttctggctccaacctgacattgaatgatgactggaataaaggtacaaatgtctccttctgtgtgttgccgtcaagaagacctcctccacctcctgtccctctgctcccgcccggcaccagccctccagtagatcctttcacgaccttggcctctaaggcttcacccacactggactttacagaaagataacgccatgcaatagaaaacagtgggtacttgcttttggcaggatagagctaagagaattgggcattagtatttcattatgtgcaataagtcattgtaagtgcactgatatcttcacaaaacaccactatttgatgtgtacagagttggactatgtgtatattggaaataaggaaaaacccttctcattgttaactggagttttgatgtatttctctttggatgaataggagacagtagtagccataaaaagtacttatactttagaaaacagtccttattcagaaacttttcggtcagtcttctgaagaatctcaaaaagcccacccaactttcagctgacatttccaccagccctctcatacttgttaacaattggtatctttgagtatttaccaaagagctgccaaggttacagtgaacagagttttgaaaggcattgctttaaaggaaaaaagtataggtatgtgtacatatataatacatacaaacacatgtacttctgtatacatttacatatttttacaattcatactttaatttctaggctataactcagaccaaattatacctaaaagttccaacaaagtccctttttcaatatcacattaccaaaaagatggctgcaaatgtaatttggacctttcattaattttgttttcaaaactagaataatctcaccacagaatcagaattttctaccgttccacacccaaccccttcaaatacacacaaccttgttacttttcactccagcaccttcatacgcttttctccaggaggaggttcttgcagctggaaacagcctattttgtggtcactgtcaagtggatggatattctagcgctcccaaaaaagcactatggccttatatgcagggaaggcacataccaccaagttcaatgagaaatattagagctaaccgtactctcttctctgcgtacgttcgagtatacgttgcccatatccctcccatattttctttttgctgcttttgctctggaactttgcttttagcagggaaagcagctgtcccctgagtgctttgaattgggaatatacccagtgtgtgttctcccccctcttacgaggctacataacacatctatgatgctgctttaagtttttagaggctatacctcaaagtagctgcggattttgtctcctgcactgccaatatgcaactgatcccgcttttattaattttttgaagaagtacacagaatttttacagaatgtagtattttgatatcattaagtaaaccaatcagaaaactccttgagcaatagttgtttctttgtcagtttcagttacaatcatctttacccattaagacttacattaacattccttttatataaagagttgtatatgtccacctaaattcctatgtccacacttaacctttaaagatgtacattgagggaatatcaaaaaatagcgttcatggctacgaatatgtagaatgttaaaagcacagcaaactgcactgcacttataaagcaaatctattagaaaaaaagcatttttctaaatgctcaaatgttatcaaaatactatatttatagaagtaatcttctctgttaacagccaagatttgctgttagaaataactcttgtgagttttatattgtgctttttggaggttctaatcatttcagcagtagcgtcttaaacagcagtattactataagcagttgcttcaaaatgtgaattaacttgttgaaactgtggctttaacatccatgtgactagtgtatatggtatttgctctccattagcaaaataattcattgttaggtaaacttcactagtgcaaattgcagatctgtgagcaatgtttcctattgaatataaactactgtctaaaatatacatatcagcagcccagcctttatcaggaaaattatacttggcaagttgctgaaaatgcacaaagttatgaaagttaaaggtatgctgcaaataactagccattattctatgtattattaaatatttactagttctgttaaaagcagagcagaagttagacactaaggatctctttgtgaactctgtgttctctatattagattgctgtttatatgtaagaattttattgcttatgtggcatacaatatttataactataaactttatagaagtacagtattaaagtcagtggtacacagacattctgtacatatcctgtgaaacgtgctgtcatatgaaataaatatatctgtctttaccatg

SEQ ID NO: 188005 - DNA, 7094 bp, Homo sapiens
  Payload ID: 16999
  Gene Symbol: SYNJ1
  Gene Name: synaptojanin 1
  ENST ID: ENST00000382499
  CDS Start-End: 1-4053
atgcggaagagatgggcctgctggagcggaagtgacgctcccggcggctgtggcggcggctgcgggagaaggaggaggaggagccggaggaagagggctgcctccgaagaaaggagaatggcgttcagtaaaggattccggatctatcacaaattggatcccccacctttcagcctcatagtggaaactaggcataaggaagaatgtctcatgttcgagtctggggctgtcgctgtgctctcatctgcagaaaaagaggcaatcaagggtacatactccaaagtactggatgcatatggactcttaggtgttctgcggttaaatcttggtgatactatgttacattatctggtcctagtcactggatgtatgtctgttggaaaaattcaagaatctgaagttttccgagttacttccactgagtttatatcactgcgaatcgattcttcagatgaggatcgcatttcagaagtgcggaaagttttgaattcaggaaacttttattttgcatggtctgcatctggcatcagtttagatttgagtcttaatgcgcatcgtagcatgcaagaacagacaactgataatagatttttctggaatcagtctttgcatttgcatctcaaacactatggcgtgaattgtgatgactggttattacgtcttatgtgtggaggagtagaaatcagaacaatttatgctgctcataaacaggcgaaggcttgcctcatttcaagattaagctgtgaacgagctgggaccaggtttaatgtccggggaacaaatgatgatggtcatgttgccaattttgtagaaacagaacaggttgtgtacttagatgactcagtttcttccttcatacaaatccgaggatctgttccattgttctgggagcaaccagggttgcaagtgggatctcatcgtgtccgtatgtcaaggggatttgaagccaatgcacctgcttttgacaggcattttagaacacttaagaacttatatggtaaacaaataatagtaaatttgcttggatctaaggaaggtgaacatatgctaagtaaagctttccagagtcatttgaaagcttctgaacatgctgctgatatccagatggtgaattttgactatcatcaaatggttaagggaggaaaggcagaaaaattacatagtgttcttaaacctcaagtccagaagtttctagattatggatttttttatttcaatggaagtgaagttcaaagatgccagagtggtacagttcgaacaaactgcttggattgtcttgatagaacaaatagtgtgcaggcatttcttggcttagagatgctagctaaacagttggaagctcttggtttagctgaaaagcctcagttggtgactcgctttcaagaagtttttcggtcaatgtggtccgtgaatggtgattcaatcagtaagatatatgcaggaactggagctcttgaagggaaagcgaagttaaaagatggtgctcgctctgttacccgaacaattcagaataacttctttgacagctccaagcaagaggccattgatgttttgctactgggaaatactctgaatagtgatttagctgacaaagctcgagcacttttaactactggaagtttgcgtgtttctgagcagacattacagtcagcatcttctaaagtactaaagagcatgtgtgagaatttctacaaatattcaaagcctaagaaaattcgagtatgtgtcggaacctggaatgtgaatggtgggaagcaatttcgcagcatagcttttaagaatcagacactcactgactggcttcttgatgcacccaagttagctggcatccaggagtttcaagataaaagaagtaagccaactgatatatttgcaattggttttgaagaaatggtagaattgaatgctggaaacattgtgagtgcaagcacaacaaatcagaagctctgggctgtagaacttcagaagacaatctccagagacaacaagtatgtgctgctggcttctgaacagttggtgggcgtctgtttgtttgtttttatcagaccacagcatgctccttttatcagggatgttgcagttgatactgtgaagactggaatgggaggtgcaactggaaataagggagcagttgcaatccgaatgctcttccatacaaccagcctttgcttcgtctgtagccactttgctgcagggcagtcacaagtcaaagaaagaaatgaagattttatagaaatagcacgaaaattgagttttcctatgggaaggatgctattttcccatgactatgtattttggtgtggtgatttcaactatcgaatcgatctccctaacgaagaagttaaagagctcataagacagcaaaattgggattctcttatagcaggagatcaacttatcaatcagaaaaatgctggacaggtttttagaggatttttagaaggaaaggtaacctttgctccgacatataagtatgacttgttttctgacgactatgacaccagtgaaaagtgccgcacccctgcctggacagaccgtgtcctttggagaaggaggaaatggccttttgatagatcagctgaagatctagatcttctaaatgctagttttcaagatgaaagcaaaattctgtacacgtggactccaggcactttgctgcactatggaagagctgagctgaagacttctgaccacaggcctgtcgttgccctgattgatatagatatatttgaagttgaagctgaagagaggcaaaacatttataaagaagtaattgcagttcagggtccaccagatggtacagtattggtctcaatcaaaagttctttaccagaaaataatttttttgatgatgccttgattgatgagcttctgcagcagtttgcaagttttggtgaagttatacttataagatttgtagaagataaaatgtgggttacatttttggagggaagctctgccttgaatgttctgagcctaaatggtaaagagttattgaatcggactataactattgctttaaaaagtccagactggatcaaaaatttggaagaagaaatgagtttagagaaaattagcattgcattgccatcatcaacaagctctaccctgcttggtgaagatgcagaggttgcagcagattttgatatggaaggtgatgttgatgactatagtgctgaagtggaggaacttcttcctcagcatctccagccatcttcaagttccggccttggtacttcccccagctcttcaccccgaactagtccctgccagtcacctacaatatcagagggtcctgtaccttcccttcccatcagaccaagccgagcaccgtcaagaactcctgggcctcccagtgcacagagttctcctattgacgcgcagccagcaacgccgctgccgcagaaagaccccgcccagcccttggagcccaagcggccgccgccgccccgcccggtcgcccctcccacacgcccggctcccccacagagacctcctccgccttcaggggctaggagtcctgcacccactagaaaggaatttggaggtattggagcccctcccagtcctggggtagctaggagagagatggaagcacccaaaagccctggaacaacaaggaaagataatataggacgcagtcagccttcacctcaagcaggacttgcaggcccaggacctgctggatacagtacagccagaccgacgattcctcctcgtgctggagttatcagtgccccacagagccacgcgcgggcatctgctggaagactgactcctgaaagccaaagcaaaacatcagaaacgtcgaaaggttcaactttccttcctgaaccactgaagcctcaggctgcttttcctccgcagtcttctttgcccccgcctgctcaaaggttgcaagagcctcttgtccctgtggcagcacctatgcctcagtctggcccccagccaaatttggaaaccccaccacaaccaccacctcgaagcaggtcatcccatagcttgccttcagaagcttcctcacaaccgcaacaggagcaaccatcagggtaacaggtaaaaacaaatggaatctctgatggcaaaagagaatcaccattaaagattgacccatttgaagatctgtcatttaatctgcttgctgtatcaaaggctcagctatctgttcaaacgtcacctgttcccaccccagacccaaagaggttgattcagttgccttctgcaacgcaaagtaatgttttgagttctgtaagttgcatgccaacaatgcctccaattccagctcggagtcaatcccaggaaaatatgcgaagttctccaaacccatttattactggcttgaccaggacaaatcctttcagtgacaggactgctgctcctggaaacccatttagagccaagtctgaagaatcagaggcaacttcatggttctccaaagaagagcccgttactatcagtcctttcccttctctgcagcctcttggtcataacaaaagcagggcttcatcttcacttgatggctttaaggacagttttgatctacagggccagtctacattaaaaattagcaacccgaaaggatgggtaaccttcgaggaagaagaggattttggtgtgaaagggaagtcaaagtcagcttgttcagacttactgggtaatcagccaagttcattttctggctccaacctgacattgaatgatgactggaataaaggtacaaatgtctccttctgtgtgttgccgtcaagaagacctcctccacctcctgtccctctgctcccgcccggcaccagccctccagtagatcctttcacgaccttggcctctaaggcttcacccacactggactttacagaaagataacgccatgcaatagaaaacagtgggtacttgcttttggcaggatagagctaagagaattgggcattagtatttcattatgtgcaataagtcattgtaagtgcactgatatcttcacaaaacaccactatttgatgtgtacagagttggactatgtgtatattggaaataaggaaaaacccttctcattgttaactggagttttgatgtatttctctttggatgaataggagacagtagtagccataaaaagtacttatactttagaaaacagtccttattcagaaacttttcggtcagtcttctgaagaatctcaaaaagcccacccaactttcagctgacatttccaccagccctctcatacttgttaacaattggtatctttgagtatttaccaaagagctgccaaggttacagtgaacagagttttgaaaggcattgctttaaaggaaaaaagtataggtatgtgtacatatataatacatacaaacacatgtacttctgtatacatttacatatttttacaattcatactttaatttctaggctataactcagaccaaattatacctaaaagttccaacaaagtccctttttcaatatcacattaccaaaaagatggctgcaaatgtaatttggacctttcattaattttgttttcaaaactagaataatctcaccacagaatcagaattttctaccgttccacacccaaccccttcaaatacacacaaccttgttacttttcactccagcaccttcatacgcttttctccaggaggaggttcttgcagctggaaacagcctattttgtggtcactgtcaagtggatggatattctagcgctcccaaaaaagcactatggccttatatgcagggaaggcacataccaccaagttcaatgagaaatattagagctaaccgtactctcttctctgcgtacgttcgagtatacgttgcccatatccctcccatattttctttttgctgcttttgctctggaactttgcttttagcagggaaagcagctgtcccctgagtgctttgaattgggaatatacccagtgtgtgttctcccccctcttacgaggctacataacacatctatgatgctgctttaagtttttagaggctatacctcaaagtagctgcggattttgtctcctgcactgccaatatgcaactgatcccgcttttattaattttttgaagaagtacacagaatttttacagaatgtagtattttgatatcattaagtaaaccaatcagaaaactccttgagcaatagttgtttctttgtcagtttcagttacaatcatctttacccattaagacttacattaacattccttttatataaagagttgtatatgtccacctaaattcctatgtccacacttaacctttaaagatgtacattgagggaatatcaaaaaatagcgttcatggctacgaatatgtagaatgttaaaagcacagcaaactgcactgcacttataaagcaaatctattagaaaaaaagcatttttctaaatgctcaaatgttatcaaaatactatatttatagaagtaatcttctctgttaacagccaagatttgctgttagaaataactcttgtgagttttatattgtgctttttggaggttctaatcatttcagcagtagcgtcttaaacagcagtattactataagcagttgcttcaaaatgtgaattaacttgttgaaactgtggctttaacatccatgtgactagtgtatatggtatttgctctccattagcaaaataattcattgttaggtaaacttcactagtgcaaattgcagatctgtgagcaatgtttcctattgaatataaactactgtctaaaatatacatatcagcagcccagcctttatcaggaaaattatacttggcaagttgctgaaaatgcacaaagttatgaaagttaaaggtatgctgcaaataactagccattattctatgtattattaaatatttactagttctgttaaaagcagagcagaagttagacactaaggatctctttgtgaactctgtgttctctatattagattgctgtttatatgtaagaattttattgcttatgtggcatacaatatttataactataaactttatagaagtacagtattaaagtcagtggtacacagacattctgtacatatcctgtgaaacgtgctgtcatatgaaataaatatatctgtcttta

SEQ ID NO: 188006 - DNA, 422 bp, Homo sapiens
  Payload ID: 16999
  Gene Symbol: SYNJ1
  Gene Name: synaptojanin 1
  ENST ID: ENST00000418301
  CDS Start-End: 1-395
aagcaggacttgcaggcccaggacctgctggatacagtacagccagaccgacgattcctcctcgtgctggagttatcagtgccccacagagccacgcgcgggcatctgctggaagactgactcctgaaagccaaagcaaaacatcagaaacgtcgaaaggttcaactttccttcctgaaccactgaagcctcaggctgcttttcctccgcagtcttctttgcccccgcctgctcaaaggttgcaagagcctcttgtccctgtggcagcacctatgcctcagtctggcccccagccaaatttggaaaccccaccacaaccaccacctcgaagcaggtcatcccatagcttgccttcagaagcttcctcacaaccgcaagagcaaccatcagggtaacaggtaaaaacaaatggaatctctgat

SEQ ID NO: 188007 - DNA, 3604 bp, Homo sapiens
  Payload ID: 16999
  Gene Symbol: SYNJ1
  Gene Name: synaptojanin 1
  ENST ID: ENST00000438952
  CDS Start-End: 1-562
gccgccccgcccggtcgcccctcccacacgcccggctcccccacagagacctcctccgccttcaggggctaggagtcctgcacccactagaaaggaatttggagcacccaaaagccctggaacaacaaggaaagataatataggacgcagtcagccttcacctcaagcaggacttgcaggcccaggacctgctggatacagtacagccagaccgacgattcctcctcgtgctggagttatcagtgccccacagagccacgcgcgggcatctgctggaagactgactcctgaaagccaaagcaaaacatcagaaacgtcgaaaggttcaactttccttcctgaaccactgaagcctcaggctgcttttcctccgcagtcttctttgcccccgcctgctcaaaggttgcaagagcctcttgtccctgtggcagcacctatgcctcagtctggcccccagccaaatttggaaaccccaccacaaccaccacctcgaagcaggtcatcccatagcttgccttcagaagcttcctcacaaccgcaacaggagcaaccatcagggtaacaggtaaaaacaaatggaatctctgatggcaaaagagaatcaccattaaagattgacccatttgaagatctgtcatttaatctgcttgctgtatcaaaggctcagctatctgttcaaacgtcacctgttcccaccccagacccaaagaggttgattcagttgccttctgcaacgcaaagtaatgttttgagttctgtaagttgcatgccaacaatgcctccaattccagctcggagtcaatcccaggaaaatatgcgaagttctccaaacccatttattactggcttgaccaggacaaatcctttcagtgacaggactgctgctcctggaaacccatttagagccaagtctgaagaatcagaggcaacttcatggttctccaaagaagagcccgttactatcagtcctttcccttctctgcagcctcttggtcataacaaaagcagggcttcatcttcacttgatggctttaaggacagttttgatctacagggccagtctacattaaaaattagcaacccgaaaggatgggtaaccttcgaggaagaagaggattttggtgtgaaagggaagtcaaagtcagcttgttcagacttactgggtaatcagccaagttcattttctggctccaacctgacattgaatgatgactggaataaaggtacaaatgtctccttctgtgtgttgccgtcaagaagacctcctccacctcctgtccctctgctcccgcccggcaccagccctccagtagatcctttcacgaccttggcctctaaggcttcacccacactggactttacagaaagataacgccatgcaatagaaaacagtgggtacttgcttttggcaggatagagctaagagaattgggcattagtatttcattatgtgcaataagtcattgtaagtgcactgatatcttcacaaaacaccactatttgatgtgtacagagttggactatgtgtatattggaaataaggaaaaacccttctcattgttaactggagttttgatgtatttctctttggatgaataggagacagtagtagccataaaaagtacttatactttagaaaacagtccttattcagaaacttttcggtcagtcttctgaagaatctcaaaaagcccacccaactttcagctgacatttccaccagccctctcatacttgttaacaattggtatctttgagtatttaccaaagagctgccaaggttacagtgaacagagttttgaaaggcattgctttaaaggaaaaaagtataggtatgtgtacatatataatacatacaaacacatgtacttctgtatacatttacatatttttacaattcatactttaatttctaggctataactcagaccaaattatacctaaaagttccaacaaagtccctttttcaatatcacattaccaaaaagatggctgcaaatgtaatttggacctttcattaattttgttttcaaaactagaataatctcaccacagaatcagaattttctaccgttccacacccaaccccttcaaatacacacaaccttgttacttttcactccagcaccttcatacgcttttctccaggaggaggttcttgcagctggaaacagcctattttgtggtcactgtcaagtggatggatattctagcgctcccaaaaaagcactatggccttatatgcagggaaggcacataccaccaagttcaatgagaaatattagagctaaccgtactctcttctctgcgtacgttcgagtatacgttgcccatatccctcccatattttctttttgctgcttttgctctggaactttgcttttagcagggaaagcagctgtcccctgagtgctttgaattgggaatatacccagtgtgtgttctcccccctcttacgaggctacataacacatctatgatgctgctttaagtttttagaggctatacctcaaagtagctgcggattttgtctcctgcactgccaatatgcaactgatcccgcttttattaattttttgaagaagtacacagaatttttacagaatgtagtattttgatatcattaagtaaaccaatcagaaaactccttgagcaatagttgtttctttgtcagtttcagttacaatcatctttacccattaagacttacattaacattccttttatataaagagttgtatatgtccacctaaattcctatgtccacacttaacctttaaagatgtacattgagggaatatcaaaaaatagcgttcatggctacgaatatgtagaatgttaaaagcacagcaaactgcactgcacttataaagcaaatctattagaaaaaaagcatttttctaaatgctcaaatgttatcaaaatactatatttatagaagtaatcttctctgttaacagccaagatttgctgttagaaataactcttgtgagttttatattgtgctttttggaggttctaatcatttcagcagtagcgtcttaaacagcagtattactataagcagttgcttcaaaatgtgaattaacttgttgaaactgtggctttaacatccatgtgactagtgtatatggtatttgctctccattagcaaaataattcattgttaggtaaacttcactagtgcaaattgcagatctgtgagcaatgtttcctattgaatataaactactgtctaaaatatacatatcagcagcccagcctttatcaggaaaattatacttggcaagttgctgaaaatgcacaaagttatgaaagttaaaggtatgctgcaaataactagccattattctatgtattattaaatatttactagttctgttaaaagcagagcagaagttagacactaaggatctctttgtgaactctgtgttctctatattagattgctgtttatatgtaagaattttattgcttatgtggcatacaatatttataactataaactttatagaagtacagtattaaagtcagtggtacacagacattctgtacatatcctgtgaaacgtgctgtcatatgaaataaatatatctgtctttac

SEQ ID NO: 188008 - DNA, 4852 bp, Homo sapiens
  Payload ID: 16999
  Gene Symbol: SYNJ1
  Gene Name: synaptojanin 1
  ENST ID: ENST00000433931
  CDS Start-End: 9-4847
gcggcgcaatgcggaagagatgggcctgctggagcggaagtgacgctcccggcggctgtggcggcggctgcgggagaaggaggaggaggagccggaggaagagggctgcctccgaagaaaggagaatggcgttcagtaaaggattccggatctatcacaaattggatcccccacctttcagcctcatagtggaaactaggcataaggaagaatgtctcatgttcgagtctggggctgtcgctgtgctctcatctgcagaaaaagaggcaatcaagggtacatactccaaagtactggatgcatatggactcttaggtgttctgcggttaaatcttggtgatactatgttacattatctggtcctagtcactggatgtatgtctgttggaaaaattcaagaatctgaagttttccgagttacttccactgagtttatatcactgcgaatcgattcttcagatgaggatcgcatttcagaagtgcggaaagttttgaattcaggaaacttttattttgcatggtctgcatctggcatcagtttagatttgagtcttaatgcgcatcgtagcatgcaagaacagacaactgataatagatttttctggaatcagtctttgcatttgcatctcaaacactatggcgtgaattgtgatgactggttattacgtcttatgtgtggaggagtagaaatcagaacaatttatgctgctcataaacaggcgaaggcttgcctcatttcaagattaagctgtgaacgagctgggaccaggtttaatgtccggggaacaaatgatgatggtcatgttgccaattttgtagaaacagaacaggttgtgtacttagatgactcagtttcttccttcatacaaatccgaggatctgttccattgttctgggagcaaccagggttgcaagtgggatctcatcgtgtccgtatgtcaaggggatttgaagccaatgcacctgcttttgacaggcattttagaacacttaagaacttatatggtaaacaaataatagtaaatttgcttggatctaaggaaggtgaacatatgctaagtaaagctttccagagtcatttgaaagcttctgaacatgctgctgatatccagatggtgaattttgactatcatcaaatggttaagggaggaaaggcagaaaaattacatagtgttcttaaacctcaagtccagaagtttctagattatggatttttttatttcaatggaagtgaagttcaaagatgccagagtggtacagttcgaacaaactgcttggattgtcttgatagaacaaatagtgtgcaggcatttcttggcttagagatgctagctaaacagttggaagctcttggtttagctgaaaagcctcagttggtgactcgctttcaagaagtttttcggtcaatgtggtccgtgaatggtgattcaatcagtaagatatatgcaggaactggagctcttgaagggaaagcgaagttaaaagatggtgctcgctctgttacccgaacaattcagaataacttctttgacagctccaagcaagaggccattgatgttttgctactgggaaatactctgaatagtgatttagctgacaaagctcgagcacttttaactactggaagtttgcgtgtttctgagcagacattacagtcagcatcttctaaagtactaaagagcatgtgtgagaatttctacaaatattcaaagcctaagaaaattcgagtatgtgtcggaacctggaatgtgaatggtgggaagcaatttcgcagcatagcttttaagaatcagacactcactgactggcttcttgatgcacccaagttagctggcatccaggagtttcaagataaaagaagtaagccaactgatatatttgcaattggttttgaagaaatggtagaattgaatgctggaaacattgtgagtgcaagcacaacaaatcagaagctctgggctgtagaacttcagaagacaatctccagagacaacaagtatgtgctgctggcttctgaacagttggtgggcgtctgtttgtttgtttttatcagaccacagcatgctccttttatcagggatgttgcagttgatactgtgaagactggaatgggaggtgcaactggaaataagggagcagttgcaatccgaatgctcttccatacaaccagcctttgcttcgtctgtagccactttgctgcagggcagtcacaagtcaaagaaagaaatgaagattttatagaaatagcacgaaaattgagttttcctatgggaaggatgctattttcccatgactatgtattttggtgtggtgatttcaactatcgaatcgatctccctaacgaagaagttaaagagctcataagacagcaaaattgggattctcttatagcaggagatcaacttatcaatcagaaaaatgctggacaggtttttagaggatttttagaaggaaaggtaacctttgctccgacatataagtatgacttgttttctgacgactatgacaccagtgaaaagtgccgcacccctgcctggacagaccgtgtcctttggagaaggaggaaatggccttttgatagatcagctgaagatctagatcttctaaatgctagttttcaagatgaaagcaaaattctgtacacgtggactccaggcactttgctgcactatggaagagctgagctgaagacttctgaccacaggcctgtcgttgccctgattgatatagatatatttgaagttgaagctgaagagaggcaaaacatttataaagaagtaattgcagttcagggtccaccagatggtacagtattggtctcaatcaaaagttctttaccagaaaataatttttttgatgatgccttgattgatgagcttctgcagcagtttgcaagttttggtgaagttatacttataagatttgtagaagataaaatgtgggttacatttttggagggaagctctgccttgaatgttctgagcctaaatggtaaagagttattgaatcggactataactattgctttaaaaagtccagactggatcaaaaatttggaagaagaaatgagtttagagaaaattagcattgcattgccatcatcaacaagctctaccctgcttggtgaagatgcagaggttgcagcagattttgatatggaaggtgatgttgatgactatagtgctgaagtggaggaacttcttcctcagcatctccagccatcttcaagttccggccttggtacttcccccagctcttcaccccgaactagtccctgccagtcacctacaatatcagagggtcctgtaccttcccttcccatcagaccaagccgagcaccgtcaagaactcctgggcctcccagtgcacagagttctcctattgacgcgcagccagcaacgccgctgccgcagaaagaccccgcccagcccttggagcccaagcggccgccgccgccccgcccggtcgcccctcccacacgcccggctcccccacagagacctcctccgccttcaggggctaggagtcctgcacccactagaaaggaatttggaggtattggagcccctcccagtcctggggtagctaggagagagatggaagcacccaaaagccctggaacaacaaggaaagataatataggacgcagtcagccttcacctcaagcaggacttgcaggcccaggacctgctggatacagtacagccagaccgacgattcctcctcgtgctggagttatcagtgccccacagagccacgcgcgggcatctgctggaagactgactcctgaaagccaaagcaaaacatcagaaacgtcgaaaggttcaactttccttcctgaaccactgaagcctcaggctgcttttcctccgcagtcttctttgcccccgcctgctcaaaggttgcaagagcctcttgtccctgtggcagcacctatgcctcagtctggcccccagccaaatttggaaaccccaccacaaccaccacctcgaagcaggtcatcccatagcttgccttcagaagcttcctcacaaccgcaagtaaaaacaaatggaatctctgatggcaaaagagaatcaccattaaagattgacccatttgaagatctgtcatttaatctgcttgctgtatcaaaggctcagctatctgttcaaacgtcacctgttcccaccccagacccaaagaggttgattcagttgccttctgcaacgcaaagtaatgttttgagttctgtaagttgcatgccaacaatgcctccaattccagctcggagtcaatcccaggaaaatatgcgaagttctccaaacccatttattactggcttgaccaggacaaatcctttcagtgacaggactgctgctcctggaaacccatttagagccaagtctgaagaatcagaggcaacttcatggttctccaaagaagagcccgttactatcagtcctttcccttctctgcagcctcttggtcataacaaaagcagggcttcatcttcacttgatggctttaaggacagttttgatctacagggccagtctacattaaaaattagcaacccgaaaggatgggtaaccttcgaggaagaagaggattttggtgtgaaagggaagtcaaagtcagcttgttcagacttactgggtaatcagccaagttcattttctggctccaacctgacattgaatgatgactggaataaaggtacaaatgtctccttctgtgtgttgccgtcaagaagacctcctccacctcctgtccctctgctcccgcccggcaccagccctccagtagatcctttcacgaccttggcctctaaggcttcacccacactggactttacagaaagataacgcca

SEQ ID NO: 188009 - DNA, 583 bp, Homo sapiens
  Payload ID: 16999
  Gene Symbol: SYNJ1
  Gene Name: synaptojanin 1
  ENST ID: ENST00000456084
  CDS Start-End: 48-583
gctttgctttgcttggttttcgcagggctgcctccgaagaaaggagaatggcgttcagtaaaggattccggatctatcacaaattggatcccccacctttcagcctcatagtggaaactaggcataaggaagaatgtctcatgttcgagtctggggctgtcgctgtgctctcatctgcagaaaaagaggcaatcaagggtacatactccaaagtactggatgcatatggactcttaggtgttctgcggttaaatcttggtgatactatgttacattatctggtcctagtcactggatgtatgtctgttggaaaaattcaagaatctgaagttttccgagttacttccactgagtttatatcactgcgaatcgattcttcagatgaggatcgcatttcagaagtgcggaaagttttgaattcaggaaacttttattttgcatggtctgcatctggcatcagtttagatttgagtcttaatgcgcatcgtagcatgcaagaacagacaactgataatagatttttctggaatcagtctttgcatttgcatctcaaacactatggcgtgaattgtgatgactggtt

SEQ ID NO: 188010 - DNA, 2212 bp, Homo sapiens
  Payload ID: 16999
  Gene Symbol: SYNJ1
  Gene Name: synaptojanin 1
  ENST ID: ENST00000429236
  CDS Start-End: 126-2212
aagccggcggggggcggggagctgctgcggccagacccacgggcagccgggcgggcggacgcctccaagaccagtctctgcctccgcagcgtcagcgggagcgggctgcctccgaagaaaggagaatggcgttcagtaaaggattccggatctatcacaaattggatcccccacctttcagcctcatagtggaaactaggcataaggaagaatgtctcatgttcgagtctggggctgtcgctgtgctctcatctgcagaaaaagaggcaatcaagggtacatactccaaagtactggatgcatatggactcttaggtgttctgcggttaaatcttggtgatactatgttacattatctggtcctagtcactggatgtatgtctgttggaaaaattcaagaatctgaagttttccgagttacttccactgagtttatatcactgcgaatcgattcttcagatgaggatcgcatttcagaagtgcggaaagttttgaattcaggaaacttttattttgcatggtctgcatctggcatcagtttagatttgagtcttaatgcgcatcgtagcatgcaagaacagacaactgataatagatttttctggaatcagtctttgcatttgcatctcaaacactatggcgtgaattgtgatgactggttattacgtcttatgtgtggaggagtagaaatcagaacaatttatgctgctcataaacaggcgaaggcttgcctcatttcaagattaagctgtgaacgagctgggaccaggtttaatgtccggggaacaaatgatgatggtcatgttgccaattttgtagaaacagaacaggttgtgtacttagatgactcagtttcttccttcatacaaatccgaggatctgttccattgttctgggagcaaccagggttgcaagtgggatctcatcgtgtccgtatgtcaaggggatttgaagccaatgcacctgcttttgacaggcattttagaacacttaagaacttatatggtaaacaaataatagtaaatttgcttggatctaaggaaggtgaacatatgctaagtaaagctttccagagtcatttgaaagcttctgaacatgctgctgatatccagatggtgaattttgactatcatcaaatggttaagggaggaaaggcagaaaaattacatagtgttcttaaacctcaagtccagaagtttctagattatggatttttttatttcaatggaagtgaagttcaaagatgccagagtggtacagttcgaacaaactgcttggattgtcttgatagaacaaatagtgtgcaggcatttcttggcttagagatgctagctaaacagttggaagctcttggtttagctgaaaagcctcagttggtgactcgctttcaagaagtttttcggtcaatgtggtccgtgaatggtgattcaatcagtaagatatatgcaggaactggagctcttgaagggaaagcgaaggctggaaagttaaaagatggtgctcgctctgttacccgaacaattcagaataacttctttgacagctccaagcaagaggccattgatgttttgctactgggaaatactctgaatagtgatttagctgacaaagctcgagcacttttaactactggaagtttgcgtgcatcttctaaagtactaaagagcatgtgtgagaatttctacaaatattcaaagcctaagaaaattcgagtatgtgtcggaacctggaatgtgaatggtgggaagcaatttcgcagcatagcttttaagaatcagacactcactgactggcttcttgatgcacccaagttagctggcatccaggagtttcaagataaaagaagtaagccaactgatatatttgcaattggttttgaagaaatggtagaattgaatgctggaaacattgtgagtgcaagcacaacaaatcagaagctctgggctgtagaacttcagaagacaatctccagagacaacaagtatgtgctgctggcttctgaacagttggtgggcgtctgtttgtttgtttttatcagaccacagcatgctccttttatcagggatgttgcagttgatactgtgaagactggaatgggaggtgcaactggaaataagggagcagttgcaatccgaatgctcttccatacaaccagcctttgcttcgtctgtagccactttgctgcagggcagtcacaagtcaaagaaagaaa

SEQ ID NO: 188011 - DNA, 6898 bp, Homo sapiens
  Payload ID: 16999
  Gene Symbol: SYNJ1
  Gene Name: synaptojanin 1
  ENST ID: ENST00000630077
  CDS Start-End: 87-4667
cgggcagccgggcgggcggacgcctccaagaccagtctctgcctccgcagcgtcagcgggagcgggctgcctccgaagaaaggagaatggcgttcagtaaaggattccggatctatcacaaattggatcccccacctttcagcctcatagtggaaactaggcataaggaagaatgtctcatgttcgagtctggggctgtcgctgtgctctcatctgcagaaaaagaggcaatcaagggtacatactccaaagtactggatgcatatggactcttaggtgttctgcggttaaatcttggtgatactatgttacattatctggtcctagtcactggatgtatgtctgttggaaaaattcaagaatctgaagttttccgagttacttccactgagtttatatcactgcgaatcgattcttcagatgaggatcgcatttcagaagtgcggaaagttttgaattcaggaaacttttattttgcatggtctgcatctggcatcagtttagatttgagtcttaatgcgcatcgtagcatgcaagaacagacaactgataatagatttttctggaatcagtctttgcatttgcatctcaaacactatggcgtgaattgtgatgactggttattacgtcttatgtgtggaggagtagaaatcagaacaatttatgctgctcataaacaggcgaaggcttgcctcatttcaagattaagctgtgaacgagctgggaccaggtttaatgtccggggaacaaatgatgatggtcatgttgccaattttgtagaaacagaacaggttgtgtacttagatgactcagtttcttccttcatacaaatccgaggatctgttccattgttctgggagcaaccagggttgcaagtgggatctcatcgtgtccgtatgtcaaggggatttgaagccaatgcacctgcttttgacaggcattttagaacacttaagaacttatatggtaaacaaataatagtaaatttgcttggatctaaggaaggtgaacatatgctaagtaaagctttccagagtcatttgaaagcttctgaacatgctgctgatatccagatggtgaattttgactatcatcaaatggttaagggaggaaaggcagaaaaattacatagtgttcttaaacctcaagtccagaagtttctagattatggatttttttatttcaatggaagtgaagttcaaagatgccagagtggtacagttcgaacaaactgcttggattgtcttgatagaacaaatagtgtgcaggcatttcttggcttagagatgctagctaaacagttggaagctcttggtttagctgaaaagcctcagttggtgactcgctttcaagaagtttttcggtcaatgtggtccgtgaatggtgattcaatcagtaagatatatgcaggaactggagctcttgaagggaaagcgaaggctggaaagttaaaagatggtgctcgctctgttacccgaacaattcagaataacttctttgacagctccaagcaagaggccattgatgttttgctactgggaaatactctgaatagtgatttagctgacaaagctcgagcacttttaactactggaagtttgcgtgcatcttctaaagtactaaagagcatgtgtgagaatttctacaaatattcaaagcctaagaaaattcgagtatgtgtcggaacctggaatgtgaatggtgggaagcaatttcgcagcatagcttttaagaatcagacactcactgactggcttcttgatgcacccaagttagctggcatccaggagtttcaagataaaagaagtaagccaactgatatatttgcaattggttttgaagaaatggtagaattgaatgctggaaacattgtgagtgcaagcacaacaaatcagaagctctgggctgtagaacttcagaagacaatctccagagacaacaagtatgtgctgctggcttctgaacagttggtgggcgtctgtttgtttgtttttatcagaccacagcatgctccttttatcagggatgttgcagttgatactgtgaagactggaatgggaggtgcaactggaaataagggagcagttgcaatccgaatgctcttccatacaaccagcctttgcttcgtctgtagccactttgctgcagggcagtcacaagtcaaagaaagaaatgaagattttatagaaatagcacgaaaattgagttttcctatgggaaggatgctattttcccatgactatgtattttggtgtggtgatttcaactatcgaatcgatctccctaacgaagaagttaaagagctcataagacagcaaaattgggattctcttatagcaggagatcaacttatcaatcagaaaaatgctggacaggtttttagaggatttttagaaggaaaggtaacctttgctccgacatataagtatgacttgttttctgacgactatgacaccagtgaaaagtgccgcacccctgcctggacagaccgtgtcctttggagaaggaggaaatggccttttgatagatcagctgaagatctagatcttctaaatgctagttttcaagatgaaagcaaaattctgtacacgtggactccaggcactttgctgcactatggaagagctgagctgaagacttctgaccacaggcctgtcgttgccctgattgatatagatatatttgaagttgaagctgaagagaggcaaaacatttataaagaagtaattgcagttcagggtccaccagatggtacagtattggtctcaatcaaaagttctttaccagaaaataatttttttgatgatgccttgattgatgagcttctgcagcagtttgcaagttttggtgaagttatacttataagatttgtagaagataaaatgtgggttacatttttggagggaagctctgccttgaatgttctgagcctaaatggtaaagagttattgaatcggactataactattgctttaaaaagtccagactggatcaaaaatttggaagaagaaatgagtttagagaaaattagcattgcattgccatcatcaacaagctctaccctgcttggtgaagatgcagaggttgcagcagattttgatatggaaggtgatgttgatgactatagtgctgaagtggaggaacttcttcctcagcatctccagccatcttcaagttccggccttggtacttcccccagctcttcaccccgaactagtccctgccagtcacctacaatatcagagggtcctgtaccttcccttcccatcagaccaagccgagcaccgtcaagaactcctgggcctcccagtgcacagagttctcctattgacgcgcagccagcaacgccgctgccgcagaaagaccccgcccagcccttggagcccaagcggccgccgccgccccgcccggtcgcccctcccacacgcccggctcccccacagagacctcctccgccttcaggacgcagtcagccttcacctcaagcaggacttgcaggcccaggacctgctggatacagtacagccagaccgacgattcctcctcgtgctggagttatcagtgccccacagagccacgcgcgggcatctgctggaagactgactcctgaaagccaaagcaaaacatcagaaacgtcgaaaggttcaactttccttcctgaaccactgaagcctcaggctgcttttcctccgcagtcttctttgcccccgcctgctcaaaggttgcaagagcctcttgtccctgtggcagcacctatgcctcagtctggcccccagccaaatttggaaaccccaccacaaccaccacctcgaagcaggtcatcccatagcttgccttcagaagcttcctcacaaccgcaagtaaaaacaaatggaatctctgatggcaaaagagaatcaccattaaagattgacccatttgaagatctgtcatttaatctgcttgctgtatcaaaggctcagctatctgttcaaacgtcacctgttcccaccccagacccaaagaggttgattcagttgccttctgcaacgcaaagtaatgttttgagttctgtaagttgcatgccaacaatgcctccaattccagctcggagtcaatcccaggaaaatatgcgaagttctccaaacccatttattactggcttgaccaggacaaatcctttcagtgacaggactgctgctcctggaaacccatttagagccaagtctgaagaatcagaggcaacttcatggttctccaaagaagagcccgttactatcagtcctttcccttctctgcagcctcttggtcataacaaaagcagggcttcatcttcacttgatggctttaaggacagttttgatctacagggccagtctacattaaaaattagcaacccgaaaggatgggtaaccttcgaggaagaagaggattttggtgtgaaagggaagtcaaagtcagcttgttcagacttactgggtaatcagccaagttcattttctggctccaacctgacattgaatgatgactggaataaaggtacaaatgtctccttctgtgtgttgccgtcaagaagacctcctccacctcctgtccctctgctcccgcccggcaccagccctccagtagatcctttcacgaccttggcctctaaggcttcacccacactggactttacagaaagataacgccatgcaatagaaaacagtgggtacttgcttttggcaggatagagctaagagaattgggcattagtatttcattatgtgcaataagtcattgtaagtgcactgatatcttcacaaaacaccactatttgatgtgtacagagttggactatgtgtatattggaaataaggaaaaacccttctcattgttaactggagttttgatgtatttctctttggatgaataggagacagtagtagccataaaaagtacttatactttagaaaacagtccttattcagaaacttttcggtcagtcttctgaagaatctcaaaaagcccacccaactttcagctgacatttccaccagccctctcatacttgttaacaattggtatctttgagtatttaccaaagagctgccaaggttacagtgaacagagttttgaaaggcattgctttaaaggaaaaaagtataggtatgtgtacatatataatacatacaaacacatgtacttctgtatacatttacatatttttacaattcatactttaatttctaggctataactcagaccaaattatacctaaaagttccaacaaagtccctttttcaatatcacattaccaaaaagatggctgcaaatgtaatttggacctttcattaattttgttttcaaaactagaataatctcaccacagaatcagaattttctaccgttccacacccaaccccttcaaatacacacaaccttgttacttttcactccagcaccttcatacgcttttctccaggaggaggttcttgcagctggaaacagcctattttgtggtcactgtcaagtggatggatattctagcgctcccaaaaaagcactatggccttatatgcagggaaggcacataccaccaagttcaatgagaaatattagagctaaccgtactctcttctctgcgtacgttcgagtatacgttgcccatatccctcccatattttctttttgctgcttttgctctggaactttgcttttagcagggaaagcagctgtcccctgagtgctttgaattgggaatatacccagtgtgtgttctcccccctcttacgaggctacataacacatctatgatgctgctttaagtttttagaggctatacctcaaagtagctgcggattttgtctcctgcactgccaatatgcaactgatcccgcttttattaattttttgaagaagtacacagaatttttacagaatgtagtattttgatatcattaagtaaaccaatcagaaaactccttgagcaatagttgtttctttgtcagtttcagttacaatcatctttacccattaagacttacattaacattccttttatataaagagttgtatatgtccacctaaattcctatgtccacacttaacctttaaagatgtacattgagggaatatcaaaaaatagcgttcatggctacgaatatgtagaatgttaaaagcacagcaaactgcactgcacttataaagcaaatctattagaaaaaaagcatttttctaaatgctcaaatgttatcaaaatactatatttatagaagtaatcttctctgttaacagccaagatttgctgttagaaataactcttgtgagttttatattgtgctttttggaggttctaatcatttcagcagtagcgtcttaaacagcagtattactataagcagttgcttcaaaatgtgaattaacttgttgaaactgtggctttaacatccatgtgactagtgtatatggtatttgctctccattagcaaaataattcattgttaggtaaacttcactagtgcaaattgcagatctgtgagcaatgtttcctattgaatataaactactgtctaaaatatacatatcagcagcccagcctttatcaggaaaattatacttggcaagttgctgaaaatgcacaaagttatgaaagttaaaggtatgctgcaaataactagccattattctatgtattattaaatatttactagttctgttaaaagcagagcagaagttagacactaaggatctctttgtgaactctgtgttctctatattagattgctgtttatatgtaagaattttattgcttatgtggcatacaatatttataactataaactttatagaagtacagtattaaagtcagtggtacacagacattctgtacatatcctgtgaaacgtgctgtcatatgaaataaatatatctgtcttta

SEQ ID NO: 188012 - DNA, 7378 bp, Homo sapiens
  Payload ID: 17000
  Gene Symbol: SYNJ2
  Gene Name: synaptojanin 2
  Uniprot ID: O15056
  ENST ID: ENST00000355585
  CDS Start-End: 76-4566
gcggggagctgtcgcgggcagcgcgccctcgggaggacgtggccccggcccccgcccgcagtgggcccgaccctcatggccctgagcaaagggctgcggctgctggggcgcctgggggccgagggggactgtagcgtgctgctggaggcgcgcggccgcgacgactgcctgctgttcgaggccggcacggtggccacgctggctccagaagaaaaggaagtcattaaaggacagtatggcaagctcacggacgcgtacggctgcctgggggagctgaggctgaaatctggtggcacgtctctgagcttcctggtgttggtgacaggctgcacatctgtgggcagaattccagatgctgaaatctacaaaatcactgccactgacttttaccctcttcaggaagaggccaaggaggaggaacgcctcatagctttgaagaaaatcctcagctcgggggtgttctatttctcatggccaaacgatgggtctcgctttgacctgactgtccgcacgcagaagcagggggatgacagctctgaatgggggaactccttcttctggaaccagctgttgcacgtgcccttgaggcagcaccaggtgagctgctgtgactggctgctgaagatcatctgcggggtggtcaccatccgcaccgtgtatgcctcccacaagcaggccaaggcctgcctcgtctctcgcgttagctgtgagcgcacaggcactcgcttccacacccgtggcgtgaacgacgacggccatgtgtccaacttcgtggagacagagcagatgatttacatggacgatggagtgtcatcttttgtccagatcagaggctccgttccgctgttctgggaacagccagggcttcaggttggctcccatcatctgagactccacagaggcctggaagccaatgcccctgctttcgacaggcacatggtgcttctgaaggagcagtacgggcagcaggtggtcgtgaaccttctgggaagcagaggcggagaggaggtgctcaacagagccttcaagaagctgctctgggcttcttgccacgcgggcgacacgcctatgatcaattttgacttccatcagtttgccaaaggtgggaagctagagaaattggagaccctcttgaggccacagttaaagctgcactgggaagacttcgatgtgttcacaaagggggagaacgtcagtccacgttttcagaaaggcactttgcggatgaactgtcttgactgcctggaccgaaccaacactgtgcagagcttcatcgcgctcgaggtcctgcatctgcagctcaagaccctggggctgagttcaaaacccatcgttgaccgctttgtggagtccttcaaagccatgtggtctctgaatggccacagcctgagcaaggtgttcacaggcagcagagccctggaagggaaggccaaggtggggaagctgaaggatggagcccggtccatgtctcgaaccatccagtccaacttcttcgacggggtgaagcaggaggccatcaagctgctgctggttggggacgtctacggcgaggaggtggcagacaaagggggcatgctgctggacagcacggcgctcctggtgactcccaggatcctgaaagctatgactgagcgtcagtccgaattcacaaatttcaagcggatccggattgctatggggacctggaacgtgaacggaggaaagcagttccggagcaacgtgctcaggacggcggagctgacagactggctgctcgactcgccccagctctcgggagctaccgactcccaggatgacagcagcccagctgacatatttgctgtggggtttgaagagatggtggaattgagcgcagggaatattgtcaatgccagtactaccaacaagaagatgtggggtgaacagcttcagaaagccatctcacgctctcatagatacattctgttgacttcggcacagctggtgggcgtctgtctttatatctttgtacgtccataccatgtcccgttcatcagggacgtagccatcgacacagtgaagacgggcatggggggcaaggcggggaacaagggcgccgtcggcatccgcttccagttccacagcaccagcttctgcttcatatgtagtcacctgacggccgggcagtcccaggtgaaggagcggaatgaagactacaaggagatcacccagaaactctgcttcccaatggggagaaatgttttttctcatgattatgtattttggtgtggcgatttcaactaccgcattgatcttacttatgaagaagtcttctattttgttaaacgccaagactggaagaaacttctggaatttgatcaactacagctacagaaatcaagtggaaaaatttttaaggactttcacgaaggagccattaactttggacccacctacaagtatgacgttggctcagccgcctacgatacaagcgacaaatgccgcacccccgcctggacagacagggtgctgtggtggaggaagaaacatccctttgataaaacagctggagaactcaaccttctagacagtgatctagatgttgacaccaaagtcagacacacctggtctcctggtgccctgcagtattatggtcgtgcggagctacaagcgtctgatcacagacctgtgctggcgatcgtggaggtggaagttcaggaagtcgatgtgggtgctcgggagagggttttccaggaagtgtcctccttccagggccccctggatgccactgttgtagtaaaccttcaatcaccgaccttagaagagaaaaacgagtttccagaggacctgcgtactgagctcatgcagaccttggggagttatgggacaattgttcttgtcaggatcaaccaagggcagatgctggtaacttttgcagacagtcactcggctctcagtgtcctggacgtggacggtatgaaggtgaaaggcagagcagtgaagattagaccgaagaccaaggactggctgaaaggtttgcgagaggagatcattcggaaacgagacagcatggcccccgtgtctcccactgccaactcctgtttgctggaggaaaactttgacttcacaagtttggactatgagtcagaaggggatattcttgaagacgatgaagactacttggtggatgaattcaatcagcctggagtctcggacagtgaactcgggggagacgacctctctgatgtccccggccccacagcactggctcctcccagcaagtcacctgctctcaccaaaaagaagcagcatccaacgtacaaagatgacgcggacctggtggagctcaagcgggagctggaagccgtcggggagttccgccaccgttctccgagcaggtctctgtcggtccccaaccggcctcggccacctcaacccccgcagagacccccccctccaaccggtttaatggtgaaaaagtcggcttcagatgcgtccatctcctccggcacccatggacagtattcaattttgcagacggcaagacttctaccaggagcacctcagcaacctcccaaggctcggactggaataagtaaaccttataatgtcaagcagatcaaaaccaccaatgcccaggaggcagaagcagcaatccggtgtctcctggaagccagaggaggtgcctccgaagaagccctaagtgccgtggccccaagggaccttgaagcatcctctgaaccagagcccacaccgggggcagccaaaccagagaccccacaggcgcccccactccttccccgtcggcccccacccagagttcctgccatcaagaagccaaccttgagaaggacaggaaagcccctgtcaccggaagaacagtttgagcaacagactgtccattttacaatcgggcccccggagacaagcgttgaggcccctcctgtcgtgacagcccctcgagtccctcctgttcccaaaccaagaacatttcagcctgggaaagctgcagagaggccaagccacaggaagccagcatcagacgaagcccctcctggggcaggagcctctgtgccaccacctctggaggcgccgcctcttgtgcccaaggtacccccgaggaggaagaagtcagcccccgcagccttccacctgcaggtcctgcagagcaacagccagcttctccagggcctcacttacaatagcagtgacagcccctctgggcacccacctgccgcgggcaccgtcttcccacaaggggactttctcagcacttcatctgctacaagccccgacagcgatggcaccaaagcgatgaagccagaggcagccccacttcttggtgattatcaggaccccttctggaaccttcttcaccaccctaaactgttgaataacacttggctttctaagagctcagaccctttggactcaggaaccaggagccccaaaagagatcccatagacccagtgtcagctggcgcttcagctgccaaggcagagctgccaccagatcatgaacacaaaaccttaggtcactgggtgacaatcagtgaccaagaaaagaggacagcactgcaggtgtttgacccactggcaaaaacatgactgagcagctttgaaggctgcagtcctatagaatgcataccttcctccctctagacatccctccaccagaagagacatctatttaaaggcacactggccaaaacgtttgtgcatctgtcactctcgtgtagtttacaaaaatcgtgtctcttattcagtaagatggttactcagccaccaaaatatatttcactcaaggcttgtacatctgaagtttgctcttcaaggaatgggaaccttcctgttaaattcggtgtatggattttaagaaaggaatctagccaatgaggtccaagaagttctcacccattgaatttttaaatggctgttcagttcatgttgtacgtgatggagatttgtcttttgttttatttgcattttacagatttggtataacattttggggagccacctgaaggttgatgtataaagtaaggattagagaaagaggtcgttgtgaccattagtagctgtcctggcccacttaaacaaggttacaaaaaatcagagtcggaagcagccaaataggtcaacctaatgactagactgtacattcccatgagccttcatgtttaagtgtgtacatgtgcgttaaccttgatgatgcgtgaatcccgagggagccggtggcatacaccgttagcttaaccttagcttaaactagctgaaggctcctgtgccatgtcttagacattgcatgccctatcaattactataatcctgagccatggtgtgctactgaaaccaatttttatccaccatctagtccttattaaatgaaacctcacggatcctttgttccgcttatattccatgcataccacataaaagcacacagtgcgaaaactcttgctgatacgcgatattgattctcattgttagaatatggagagtgtttcagcctcgtctgtccggctggagcttcgggatggaaagtgctatgtgtccctgcatataagaatcaccaggccagtgtttctgggtttgcttgtctatatgtttgtctatattttttgcctatacatttttcccacgtttccaacagcacttctcacctattcaataactgaaaaagacattaccatagtgctttacatttttaaagtaatgttacaaggtctggaatccatttggagcagataccgtgttttcgctatttaataagaagttcagtagtgaaatcttactgtaccgcctgttgtatctgggagcctcgtacagaggctcgcacagcagtgatcaagtgtcatcccttacgtgactgggggatgtctgtcctaaaagctgactgctaggatagtaaggatcatcttgcctgggctatgccactgtcttgttaccaattagacatctggaatttcataattagttttcattgtcactgtcaagatatattgcagattacttaaatatggccatcaaaacaaaagttacaacacgtatctcttttcatctgaaaactaatacctggaaaaggataaaaaaaaaaaggaatccgtgacccacagagctagacagataagatgcatagttgaccagtcataaaaggcggtgtttaggtgatcaggatgccgttggtggcatttacgtgctttatatgatttttacctctgtaacaaacacaagaaataaacagaatggtccttaacagagtttgggggagagagcaagatgggttccttggagaagctgatttgccaagatgcacatcgctattaacagccagagtcataaatgaaatgaaattgaagaattcattcaaatgctcttttccctataacctcttttctcaccaaaaaggagataaatttgaaaacagataaatgtaacaaccagtcaaagaagcaggggaaaagtaagctcctccaaagttgcttgcagtgctggaaatagatctcatttttaggttttctcttcgttccagataccaaataaatgggacagagaataaaatttttgttaaaatatgtgctcatctcctaagtagctcttcagagtctgaccgtaagtaaaaacacacagaattgtgttgactgggggaggtgaatcacaaaaaagttacgaggagtttaagagttaaatattatttgatcgtggctgtcaaatttagtgaacaacatagattggatttggagttggtagtaggtatggttctcataccagaattctcttaaaaaaaaaaaaaaggacaattggaattgccttatttatttttaaaatcaatgcttactagttggtaggattcccaggtcagcagcagggttgattaaataatcttgacaatgagcagctgccatcttgggggatttcattctgtggttttttaaatgtttcgtctttgatgctaccatccagggcttcttattgtgaccttgtagcctattttgttcctgctgttctctaacatggtgcagttcacgcagactggtttaggtacttcacaactcaccattgtctctctgaccccaagcctagtcccttttacatcaccatcttctcagacttcttgcctattcttaaaatatgttttggttaatgattgaattaggacatcagcttaagcaattcctgtaacggtttaacgttgttgaagttcaaggcacataataaaattctccctgatgtgtgtgtaagtataaacaaagtaatgtatcaaagcgttcactttataatgaagtcatttcattgggaaggaaagctgcaaagattattgggggactagtgattaataaaatcctgtaatatttttgaagtgaaaatttgtactgaaattgtacatgatacctattaaatgtttttgtctttttttaaa

SEQ ID NO: 188013 - DNA, 5091 bp, Homo sapiens
  Payload ID: 17000
  Gene Symbol: SYNJ2
  Gene Name: synaptojanin 2
  ENST ID: ENST00000367112
  CDS Start-End: 1856-3601
cctaattacacattttgggagagcatagccaggaaattgcatctgtgaaaagaaaatacaaattttcctctagatgagtttgtgaacgcctgtgtggccccagcgctctgagaggtggggcctagaatgagtccgagtgttctcagctcctgcagctcttaccataccaattgctgccaaccttctgggattcctgggtcctggaaacccggcagcaacactgtgtctcaagcctacagtgggcatgctggcgaggactgcaggcatggtcatgactgttttgaataattatatgcgaggaatgtttttaaccaaaggccccaaagcatccgaagcctggcttcaaggtggaggagtaaggaggatgagtctgggacgtggggtggttcgtggcgcagacctctattgtggaagtgtcatgatcgcattcttggatattgactcgattctatatgggtctctcgaatggaacccctgcgagtagctggagaactcaaccttctagacagtgatctagatgttgacaccaaagtcagacacacctggtctcctggtgccctgcagtattatggtcgtgcggagctacaagcgtctgatcacaggtgaggtcctgacttccatggcgttttctcctgtgctgggcaaggcagcgtctccctctccgcaggaaaatgcatgctgtccccataaggatgtgtgtgcgcatgggggtgcattttgtgtgcatacaatacaccaaagaacaaagaatgatggaacaaatatctgtggacccaccaccaagaactaattaatcttagcattttgtcattgctccatatcataaatgacatcattgatgaaaatttcaaagatgcaacctacgtattttgcggcttttatattttcttaaatgatgtcgttgtgcaacttgcttttttgttactatttttgagatacagtcgtgttgatgttatagctctggtgcattcatttgtaactgctgtctagtatcccactaaatatatccatggaacttacaacttatccattcacctcttgatgaatattttctccaggattttatgattacaaacaccatagggtttttaaatctgggatgcacaaccttttttttttttttttttttgagagagagtcttgctctattgcccaggctggatggagtacagtggtgtgatctcagctcactgcaacctccgcttcccagattcaagcaattctcctgcctcagcctcccaagtagctgggattacaggtgcacaccaccatgcctggctaatttttgtgtttttagtagagacggggtttcaccatgttggccaggctggtcccaaactcctgacctcaggtgatccacccaccttggcctctcaaagtgttgggattacaggcgtgagccaccgcacctggccctaggatgcagggctttttaaatgctctgtgcatcatgcattgaggatagagtggaggcagcagagggagcaccgtgggcaccagcacctgtgccctgggattgctgcagaggaagactcaccctgcagaatgtctttaaagacagaggagaggatggcatttgagggtgtgaagaaggaagagtttgatcttcccaaggctgctgcctaaactctcatgtcagtttcaacttttacaaggaaagaaattaagaaaaagaagacctgtgctggcgatcgtggaggtggaagttcaggaagtcgatgtgggtgctcgggagagggttttccaggaagtgtcctccttccagggccccctggatgccactgttgtagtaaaccttcaatcaccgaccttagaagagaaaaacgagtttccagaggacctgcgtactgagctcatgcagaccttggggagttatgggacaattgttcttgtcaggatcaaccaagggcagatgctggtaacttttgcagacagtcactcggctctcagtgtcctggacgtggacggtatgaaggtgaaaggcagagcagtgaagattagaccgaagaccaaggactggctgaaaggtttgcgagaggagatcattcggaaacgagacagcatggcccccgtgtctcccactgccaactcctgtttgctggaggaaaactttgacttcacaagtttggactatgagtcagaaggggatattcttgaagacgatgaagactacttggtggatgaattcaatcagcctggagtctcggacagtgaactcgggggagacgacctctctgatgtccccggccccacagcactggctcctcccagcaagtcacctgctctcaccaaaaagaagcagcatccaacgtacaaagatgacgcggacctggtggagctcaagcgggagctggaagccgtcggggagttccgccaccgttctccgagcaggtctctgtcggtccccaaccggcctcggccacctcaacccccgcagagacccccccctccaaccggtttaatggtgaaaaagtcggcttcagatgcgtccatctcctccggcacccatggacagtattcaattttgcagacggcaagacttctaccaggagcacctcagcaacctcccaaggctcggactggaataagtaaaccttataatgtcaagcagatcaaaaccaccaatgcccaggaggcagaagcagcaatccggtgtctcctggaagccagaggaggtgcctccgaagaagccctaagtgccgtggccccaagggaccttgaagcatcctctgaaccagagcccacaccgggggcagccaaaccagagaccccacaggcgcccccactccttccccgtcggcccccacccagagttcctgccatcaagaagccaaccttgagaaggacaggaaagcccctgtcaccggaagaacagtttgagcaacagactgtccattttacaatcgggcccccggagacaagcgttgaggcccctcctgtcgtgacagcccctcgagtccctcctgttcccaaaccaagaacatttcagcctgggaaagctgcagagaggccaagccacaggaagccagcatcagacgaagcccctcctggggcaggagcctctgtgccaccacctctggaggcgccgcctcttgtgcccaaggtacccccgaggaggaagaagtcagcccccgcagccttccacctgcaggtcctgcagagcaacagccagcttctccagggcctcacttacaatagcagtgacagcccctctgggcacccacctgccgcgggcaccgtcttcccacaaggggactttctcagcacttcatctgctacaagccccgacagcgatggcaccaaagcgatgaagccagaggcagccccacttcttggtgattatcaggaccccttctggaaccttcttcaccaccctaaactgttgaataacacttggctttctaagagctcagaccctttggactcaggaaccaggagccccaaaagagatcccatagacccagtgtcagctggcgcttcagctgccaaggcagagctgccaccagatcatgaacacaaaaccttaggtcactgggtgacaatcagtgaccaagaaaagaggacagcactgcaggtgtttgacccactggcaaaaacatgactgagcagctttgaaggctgcagtcctatagaatgcataccttcctccctctagacatccctccaccagaagagacatctatttaaaggcacactggccaaaacgtttgtgcatctgtcactctcgtgtagtttacaaaaatcgtgtctcttattcagtaagatggttactcagccaccaaaatatatttcactcaaggcttgtacatctgaagtttgctcttcaaggaatgggaaccttcctgttaaattcggtgtatggattttaagaaaggaatctagccaatgaggtccaagaagttctcacccattgaatttttaaatggctgttcagttcatgttgtacgtgatggagatttgtcttttgttttatttgcattttacagatttggtataacattttggggagccacctgaaggttgatgtataaagtaaggattagagaaagaggtcgttgtgaccattagtagctgtcctggcccacttaaacaaggttacaaaaaatcagagtcggaagcagccaaataggtcaacctaatgactagactgtacattcccatgagccttcatgtttaagtgtgtacatgtgcgttaaccttgatgatgcgtgaatcccgagggagccggtggcatacaccgttagcttaaccttagcttaaactagctgaaggctcctgtgccatgtcttagacattgcatgccctatcaattactataatcctgagccatggtgtgctactgaaaccaatttttatccaccatctagtccttattaaatgaaacctcacggatcctttgttccgcttatattccatgcataccacataaaagcacacagtgcgaaaactcttgctgatacgcgatattgattctcattgttagaatatggagagtgtttcagcctcgtctgtccggctggagcttcgggatggaaagtgctatgtgtccctgcatataagaatcaccaggccagtgtttctgggtttgcttgtctatatgtttgtctatattttttgcctatacatttttcccacgtttccaacagcacttctcacctattcaataactgaaaaagacattaccatagtgctttacatttttaaagtaatgttacaaggtctggaatccatttggagcagataccgtgttttcgctatttaataagaagttcagtagtgaaatcttactgtaccgcctgttgtatctgggagcctcgtacagaggctcgcacagcagtgatcaagtgtcatcccttacgtgactgggggatgtctgtcctaaaagctgactgctaggatagtaaggatcatcttgcctgggctatgccactgtcttgttaccaattagacatctggaatttcataattagttttcattgtcactgtcaagatatattgcagattacttaaatatggccatcaaaacaaaagttacaacacgtatctcttttcatctgaaaactaatacctggaaaaggataaaaaaaaaaa

SEQ ID NO: 188014 - DNA, 499 bp, Homo sapiens
  Payload ID: 17000
  Gene Symbol: SYNJ2
  Gene Name: synaptojanin 2
  ENST ID: ENST00000367113
  CDS Start-End: 1-410
gcggccgcgacgactgcctgctgttcgaggccggcacggtggccacgctggctccagaagaaaaggaagtcattaaaggacagtatggcaagctcacggacgcgtacggctgcctgggggagctgaggctgaaatctggtggcacgtctctgagcttcctggtgttggtgacaggctgcacatctgtgggcagaattccagatgctgaaatctacaaaatcactgccactgacttttaccctcttcaggaagaggccaaggaggaggaacgcctcatagctttgaagaaaatcctcagctcgggggtgttctatttctcatggccaaacgatgggtctcgctttgacctgactgtccgcacgcagaagcagggggatgacagctctgaatgggggaactccttcttctgaggcagccacaggttttcatctggccttggtgctttggattccccagaagtgaattcctgatttctgccggaagaaggggaccctcccca

SEQ ID NO: 188015 - DNA, 3029 bp, Homo sapiens
  Payload ID: 17000
  Gene Symbol: SYNJ2
  Gene Name: synaptojanin 2
  ENST ID: ENST00000367122
  CDS Start-End: 411-2930
atcagaaagggggcgagcttaggggcggcattcctcttggggtgtgggtgtgggtgtttggatgctggaggaactcatcttttccccagcttgtggttggcctcatcttaccacctgggcctacccatggcttttgaatttccaccagcctttcggcgagctggcagcaggcgttgaactgacctccccactgagcccctgggtcccgggaagggcctgtgcctgccaagagcaccacgggtacacccctgcagcacctggagactaagactatgctgcccataatcctcttctctgactttcagaagatgtttaggtccctgtccctctgcttgtgttatttgggcagcttggcagtgtcctaggttagcaggtgaagggacgtagccatcgacacagtgaagacgggcatggggggcaaggcggggaacaagggcgccgtcggcatccgcttccagttccacagcaccagcttctgcttcatatgtagtcacctgacggccgggcagtcccaggtgaaggagcggaatgaagactacaaggagatcacccagaaactctgcttcccaatggggagaaatgttttttctcatgattatgtattttggtgtggcgatttcaactaccgcattgatcttacttatgaagaagtcttctattttgttaaacgccaagactggaagaaacttctggaatttgatcaactacagctacagaaatcaagtggaaaaatttttaaggactttcacgaaggagccattaactttggacccacctacaagtatgacgttggctcagccgcctacgatacaagcgacaaatgccgcacccccgcctggacagacagggtgctgtggtggaggaagaaacatccctttgataaaacagctggagaactcaaccttctagacagtgatctagatgttgacaccaaagtcagacacacctggtctcctggtgccctgcagtattatggtcgtgcggagctacaagcgtctgatcacagacctgtgctggcgatcgtggaggtggaagttcaggaagtcgatgtgggtgctcgggagagggttttccaggaagtgtcctccttccagggccccctggatgccactgttgtagtaaaccttcaatcaccgaccttagaagagaaaaacgagtttccagaggacctgcgtactgagctcatgcagaccttggggagttatgggacaattgttcttgtcaggatcaaccaagggcagatgctggtaacttttgcagacagtcactcggctctcagtgtcctggacgtggacggtatgaaggtgaaaggcagagcagtgaagattagaccgaagaccaaggactggctgaaaggtttgcgagaggagatcattcggaaacgagacagcatggcccccgtgtctcccactgccaactcctgtttgctggaggaaaactttgacttcacaagtttggactatgagtcagaaggggatattcttgaagacgatgaagactacttggtggatgaattcaatcagcctggagtctcggacagtgaactcgggggagacgacctctctgatgtccccggccccacagcactggctcctcccagcaagtcacctgctctcaccaaaaagaagcagcatccaacgtacaaagatgacgcggacctggtggagctcaagcgggagctggaagccgtcggggagttccgccaccgttctccgagcaggtctctgtcggtccccaaccggcctcggccacctcaacccccgcagagacccccccctccaaccggtttaatggtgaaaaagtcggcttcagatgcgtccatctcctccggcacccatggacagtattcaattttgcagacggcaagacttctaccaggagcacctcagcaacctcccaaggctcggactggaataagtaaaccttataatgtcaagcagatcaaaaccaccaatgcccaggaggcagaagcagcaatccggtgtctcctggaagccagaggaggtgcctccgaagaagccctaagtgccgtggccccaagggaccttgaagcatcctctgaaccagagcccacaccgggggcagccaaaccagagaccccacaggcgcccccactccttccccgtcggcccccacccagagttcctgccatcaagaagccaaccttgagaaggacaggaaagcccctgtcaccggaagaacagtttgagcaacagactgtccattttacaatcgggcccccggagacaagcgttgaggcccctcctgtcgtgacagcccctcgagtccctcctgttcccaaaccaagaacatttcagcctgggaaagctgcagagaggccaagccacaggaagccagcatcagacgaagcccctcctggggcaggagcctctgtgccaccacctctggaggcgccgcctcttgtgcccaaggtacccccgaggaggaagaagtcagcccccgcagccttccacctgcaggtcctgcagagcaacagccagcttctccagggcctcacttacaatagcagtgacagcccctctgggcacccacctgccgcgggcaccgtcttcccacaaggggactttctcagcacttcatctgctacaagccccgacagcgatggcaccaaagcgatgaagccagaggcagccccacttcttggtgattatcaggaccccttctggaaccttcttcaccaccctaaactgttgaataacacttggctttctaagagctcagaccctttggactcaggaaccaggagccccaaaagagatcccatagacccagtgtcagctggcgcttcagctgccaaggcagagctgccaccagatcatgaacacaaaaccttaggtcactgggtgacaatcagtgaccaagaaaagaggacagcactgcaggtgtttgacccactggcaaaaacatgactgagcagctttgaaggctgcagtcctatagaatgcataccttcctccctctagacatccctccaccagaagagacatctatttaaaggcacactggcc

SEQ ID NO: 188016 - DNA, 547 bp, Homo sapiens
  Payload ID: 17000
  Gene Symbol: SYNJ2
  Gene Name: synaptojanin 2
  ENST ID: ENST00000449320
  CDS Start-End: 271-547
agtgcaatggcgcgatctcggctcaccacaacctctgcctcctgggttcaagcaattctcctgcctcagcctcctgaatagctgggactacaggcatgcgccaccatgcccaactaattttttgtatttttagtagagacggggtttttccatgttggtcaggctggtctgaaactccgacctcaggtggtccacctgcctcagcctcccaaagtgctgggattacagccatgagccgccgtgcctggccgacctctcttctcttttaagatgtttctttatgcctcgggacctgctcctcctgcaggaacctgcaggtggggaggtcaaggtggcacgtctctgagcttcctggtgttggtgacaggctgcacatctgtgggcagaattccagatgctgaaatctacaaaatcactgccactgacttttaccctcttcaggaagaggccaaggaggaggaacgcctcatagctttgaagaaaatcctcagctcgggggtgttctatttctcatggccaaacgatgggtctcgctttgacctgactg

SEQ ID NO: 188017 - DNA, 810 bp, Homo sapiens
  Payload ID: 17000
  Gene Symbol: SYNJ2
  Gene Name: synaptojanin 2
  ENST ID: ENST00000485863
  CDS Start-End: 1-497
aggtgagctgctgtgactggctgctgaagatcatctgcggggtggtcaccatccgcaccgtgtatgcctcccacaagcaggccaaggcctgcctcgtctctcgcgttagctgtgagcgcacaggcactcgcttccacacccgtggcgtgaacgacgacggccatgtgtccaacttcgtggagacagagcagatgatttacatggacgatggagtgtcatcttttgtccagatcagaggctccgttccgctgttctgggaacagccagggcttcaggttggctcccatcatctgagactccacagaggcctggaagccaatgcccctgctttcgacaggcacatggtgcttctgaaggagcagtacgggcagcaggtggtcgtgaaccttctgggaagcagaggcggagaggaggtgctcaacagagccttcaaggtaaggccaggctgtcctctccacagctgggctgggcggcaggtggccatggtggagcgttgagcctggaggtggctcctgcagggactggagctgacagcccagccctccttcgtttcctgaggcttccccagcattccgaccagtgaacacggcagtgctcagtgactcgggccctgatacatttgccaaaggtgggaagctagagaaattggagaccctcttgaggccacagttaaagctgcactgggaagacttcgatgtgttcacaaagggggagaacgtcagtccacgttttcagaaaggcactttgcggatgaactgtcttgactgcctggaccgaaccaacactgtgcagagcttcatcgcgctcgag

SEQ ID NO: 188018 - DNA, 7015 bp, Homo sapiens
  Payload ID: 17001
  Gene Symbol: SYNJ2BP
  Gene Name: synaptojanin 2 binding protein
  Uniprot ID: P57105
  ENST ID: ENST00000256366
  CDS Start-End: 83-520
gggcgcagcgccgagattgattcaccttcacctgtgctgcactccagctgacccaagtaggaagccagacgagctgtaaaacatgaacggaagagtggattatttggtcactgaggaagagatcaatcttaccagagggccctcagggctgggcttcaacatcgtcggtgggacagatcagcagtatgtctccaacgacagtggcatctacgtcagccgcatcaaagaaaatggggctgcggccctggatgggcggctccaggagggtgataagatcctttcggtaaatggccaagacctaaagaacctgctgcaccaggatgctgtagacctctttcgtaatgcaggctatgctgtgtctctgagagtgcagcacaggttacaggtgcagaatggacctataggacatcgaggtgaaggggacccaagtggtattcccatatttatggtgctggtgccagtgtttgccctcaccatggtagcagcctgggctttcatgagataccggcaacaactttgaaaaacttgctctctttcaatactcccaatgaagatacatttcactcaccctccacccctgctattctgccatgtctttccctctctctgcatagccagatttgaagtgactgatacccaccccaaaccttgctgttcacagtctccaattcttcatattctaatgggaaagtaaaggtattgtttgaaggaaaactgaagaaaagacttggcttagaacaaatgaggagttatatattttactaggacttttgatagaaattcagctacaacccaaagagagaaagattgagtcttcctgtcaccataggcaataccttttttcttagctggcatgccataaaggccagctatgtgatattagaggaagaaaggatttttctttttaatgatcttccttgggaaattattgtggcctttatttaatttctaactacgtacctgggtgcctatatcgacaaagagtgagaagagcatttttacttttttaaaaaagcaaatacatatatacacatacgtatgcaaatattatagtataatagtgatccctatggagaattaaaggtgagaaagctactttgtggtgtctaggtttctgataaaagggatgatcttaactgaagaatttaaagagatacttaaacagagcaaatgtagtaggaacaagggagtgagccttataagaggacgttcagtctcatttattaaaataataactgagactgggagaggtggctcatgcctgtaaatcccagcactttggtagcctgaagtgggagattgcttgagtccaggagaccagcctgggcaacatagcaaaacctcatctctatttaaaaaaaaaatagaaaaaaatgtaataactgaagcaactaattaaaaatcttagaagaacaatatttattcttataacagccaactatggtgagttattataaggtaaattgccataatccagcgctgctcacatctaaaaaactttgaggtgtaaaggtaaatcgtaccaatctctgggctgccctagtgacttttttgatacctcagagtcctattgaagaaccaggtggaatgattgtggtaagggctatagtgctggagccaaacaccccagcaagaaaactctaaaaggacaaaagataaggtagtgcctccaaggtggcacctgaaccctctcaggctactttttggtttctactaacaaacctgagggaaggaactgcctccctggcaggatgggcatcaaatcaactctggcttcagatttagttaaaatgaggccgggtgcagcggctcacacctgtcatctcagcactttgggaggccgaggcaggcagatcacaaggtcaggagttcaagaccagcctggccaacatggtgaaaccccatgtctactgaaaatacaaaaattacctggacatggtggcgcgttcctgtaattccagctactcaggaggctgaggcaggagaactgtttgaaccaggacctgggagacggaggttgcagtgagccaagatcacgccactgcactccagcctgggctacagagcaagactccatctcaaaaaaagaaaggcatggattgctagtatttttgaaaggctttatacactacatacggcttttaataaacctttttgcagcaagagggaggaaaagagttttgtttgctttaggaggtagggaaatgtggtaggtgtttcatgcggcctaggaggaggatatgaatgaatggatactatggaatgccagtgatctcgataaggtgggaaccatcctgttcatgttcttttaaggctggttttaagcactatgggtagctgaattttctggctttaagaaaatcatttccattagccaaatatattggccatactataggccttttataattttgttagcaagattatcaggactcaggcaatcaactgtatttcatttctagcttggacagtctggtaattaaatgttgattggacatcagctttgtcaagacacttttacaaagaagtacagtgcatatcctccatcccatagggcttttgggttccaactgcgaagacaacactcttattggccacataggtaggacagtgtaagtaggggtcatgtttatattacagacagcaaaagagaaaagttactgagaactggggcgtttgagaaagttacgtggaggaaagggacaagttgaagacccttaagggcctcacagcctagttaagagaattcataaacaggtgagaagttaaaagtatatcagcaggctaagtattgaaaacaatattaaaggggtaccatgcaaaacacgatgcagcaacaaagaagatatgcaggtaatcatcacattttcttttagaaattcagggaaaaaaagatgtcacataatggcatcaggctcaattggaaagggaaggcttttgaaaataagaggtccggtaagaccttgcctctgggtcactactggtatagggagaaacttgctttaaacagtcctgacataaagtgccttttgacatcaactattcaatacctttgagactcacttagacaactggactcattgtaggttccacagaaaaacacggacaacattctagttgtcactccaaccagccacactaggagggcacagcctctggtaccctttctgttcctgaaggcatgtacagcggcttctacagcaagcttgcttacctcccaggattcacctcatggtttggacactgattcctgagagagccttgagacacacaaagtgaaaaaaatgtcaagcaggaatgaaagctctagttttttgcttgttggtatatgtaaatttgtttaaaaagtatccattctgtcgttggtagaagttttgctttggttgataatagagattctgatgtactcttataacttaggttttctcagaaattaagtagcattgaagatcaatgtaatacagttttaagcaggtacactaattatattattgattctatagaaaactaaaattatagatgaggtatcaggatccattataggttgtaaaaaaattcatgttcttcatagattgagtctaatatttcttctatagattgcatctaatgttcctactacctaaattattacgttcaaagttttgaaaattgaacgaaggtatttttaagtacttaaaacatttctctatcattctgtattacatgtataattataagatattgtttgcttcaactagctgtactttgttttcctgtgaagtttcaacttatgtgttatcgatttaacttaattgttccatctagccatgtataatggaaaaaggaagttaatatttgttattgtgttctatgccagggactgtaccaaactctgattggtacattatttcatgtctcataactctgggatctaagtattgtcacaaagagactaaaaatgagagaaaaaattacttgactaggattatgtaggtggtaataatagaatcaggatttaaactcaggacttcagatgccagcatcaatgatattctctcactggaagtggttctcaaagcaaggtcctgacaaaagcatcagcgttactggggaacttgttagaaaagcaagttcataggctgggcatggtggctcatgcctgtaatcccagcactctaggaggcctaggcaggtgggtcacttgagctcaggagttttgagaccagcctgcacaatgtggtgaaaccctgtctttactaaaagtcaaacaaattagtggtgcattcctgtaggcccagctacacgggaggattgcttgagcccaggagactgaggtgcagtgagccgtgattgctccacttcattctagcctgagcaacggagtgagaccttgtctcaaaaacaaaaaaacaaacaaacaaaaaacaaaaagcaagttcccagaagagaaaaaagaagttccagacctagtgaatcaaaaactctgagcgtggcatctcacaatctgtgtttttgtaatccttccaggtgactgattcatgctaaagtttgagactcattgctctatgccagtcatcattccctttgctcaggttagaatcatctggagagcttataaacgtccccatgcccaggctgcacacagatcaattaaaaggaacctctgagggtgggactcaagcagcagtaaaataaagttcattgagtgattctggtgtgcagccgcagttgaaaatgttatatagcatttaaacaagacactatttaattaaacactatttaaattattaaattacatacattgcttcaggcaaaacaacaacaacaacaacaacaacaaaaacttgggcctttagagcccagcttcctgagcttctgcacgaagtaagtggaacattcatttcttcctgatttgctaaggattgatcaacctccagcaaaatgtatgattagtgagtgtttcagttggtgcatcaattaaatgagaaccaatcatagaacattgaagctaaaaaggaccagagagcttctaggatgaatctgtcttagagatgagaaaaataaaggctcagagagggaagctaacttaactctgatcagacttagtttgttgcagaagtgacctttctgtctcatatttatgtcttgaatatattcactacatgaatacacagactacccattttatcttagtctacttctttcttctctctttgggcctgaataaagaccagaactgatagacagctaaaggatattgcaagcatcattattggaattgggagattccacagaacaatctgagaatgatctcatatcaaatccaatcagatgagttattctgagactaattccaatagttctagagacttttttttttatggtggacattgtttttattgtgtaaataagcaatttttaaagtatatttaaagaaatgaaacataaggaagtgtataggctgtcaggtatgtggggaagtgaagttcatgtagttttcatgtggagcccatacagattttattatagtcaattttagtgaaatttatcgttggtcagatgaaggtttttttccttcattcagcaaataactaatgactgcctactatgtgctaggtgccgaagatagagagataaataacacttagtcactctaagctgaaattgctcagcatatgaaagtggaggaatatttgtaggtgattttgatgttaaagtatttttttaacatcacctggtagtagaagattgagttatgaagctgtctacctctcacctgtaatagttttagagttggttgctattttggtgtaagtcttttttgctgttcctcttttaactgcaaatctttttgagaccagcactcacatccaaaagggcaattgtgataaaaaagaagacagtattttaaggattctgatcagaaccagattcttttcttttcttttttttttttttttttttttttttgagacggagtcttgctctgtcgcctaggctggagtgcagtggcacgatctcagctcactgcaatctctgccgcccgggttcaagcgattctcctgcctcagcctccccagtagttgggattacaggtgtgtgccacaacgcctggctaatttttgtatttttagtagacacggggtttcagcatcttggccaggctggtcttgaattcctgacctcgtgatccacccatctcggcctcccaaagtgcagaaccagattcttaactgccacagactcttgtattatgtaatttatatacagaacacaaagcacttgatttgcttaactgatgtacttgatgatactataaaacctatattatgagaaagcattgctccttcaaaggaatcaagtgatagcaaacactcggtcctgtttccaggttttcctcactgttcattttgcctttgttcttgcagggggagaatgaaaggggcgagagctaaagtgtgttgtcaatgcaagtcaatccttaaccaacaataatttacaaaagaactttatatttgctgtaatcattaaatttagttactaatcccaggaaaagggttagtccttcctcctagtttgtagatttgcaaatggagatgaataattgaatcctattttaatcttttatctgcagtaatctgggcttcttattaccggatatatttgcattttacctccaggccatgttagttcttagaagattattttcctcatgaaccctgttttgttttgcttcctttctgcttcaattctaatgtcacattgcatacctggatgtaaacagcagtcagtttctcagatcaaatagagccctgtagcaacttggaagacacagaagacacacggacataaaactgtatttattatccagggaatgtcactacggattaattatgttaatgaggccatcaaaatctatggtaatctttcaggctttgttgtttgataccagatacagcaaatgagataataatgtgtctaattgtgcctagccagtattggtatttaataaaactttgtcattgaatctttacaa

SEQ ID NO: 188019 - DNA, 1011 bp, Homo sapiens
  Payload ID: 17002
  Gene Symbol: SYCE1
  Gene Name: synaptonemal complex central element protein 1
  ENST ID: ENST00000303903
  CDS Start-End: 55-1011
aatcaccactggaggctccctcccgaggcaccctcgctggcgagctgagaggaaatggcggggaggtccctgacatcgaaggccgagcccaccgcaggagccgtggacagggctgagaaggccggagggcaggacacgtcctcacagaaaattgaagacttgatggaaatggtgcaaaagctgcagaaagtgggaagcctagagccccgagttgaggtcctgattaaccggattaatgaggtccagcaagcaaaaaagaaagccaataaagacctaggagaggcccggaccatctgtgaggccctgcagaaggaactggactcgctgcatggagagaaagtacacctgaaggagatcttgagcaaaaaacaagagaccctgaggatcctccggctgcattgccaggaaaaggaaagtgaggcacacaggaagcacaccatgttgcaggagtgcaaggagagaatttctgccctgaacttgcagattgaagaagagaagaacaaacagagacagctgaggttggcattcgaggaacagctggaagatctgatgggccagcacaaggacctctgggacttccacatgccagagcggctggcaaaggagatttgtgccctggacagcagcaaggagcagctgctcaaggaagagaagctggtcaaggcgacactggaagacgtgaagcatcagctgtgctccctgtgtggggctgagggcccctccacccttgatgagggactctttctccgcagccaggaggctgcagccacagtgcagctgtttcaggaagagcacaggaaggctgaggagctcctagcagctgctgcccagcgccaccagcagctgcagcagaagtgccaacaacagcagcagaagcggcagaggctgaaggaagagctggaaaagcatggaatgcaagtccctgcccaagcccagagcacacaagaggaagaggctggcccaggagatgtggctcccagaccaggtagaccagtgacatggtggagttga

SEQ ID NO: 188020 - DNA, 1309 bp, Homo sapiens
  Payload ID: 17002
  Gene Symbol: SYCE1
  Gene Name: synaptonemal complex central element protein 1
  Uniprot ID: Q8N0S2
  ENST ID: ENST00000343131
  CDS Start-End: 106-1161
gcattgcgcaggcgcgctgcctggagtcctgcccccagcggcggttgctccaatcaccactggaggctccctcccgaggcaccctcgctggcgagctgagaggaaatggcggggaggtccctgacatcgaaggccgagcccaccgcaggagccgtggacagggctgagaaggccggagggcaggacacgtcctcacagaaaattgaagacttgatggaaatggtgcaaaagctgcagaaagtgggaagcctagagccccgagttgaggtcctgattaaccggattaatgaggtccagcaagcaaaaaagaaagccaataaagacctaggagaggcccggaccatctgtgaggccctgcagaaggaactggactcgctgcatggagagaaagtacacctgaaggagatcttgagcaaaaaacaagagaccctgaggatcctccggctgcattgccaggaaaaggaaagtgaggcacacaggaagcacaccatgttgcaggagtgcaaggagagaatttctgccctgaacttgcagattgaagaagagaagaacaaacagagacagctgaggttggcattcgaggaacagctggaagatctgatgggccagcacaaggacctctgggacttccacatgccagagcggctggcaaaggagatttgtgccctggacagcagcaaggagcagctgctcaaggaagagaagctggtcaaggcgacactggaagacgtgaagcatcagctgtgctccctgtgtggggctgagggcccctccacccttgatgagggactctttctccgcagccaggaggctgcagccacagtgcagctgtttcaggaagagcacaggaaggctgaggagctcctagcagctgctgcccagcgccaccagcagctgcagcagaagtgccaacaacagcagcagaagcggcagaggctgaaggaagagctggaaaagcatggaatgcaagtccctgcccaagcccagagcacacaagaggaagaggctggcccaggagatgtggccagtcccaagcccctaaaaggagaaagacctggagctgcacaccaagcagggcctgatgtcctcataggccaggaggacacactccaccccgaccttagcccaaggggctttcaggaaataaaggagctattttgatacagctaagtctactggtgaggagtaggggtcaggcccaagatccccagtctcctgtgactgattgaagccttggcttgactctgcctcttggtctgggccagaggtacatcacaggttttcaataaatgcttccttaacctcctgg

SEQ ID NO: 188021 - DNA, 1377 bp, Homo sapiens
  Payload ID: 17002
  Gene Symbol: SYCE1
  Gene Name: synaptonemal complex central element protein 1
  Uniprot ID: Q8N0S2
  ENST ID: ENST00000368517
  CDS Start-End: 140-988
gctcaggctggagaagggccgcgggacccggggaacgcggcctggaggacgaggaggactgggttcccggaggcaacaggaccggctcggcatctacagctactggcaggacacgtcctcacagaaaattgaagacttgatggaaatggtgcaaaagctgcagaaagtgggaagcctagagccccgagttgaggtcctgattaaccggattaatgaggtccagcaagcaaaaaagaaagccaataaagacctaggagaggcccggaccatctgtgaggccctgcagaaggaactggactcgctgcatggagagaaagtacacctgaaggagatcttgagcaaaaaacaagagaccctgaggatcctccggctgcattgccaggaaaaggaaagtgaggcacacaggaagcacaccatgttgcaggagtgcaaggagagaatttctgccctgaacttgcagattgaagaagagaagaacaaacagagacagctgaggttggcattcgaggaacagctggaagatctgatgggccagcacaaggacctctgggacttccacatgccagagcggctggcaaaggagatttgtgccctggacagcagcaaggagcagctgctcaaggaagagaagctggtcaaggcgacactggaagacgtgaagcatcagctgtgctccctgtgtggggctgagggcccctccacccttgatgagggactctttctccgcagccaggaggctgcagccacagtgcagctgtttcaggaagagcacaggaaggctgaggagctcctagcagctgctgcccagcgccaccagcagctgcagcagaagtgccaacaacagcagcagaagcggcagaggctgaaggaagagctggaaaagcatggaatgcaagtccctgcccaagcccagagcacacaagaggaagaggctggcccaggagatgtggctcccagaccaggtagaccagtgacatggtggagttgaagagagaggctcactgcagagcactgtttccatggaaaaatggaacatggcaaagtgcagaaattcttcagtcagtccaggacagacgagttctctaagatgcagttaatcatacctgtcttaaacaaactggcaatatactatcaaacatgacttttaaatcaagtggaagttagaaaatatattgaactgagtggcaatgaagacaccacattttaaaactgtaattcagttaagcccacaattagaaggaactttagcttttattggttcaccacaattttttaagaaatcaaccaatgattgttcagttaatgaataaaaggcctttgacacagttcacctattcatgtgaaaaaaaaagactaataaatagtcagcttccctta

SEQ ID NO: 188022 - DNA, 1254 bp, Homo sapiens
  Payload ID: 17002
  Gene Symbol: SYCE1
  Gene Name: synaptonemal complex central element protein 1
  ENST ID: ENST00000432597
  CDS Start-End: 604-978
accccatcctccctgaaacaaggccggaggttgaggaggtctccgcccggccccgcagctgacaaccggtggagaaaccgcacctgccacgggaggggccgcggggtgggctcgagccaccatggggctggtacaagcaccctctccgctcaggacctcggccctcatcccagggcaccagggctcacagggggatgggcccgggtggggacgagggtgtggaggggcaggaagcacggcgggtggagcggagccgggtgcgggggtcgcgggggaccgcggggacggggccttgtgatgcaggagacggagggggctggtgacggaggacgggaggccgcaaggatgggggacgcgacatccttttcccctcccaccggctcaccagggatgcgcctccgcgactgcccgccccaatcccagggcggaggcctcgcgcaaaacccaggcgccgcggctccgcgctccggctgagggtccgcgccgccgcccgcccgctccttcccgctcggccgcggcctcagggacggatactccagcgcgcggttccaaccgaggcccgtggcgggtttagccccatgaagatgaactgggcacccgcgaatggctgggctctgctacaggaggcagccttcctctgcgtgcggccgcggagggctccgcgggggctcgagaggggcctcgagggtgtgtgtgaggccggcgctgtgctatggtgccccgggctcctccctgcgcgtggctgcggccggggcggcgggctcaggctggagaagggccgcgggacccggggaacgcggcctggaggacgaggaggactgggttcccggaggcaacaggaccggctcggcatctacagctactgtacgtggacttcgggcgctggacccacgggcggcctgtgcctctgtgtcgggctgggtggcgccctcagtgccctggggctgctgcggccctaggcctggctgggctcggtgaccacatctggcccccgggccgcaccgtcccccaggatcctccggcctgggctcccccttcctcccttgcccacagtcttggagccccagtgggtgcaggagctgctggctgcccctgtggacccgccatccaccgtcctgcccatgctgcctcgccatccacctgcctgcccacgccgcctcagcctcccacctcccacctagaggagaccatgggccctgccccacctgctccaggatgttagggtcccctcagccaaaaaggcagtggcctgtg

SEQ ID NO: 188023 - DNA, 858 bp, Homo sapiens
  Payload ID: 17003
  Gene Symbol: SYCE1L
  Gene Name: synaptonemal complex central element protein 1-like
  Uniprot ID: A8MT33
  ENST ID: ENST00000378644
  CDS Start-End: 56-784
tttcttttttaaccagtcatcaagcgaggctcgcgcgcaggccccgcgttggaaaatggcggggaagctgaaacctctgaatgtggaggcgccagaagctactgaggaggctgaagggcaagccaagtctttgaagactgaagacttgctggcaatggtgataaagctgcagaaagagggaagcctggagccacagatagaggacctgattagccggattaatgatcttcagcaagcaaagaagaaatccagtgaggaactgagagagacccacagtctctgggaggccctgcatagggaattagactccttgaatggagagaaagtgcacctagaggaggtcttgggcaaaaagcaagaggcactgaggatcctccagatgcactgccaagagaaggaaagcgaggctcagaggttggatgtcagaggacagctggaggatctgatgggccagcacaaggacctctgggaattccacatgctggagcagcgactggcccgggagatccgtgccctggagagaagcaaggagcagctgctctcggagaggaggctggtgcgcgccaagctgcgggaggtggagcggcggctgcactcgccgcctgaggtcgagggcgccatggcggtgaatgacgggctgaaggcggagctggagatattcggggagcaggtccggagcgcccccgaggtcggggccggcgagggagaggccggacctgagctcccccgcgctcgcgacgaggaggatcccgagccgccggtggctgcccctgacgccctctaggccagcaggacccgcccgttcccgaccttccctcgagacccgccaagaaataaaggcgatgatttccgaccatg

SEQ ID NO: 188024 - DNA, 213 bp, Homo sapiens
  Payload ID: 17003
  Gene Symbol: SYCE1L
  Gene Name: synaptonemal complex central element protein 1-like
  ENST ID: ENST00000563157
  CDS Start-End: 1-75
atattcggggagcaggtccggagcgcccccgaggtcggggccggcgagggagagcccccggcaggccggacctgagctcccccgcgctcgcgacgaggaggatcccgagccgccggtggctgcccctgacgccctctaggccagcaggacccgcccgttcccgaccttccctcgagacccgccaagaaataaaggcgatgatttccgaccatg

SEQ ID NO: 188025 - DNA, 1231 bp, Homo sapiens
  Payload ID: 17004
  Gene Symbol: SYCE2
  Gene Name: synaptonemal complex central element protein 2
  Uniprot ID: Q6PIF2
  ENST ID: ENST00000293695
  CDS Start-End: 20-676
gaaggcgggaaaatacggaatggagcgacagggagtggacgtgccccatgtgaaatgcaaagaccaggaaccgcagcccttgggggagagcaaggagcatccgcggtgggaagagaactgcgaggaggaagctggtggagggccagctagtgccagttgccagctgacggtcctggaagggaagtcgggactctacttctcctctctggactcaagcattgacatcctgcagaagagagcccaggagctgatcgaaaacatcaacaagagccggcaaaaggaccatgcactcatgaccaacttcaggaacagcctgaagaccaaggtttcggatctgacagagaaattagaggagaggatctatcagatttataatgaccacaacaagatcatccaggaaaagctccaagagttcacccagaaaatggcaaagatcagccatttggagacagagctcaaacaagtctgccacagcgtggagactgtgtacaaagacctgtgtctccagcctgagcagagcctaagactcagatgggggccagaccactctaggggaaagtccccaccacgtcccggcaactcacagcccccagacgtgttcgtttcttctgtggctgaaactacttctcaggccactgcttcagaagtacagaccaacagagatggtgaatgctgacagctgccgggagactcacgccttagtgacagtctccaggagaagactgtgaggccaccatttgggccacactgagaaattgtttttcatggttctataatgcatcttggcagaaaaaaacaaaaacccaaagctccttgtgctgaactcccaaaatgtagcaagtccagcccctgccataggcccaggcttcgtgctccccacccttggcaagttctccccacccccagccccacagtttattaaatgtttgattttcaacctggccacgcttccttgccacagaggctgaaagcacccctgagctccaaggaaacacagcaagccctttcttaccctcgggagggataggagggacagcacatcggaagagcagtcacttgcctcagctgacctctgcccatctgaagccgcctctcccagagaatcccacaccccatgccctggtgtctcatcctttgctcctccccagctccttgaagcagaaggcagattgtagcctcctttttagagccaattctgtttacttcctaaagtacaaacctatttttttta

SEQ ID NO: 188026 - DNA, 489 bp, Homo sapiens
  Payload ID: 17004
  Gene Symbol: SYCE2
  Gene Name: synaptonemal complex central element protein 2
  ENST ID: ENST00000592819
  CDS Start-End: 1-163
caaagacctgtgtctccagcctgagagcctaagactcagatgggggccagaccactctaggggaaagtccccaccacgtcccggcaactcacagcccccagacgtgttcgtttcttctgtggctgaaactacttctcaggtggttaccagtaaaccggcctgacaccttggggtcagatgtgcaggccactgcttcagaagtacagaccaacagagatggtgaatgctgacagctgccgggagactcacgccttagtgacagtctccaggagaagactgtgaggccaccatttgggccacactgagaaattgtttttcatggttctataatgcatcttggcagaaaaaaacaaaaacccaaagctccttgtgctgaactcccaaaatgtagcaagtccagcccctgccataggcccaggcttcgtgctccccacccttggcaagttctccccacccccagccccacagtttattaaatgtttgattttc

SEQ ID NO: 188027 - DNA, 342 bp, Homo sapiens
  Payload ID: 17005
  Gene Symbol: SYCE3
  Gene Name: synaptonemal complex central element protein 3
  Uniprot ID: A1L190
  ENST ID: ENST00000402753
  CDS Start-End: 28-294
tgcagcttctttctgtgcattgcctagatggatgatgctgaccctgaggaaagaaactatgacaacatgctgaaaatgctgtcagatctgaataaggacttggaaaagctattagaagagatggagaaaatctcagtgcaggcgacctggatggcctatgacatggtggtgatgcgcaccaaccctacgctggccgagtccatgcgtcggctggaggatgccttcgtcaactgcaaggaggagatggagaagaactggcaagagctgctgcatgagaccaagcaaaggctgtaggccccactggcccaccacagctgccatgccaccctctgcccgtatgaa

SEQ ID NO: 188028 - DNA, 448 bp, Homo sapiens
  Payload ID: 17005
  Gene Symbol: SYCE3
  Gene Name: synaptonemal complex central element protein 3
  Uniprot ID: A1L190
  ENST ID: ENST00000406915
  CDS Start-End: 49-315
ggccgctgggggcgccagagcaggaccggagcgcgggccaagctggagatggatgatgctgaccctgaggaaagaaactatgacaacatgctgaaaatgctgtcagatctgaataaggacttggaaaagctattagaagagatggagaaaatctcagtgcaggcgacctggatggcctatgacatggtggtgatgcgcaccaaccctacgctggccgagtccatgcgtcggctggaggatgccttcgtcaactgcaaggaggagatggagaagaactggcaagagctgctgcatgagaccaagcaaaggctgtaggccccactggcccaccacagctgccatgccaccctctgcccgtatgaagaggtcactgggggatggagctggcacccacatgaatagctgtatgcactgtacttgtttcttaataaacttatttttaagcaca

SEQ ID NO: 188029 - DNA, 3452 bp, Homo sapiens
  Payload ID: 17006
  Gene Symbol: SYCP1
  Gene Name: synaptonemal complex protein 1
  Uniprot ID: Q15431
  ENST ID: ENST00000369518
  CDS Start-End: 174-3104
caggaacttaagacagttcctcctggcgatgtgatggaatttaatgggacaggagaagggaacgggctttcttttcaggccagcgtggcagcgggcggtagggcgaaagggagaaggaaacgagggtttattccgttgcccactccgcgatatttacaaccgtaacagagaaaatggaaaagcaaaagccctttgcattgttcgtaccaccgagatcaagcagcagtcaggtgtctgcggtgaaacctcagaccctgggaggcgattccactttcttcaagagtttcaacaaatgtactgaagatgattttgagtttccatttgcaaagactaatctctccaaaaatggggaaaacattgattcagatcctgctttacaaaaagttaatttcttgcccgtgcttgagcaggttggtaattctgactgtcactatcaggaaggactaaaagactctgatttggagaattcagagggattgagcagagtgtattcaaaactgtataaggaggctgaaaagataaaaaaatggaaagtaagtacagaagctgaactgagacagaaagaaagtaagttgcaagaaaacagaaagataattgaagcacagcgaaaagccattcaggaactgcaatttggaaatgaaaaagtaagtttgaaattagaagaaggaatacaagaaaataaagatttaataaaagagaataatgccacaaggcatttatgtaatctactcaaagaaacctgtgctagatctgcagaaaagacaaagaaatatgaatatgaacgggaagaaaccaggcaagtttatatggatctaaataataacattgagaaaatgataacagcttttgaggaacttcgtgtgcaagctgagaattccagactggaaatgcattttaagttaaaggaagattatgaaaaaatccaacaccttgaacaagaatacaagaaggaaataaatgacaaggaaaagcaggtatcactactattgatccaaatcactgagaaagaaaataaaatgaaagatttaacatttctgctagaggaatccagagataaagttaatcaattagaggaaaagacaaaattacagagtgaaaacttaaaacaatcaattgagaaacagcatcatttgactaaagaactagaagatattaaagtgtcattacaaagaagtgtgagtactcaaaaggctttagaggaagatttacagatagcaacaaaaacaatttgtcagctaactgaagaaaaagaaactcaaatggaagaatctaataaagctagagctgctcattcgtttgtggttactgaatttgaaactactgtctgcagcttggaagaattattgagaacagaacagcaaagattggaaaaaaatgaagatcaattgaaaatacttaccatggagcttcaaaagaaatcaagtgagctggaagagatgactaagcttacaaataacaaagaagtagaacttgaagaattgaaaaaagtcttgggagaaaaggaaacacttttatatgaaaataaacaatttgagaagattgctgaagaattaaaaggaacagaacaagaactaattggtcttctccaagccagagagaaagaagtacatgatttggaaatacagttaactgccattaccacaagtgaacagtattattcaaaagaggttaaagatctaaaaactgagcttgaaaacgagaagcttaagaatactgaattaacttcacactgcaacaagctttcactagaaaacaaagagctcacacaggaaacaagtgatatgaccctagaactcaagaatcagcaagaagatattaataataacaaaaagcaagaagaaaggatgttgaaacaaatagaaaatcttcaagaaacagaaacccaattaagaaatgaactagaatatgtgagagaagagctaaaacagaaaagagatgaagttaaatgtaaattggacaagagtgaagaaaattgtaacaatttaaggaaacaagttgaaaataaaaacaagtatattgaagaacttcagcaggagaataaggccttgaaaaaaaaaggtacagcagaaagcaagcaactgaatgtttatgagataaaggtcaataaattagagttagaactagaaagtgccaaacagaaatttggagaaatcacagacacctatcagaaagaaattgaggacaaaaagatatcagaagaaaatcttttggaagaggttgagaaagcaaaagtaatagctgatgaagcagtaaaattacagaaagaaattgataagcgatgtcaacataaaatagctgaaatggtagcacttatggaaaaacataagcaccaatatgataagatcattgaagaaagagactcagaattaggactttataagagcaaagaacaagaacagtcatcactgagagcatctttggagattgaactatccaatctcaaagctgaacttttgtctgttaagaagcaacttgaaatagaaagagaagagaaggaaaaactcaaaagagaggcaaaagaaaacacagctactcttaaagaaaaaaaagacaagaaaacacaaacatttttattggaaacacctgaaatttattggaaattggattctaaagcagttccttcacaaactgtatctcgaaatttcacatcagttgatcatggcatatccaaagataaaagagactatctgtggacatctgccaaaaatactttatctacaccattgccaaaggcatatacagtgaagacaccaacaaaaccaaaactacagcaaagagaaaacttgaatatacccattgaagaaagtaaaaaaaagagaaaaatggcctttgaatttgatattaattcagatagttcagaaactactgatcttttgagcatggtttcagaagaagagacattgaaaacactgtataggaacaataatccaccagcttctcatctttgtgtcaaaacaccaaaaaaggccccttcatctctaacaacccctggatctacactgaagtttggagctataagaaaaatgcgggaggaccgttgggctgtaattgctaaaatggatagaaaaaaaaaactaaaagaagctgaaaagttatttgtttaatttcagagaatcagtgtagttaaggagcctaataacgtgaaacttatagttaatattttgttcttatttgccagagccaaattttatctggaagttgagacttaaaaaatacttgcatgaatgatttgtgtttctttatatttttagcctaaatgttaactacatattgtctggaaacctgtcattgtattcagataattagatgattatatattgttgttactttttcttgtattcatgaaaactgtttttactaagttttcaaatttgtaaagttagcctttgaatgctaagaatgcattattgagggtcattctttattctttactattaaaatattttggatgc

SEQ ID NO: 188030 - DNA, 3522 bp, Homo sapiens
  Payload ID: 17006
  Gene Symbol: SYCP1
  Gene Name: synaptonemal complex protein 1
  Uniprot ID: Q15431
  ENST ID: ENST00000369522
  CDS Start-End: 241-3171
ctgggagcctggcaagcccacacagcgacggttatttagccgttgaactgccagccgcccggggcccacgcgctccgggccgctcaggctgagcgatttcccgccttttctgaggttctgaggcgggagccattggttctttctgttgccctcatagaccgtatgtagcagttcgcgtgggcacagaacccacggtttcccgctagttcttcaaagatatttacaaccgtaacagagaaaatggaaaagcaaaagccctttgcattgttcgtaccaccgagatcaagcagcagtcaggtgtctgcggtgaaacctcagaccctgggaggcgattccactttcttcaagagtttcaacaaatgtactgaagatgattttgagtttccatttgcaaagactaatctctccaaaaatggggaaaacattgattcagatcctgctttacaaaaagttaatttcttgcccgtgcttgagcaggttggtaattctgactgtcactatcaggaaggactaaaagactctgatttggagaattcagagggattgagcagagtgtattcaaaactgtataaggaggctgaaaagataaaaaaatggaaagtaagtacagaagctgaactgagacagaaagaaagtaagttgcaagaaaacagaaagataattgaagcacagcgaaaagccattcaggaactgcaatttggaaatgaaaaagtaagtttgaaattagaagaaggaatacaagaaaataaagatttaataaaagagaataatgccacaaggcatttatgtaatctactcaaagaaacctgtgctagatctgcagaaaagacaaagaaatatgaatatgaacgggaagaaaccaggcaagtttatatggatctaaataataacattgagaaaatgataacagcttttgaggaacttcgtgtgcaagctgagaattccagactggaaatgcattttaagttaaaggaagattatgaaaaaatccaacaccttgaacaagaatacaagaaggaaataaatgacaaggaaaagcaggtatcactactattgatccaaatcactgagaaagaaaataaaatgaaagatttaacatttctgctagaggaatccagagataaagttaatcaattagaggaaaagacaaaattacagagtgaaaacttaaaacaatcaattgagaaacagcatcatttgactaaagaactagaagatattaaagtgtcattacaaagaagtgtgagtactcaaaaggctttagaggaagatttacagatagcaacaaaaacaatttgtcagctaactgaagaaaaagaaactcaaatggaagaatctaataaagctagagctgctcattcgtttgtggttactgaatttgaaactactgtctgcagcttggaagaattattgagaacagaacagcaaagattggaaaaaaatgaagatcaattgaaaatacttaccatggagcttcaaaagaaatcaagtgagctggaagagatgactaagcttacaaataacaaagaagtagaacttgaagaattgaaaaaagtcttgggagaaaaggaaacacttttatatgaaaataaacaatttgagaagattgctgaagaattaaaaggaacagaacaagaactaattggtcttctccaagccagagagaaagaagtacatgatttggaaatacagttaactgccattaccacaagtgaacagtattattcaaaagaggttaaagatctaaaaactgagcttgaaaacgagaagcttaagaatactgaattaacttcacactgcaacaagctttcactagaaaacaaagagctcacacaggaaacaagtgatatgaccctagaactcaagaatcagcaagaagatattaataataacaaaaagcaagaagaaaggatgttgaaacaaatagaaaatcttcaagaaacagaaacccaattaagaaatgaactagaatatgtgagagaagagctaaaacagaaaagagatgaagttaaatgtaaattggacaagagtgaagaaaattgtaacaatttaaggaaacaagttgaaaataaaaacaagtatattgaagaacttcagcaggagaataaggccttgaaaaaaaaaggtacagcagaaagcaagcaactgaatgtttatgagataaaggtcaataaattagagttagaactagaaagtgccaaacagaaatttggagaaatcacagacacctatcagaaagaaattgaggacaaaaagatatcagaagaaaatcttttggaagaggttgagaaagcaaaagtaatagctgatgaagcagtaaaattacagaaagaaattgataagcgatgtcaacataaaatagctgaaatggtagcacttatggaaaaacataagcaccaatatgataagatcattgaagaaagagactcagaattaggactttataagagcaaagaacaagaacagtcatcactgagagcatctttggagattgaactatccaatctcaaagctgaacttttgtctgttaagaagcaacttgaaatagaaagagaagagaaggaaaaactcaaaagagaggcaaaagaaaacacagctactcttaaagaaaaaaaagacaagaaaacacaaacatttttattggaaacacctgaaatttattggaaattggattctaaagcagttccttcacaaactgtatctcgaaatttcacatcagttgatcatggcatatccaaagataaaagagactatctgtggacatctgccaaaaatactttatctacaccattgccaaaggcatatacagtgaagacaccaacaaaaccaaaactacagcaaagagaaaacttgaatatacccattgaagaaagtaaaaaaaagagaaaaatggcctttgaatttgatattaattcagatagttcagaaactactgatcttttgagcatggtttcagaagaagagacattgaaaacactgtataggaacaataatccaccagcttctcatctttgtgtcaaaacaccaaaaaaggccccttcatctctaacaacccctggatctacactgaagtttggagctataagaaaaatgcgggaggaccgttgggctgtaattgctaaaatggatagaaaaaaaaaactaaaagaagctgaaaagttatttgtttaatttcagagaatcagtgtagttaaggagcctaataacgtgaaacttatagttaatattttgttcttatttgccagagccaaattttatctggaagttgagacttaaaaaatacttgcatgaatgatttgtgtttctttatatttttagcctaaatgttaactacatattgtctggaaacctgtcattgtattcagataattagatgattatatattgttgttactttttcttgtattcatgaaaactgtttttactaagttttcaaatttgtaaagttagcctttgaatgctaagaatgcattattgagggtcattctttattctttactattaaaatattttggatgcaaa

SEQ ID NO: 188031 - DNA, 2554 bp, Homo sapiens
  Payload ID: 17006
  Gene Symbol: SYCP1
  Gene Name: synaptonemal complex protein 1
  ENST ID: ENST00000455987
  CDS Start-End: 179-2554
ccacgcgctccgggccgctcaggctgagcgatttcccgccttttctgaggttctgaggcgggagccattggttctttctgttgccctcatagaccgtatgtagcagttcgcgtgggcacagaacccacggtttcccgctagttcttcaaagtagatatttacaaccgtaacagagaaaatggaaaagcaaaagccctttgcattgttcgtaccaccgagatcaagcagcagtcaggtgtctgcggtgaaacctcagaccctgggaggcgattccactttcttcaagagtttcaacaaatgtactgaagatgattttgagtttccatttgcaaagactaatctctccaaaaatggggaaaacattgattcagatcctgctttacaaaaagttaatttcttgcccgtgcttgagcaggttggtaattctgactgtcactatcaggaaggactaaaagactctgatttggagaattcagagggattgagcagagtgtattcaaaactgtataaggaggctgaaaagataaaaaaatggaaagtaagtacagaagctgaactgagacagaaagaaagtaagttgcaagaaaacagaaagataattgaagcacagcgaaaagccattcaggaactgcaatttggaaatgaaaaagtaagtttgaaattagaagaaggaatacaagaaaataaagatttaataaaagagaataatgccacaaggcatttatgtaatctactcaaagaaacctgtgctagatctgcagaaaagacaaagaaatatgaatatgaacgggaagaaaccaggcaagtttatatggatctaaataataacattgagaaaatgataacagcttttgaggaacttcgtgtgcaagctgagaattccagactggaaatgcattttaagttaaaggaagattatgaaaaaatccaacaccttgaacaagaatacaagaaggaaataaatgacaaggaaaagcaggtatcactactattgatccaaatcactgagaaagaaaataaaatgaaagatttaacatttctgctagaggaatccagagataaagttaatcaattagaggaaaagacaaaattacagagtgaaaacttaaaacaatcaattgagaaacagcatcatttgactaaagaactagaagatattaaagtgtcattacaaagaagtgtgagtactcaaaaggctttagaggaagatttacagatagcaacaaaaacaatttgtcagctaactgaagaaaaagaaactcaaatggaagaatctaataaagctagagctgctcattcgtttgtggttactgaatttgaaactactgtctgcagcttggaagaattattgagaacagaacagcaaagattggaaaaaaatgaagatcaattgaaaatacttaccatggagcttcaaaagaaatcaagtgagctggaagagatgactaagcttacaaataacaaagaagtagaacttgaagaattgaaaaaagtcttgggagaaaaggaaacacttttatatgaaaataaacaatttgagaagattgctgaagaattaaaaggaacagaacaagaactaattggtcttctccaagccagagagaaagaagtacatgatttggaaatacagttaactgccattaccacaagtgaacagtattattcaaaagaggttaaagatctaaaaactgagcttgaaaacgagaagcttaagaatactgaattaacttcacactgcaacaagctttcactagaaaacaaagagctcacacaggaaacaagtgatatgaccctagaactcaagaatcagcaagaagatattaataataacaaaaagcaagaagaaaggatgttgaaacaaatagaaaatcttcaagaaacagaaacccaattaagaaatgaactagaatatgtgagagaagagctaaaacagaaaagagatgaagttaaatgtaaattggacaagagtgaagaaaattgtaacaatttaaggaaacaagttgaaaataaaaacaagtatattgaagaacttcagcaggagaataaggccttgaaaaaaaaaggtacagcagaaagcaagcaactgaatgtttatgagataaaggtcaataaattagagttagaactagaaagtgccaaacagaaatttggagaaatcacagacacctatcagaaagaaattgaggacaaaaagatatcagaagaaaatcttttggaagaggttgagaaagcaaaagtaatagctgatgaagcagtaaaattacagaaagaaattgataagcgatgtcaacataaaatagctgaaatggtagcacttatggaaaaacataagcaccaatatgataagatcattgaagaaagagactcagaattaggactttataagagcaaagaacaagaacagtcatcactgagagcatctttggagattgaactatccaatctcaaagctgaacttttgtctgttaagaagcaacttgaaatagaaagagaagagaaggaaaaactcaaaagagaggcaaaagaaaacacagctactcttaaagaaaaaaaa

SEQ ID NO: 188032 - DNA, 3109 bp, Homo sapiens
  Payload ID: 17006
  Gene Symbol: SYCP1
  Gene Name: synaptonemal complex protein 1
  Uniprot ID: Q15431
  ENST ID: ENST00000618516
  CDS Start-End: 179-3109
ccacgcgctccgggccgctcaggctgagcgatttcccgccttttctgaggttctgaggcgggagccattggttctttctgttgccctcatagaccgtatgtagcagttcgcgtgggcacagaacccacggtttcccgctagttcttcaaagtagatatttacaaccgtaacagagaaaatggaaaagcaaaagccctttgcattgttcgtaccaccgagatcaagcagcagtcaggtgtctgcggtgaaacctcagaccctgggaggcgattccactttcttcaagagtttcaacaaatgtactgaagatgattttgagtttccatttgcaaagactaatctctccaaaaatggggaaaacattgattcagatcctgctttacaaaaagttaatttcttgcccgtgcttgagcaggttggtaattctgactgtcactatcaggaaggactaaaagactctgatttggagaattcagagggattgagcagagtgtattcaaaactgtataaggaggctgaaaagataaaaaaatggaaagtaagtacagaagctgaactgagacagaaagaaagtaagttgcaagaaaacagaaagataattgaagcacagcgaaaagccattcaggaactgcaatttggaaatgaaaaagtaagtttgaaattagaagaaggaatacaagaaaataaagatttaataaaagagaataatgccacaaggcatttatgtaatctactcaaagaaacctgtgctagatctgcagaaaagacaaagaaatatgaatatgaacgggaagaaaccaggcaagtttatatggatctaaataataacattgagaaaatgataacagcttttgaggaacttcgtgtgcaagctgagaattccagactggaaatgcattttaagttaaaggaagattatgaaaaaatccaacaccttgaacaagaatacaagaaggaaataaatgacaaggaaaagcaggtatcactactattgatccaaatcactgagaaagaaaataaaatgaaagatttaacatttctgctagaggaatccagagataaagttaatcaattagaggaaaagacaaaattacagagtgaaaacttaaaacaatcaattgagaaacagcatcatttgactaaagaactagaagatattaaagtgtcattacaaagaagtgtgagtactcaaaaggctttagaggaagatttacagatagcaacaaaaacaatttgtcagctaactgaagaaaaagaaactcaaatggaagaatctaataaagctagagctgctcattcgtttgtggttactgaatttgaaactactgtctgcagcttggaagaattattgagaacagaacagcaaagattggaaaaaaatgaagatcaattgaaaatacttaccatggagcttcaaaagaaatcaagtgagctggaagagatgactaagcttacaaataacaaagaagtagaacttgaagaattgaaaaaagtcttgggagaaaaggaaacacttttatatgaaaataaacaatttgagaagattgctgaagaattaaaaggaacagaacaagaactaattggtcttctccaagccagagagaaagaagtacatgatttggaaatacagttaactgccattaccacaagtgaacagtattattcaaaagaggttaaagatctaaaaactgagcttgaaaacgagaagcttaagaatactgaattaacttcacactgcaacaagctttcactagaaaacaaagagctcacacaggaaacaagtgatatgaccctagaactcaagaatcagcaagaagatattaataataacaaaaagcaagaagaaaggatgttgaaacaaatagaaaatcttcaagaaacagaaacccaattaagaaatgaactagaatatgtgagagaagagctaaaacagaaaagagatgaagttaaatgtaaattggacaagagtgaagaaaattgtaacaatttaaggaaacaagttgaaaataaaaacaagtatattgaagaacttcagcaggagaataaggccttgaaaaaaaaaggtacagcagaaagcaagcaactgaatgtttatgagataaaggtcaataaattagagttagaactagaaagtgccaaacagaaatttggagaaatcacagacacctatcagaaagaaattgaggacaaaaagatatcagaagaaaatcttttggaagaggttgagaaagcaaaagtaatagctgatgaagcagtaaaattacagaaagaaattgataagcgatgtcaacataaaatagctgaaatggtagcacttatggaaaaacataagcaccaatatgataagatcattgaagaaagagactcagaattaggactttataagagcaaagaacaagaacagtcatcactgagagcatctttggagattgaactatccaatctcaaagctgaacttttgtctgttaagaagcaacttgaaatagaaagagaagagaaggaaaaactcaaaagagaggcaaaagaaaacacagctactcttaaagaaaaaaaagacaagaaaacacaaacatttttattggaaacacctgaaatttattggaaattggattctaaagcagttccttcacaaactgtatctcgaaatttcacatcagttgatcatggcatatccaaagataaaagagactatctgtggacatctgccaaaaatactttatctacaccattgccaaaggcatatacagtgaagacaccaacaaaaccaaaactacagcaaagagaaaacttgaatatacccattgaagaaagtaaaaaaaagagaaaaatggcctttgaatttgatattaattcagatagttcagaaactactgatcttttgagcatggtttcagaagaagagacattgaaaacactgtataggaacaataatccaccagcttctcatctttgtgtcaaaacaccaaaaaaggccccttcatctctaacaacccctggatctacactgaagtttggagctataagaaaaatgcgggaggaccgttgggctgtaattgctaaaatggatagaaaaaaaaaactaaaagaagctgaaaagttatttgtttaa

SEQ ID NO: 188033 - DNA, 3034 bp, Homo sapiens
  Payload ID: 17006
  Gene Symbol: SYCP1
  Gene Name: synaptonemal complex protein 1
  ENST ID: ENST00000613524
  CDS Start-End: 179-3034
ccacgcgctccgggccgctcaggctgagcgatttcccgccttttctgaggttctgaggcgggagccattggttctttctgttgccctcatagaccgtatgtagcagttcgcgtgggcacagaacccacggtttcccgctagttcttcaaagtagatatttacaaccgtaacagagaaaatggaaaagcaaaagccctttgcattgttcgtaccaccgagatcaagcagcagtcaggtgtctgcggtgaaacctcagaccctgggaggcgattccactttcttcaagagtttcaacaaatgtactgaagatgattttgagtttccatttgcaaagactaatctctccaaaaatggggaaaacattgattcagatcctgctttacaaaaagttaatttcttgcccgtgcttgagcaggttggtaattctgactgtcactatcaggaaggactaaaagactctgatttggagaattcagagggattgagcagagtgtattcaaaactgtataaggaggctgaaaagataaaaaaatggaaagtaagtacagaagctgaactgagacagaaagaaagtaagttgcaagaaaacagaaagataattgaagcacagcgaaaagccattcaggaactgcaatttggaaatgaaaaagtaagtttgaaattagaagaaggaatacaagaaaataaagatttaataaaagagaataatgccacaaggcatttatgtaatctactcaaagaaacctgtgctagatctgcagaaaagacaaagaaatatgaatatgaacgggaagaaaccaggcaagtttatatggatctaaataataacattgagaaaatgataacagcttttgaggaacttcgtgtgcaagctgagaattccagactggaaatgcattttaagttaaaggaagattatgaaaaaatccaacaccttgaacaagaatacaagaaggaaataaatgacaaggaaaagcaggtatcactactattgatccaaatcactgagaaagaaaataaaatgaaagatttaacatttctgctagaggaatccagagataaagttaatcaattagaggaaaagacaaaattacagagtgaaaacttaaaacaatcaattgagaaacagcatcatttgactaaagaactagaagatattaaagtgtcattacaaagaagtgtgagtactcaaaaggctttagaggaagatttacagatagcaacaaaaacaatttgtcagctaactgaagaaaaagaaactcaaatggaagaatctaataaagctagagctgctcattcgtttgtggttactgaatttgaaactactgtctgcagcttggaagaattattgagaacagaacagcaaagattggaaaaaaatgaagatcaattgaaaatacttaccatggagcttcaaaagaaatcaagtgagctggaagagatgactaagcttacaaataacaaagaagtagaacttgaagaattgaaaaaagtcttgggagaaaaggaaacacttttatatgaaaataaacaatttgagaagattgctgaagaattaaaaggaacagaacaagaactaattggtcttctccaagccagagagaaagaagtacatgatttggaaatacagttaactgccattaccacaagtgaacagtattattcaaaagaggttaaagatctaaaaactgagcttgaaaacgagaagcttaagaatactgaattaacttcacactgcaacaagctttcactagaaaacaaagagctcacacaggaaacaagtgatatgaccctagaactcaagaatcagcaagaagatattaataataacaaaaagcaagaagaaaggatgttgaaacaaatagaaaatcttcaagaaacagaaacccaattaagaaatgaactagaatatgtgagagaagagctaaaacagaaaagagatgaagttaaatgtaaattggacaagagtgaagaaaattgtaacaatttaaggaaacaagttgaaaataaaaacaagtatattgaagaacttcagcaggagaataaggccttgaaaaaaaaaggtacagcagaaagcaagcaactgaatgtttatgagataaaggtcaataaattagagttagaactagaaagtgccaaacagaaatttggagaaatcacagacacctatcagaaagaaattgaggacaaaaagatatcagaagaaaatcttttggaagaggttgagaaagcaaaagtaatagctgatgaagcagtaaaattacagaaagaaattgataagcgatgtcaacataaaatagctgaaatggtagcacttatggaaaaacataagcaccaatatgataagatcattgaagaaagagactcagaattaggactttataagagcaaagaacaagaacagtcatcactgagagcatctttggaaaaactcaaaagagaggcaaaagaaaacacagctactcttaaagaaaaaaaagacaagaaaacacaaacatttttattggaaacacctgaaatttattggaaattggattctaaagcagttccttcacaaactgtatctcgaaatttcacatcagttgatcatggcatatccaaagataaaagagactatctgtggacatctgccaaaaatactttatctacaccattgccaaaggcatatacagtgaagacaccaacaaaaccaaaactacagcaaagagaaaacttgaatatacccattgaagaaagtaaaaaaaagagaaaaatggcctttgaatttgatattaattcagatagttcagaaactactgatcttttgagcatggtttcagaagaagagacattgaaaacactgtataggaacaataatccaccagcttctcatctttgtgtcaaaacaccaaaaaaggccccttcatctctaacaacccctggatctacactgaagtttggagctataagaaaaatgcgggaggaccgttgggctgtaattgctaaaatggatagaaaaaaaaaactaaaagaagctgaaaagttatttgtttaa

SEQ ID NO: 188034 - DNA, 5567 bp, Homo sapiens
  Payload ID: 17007
  Gene Symbol: SYCP2
  Gene Name: synaptonemal complex protein 2
  Uniprot ID: Q9BX26
  ENST ID: ENST00000357552
  CDS Start-End: 227-4819
tgcggcggtccctgaggcgcagagttgcgacgctcggcggcatagggggcggctccaccgacactacgcggacgcctcctgccgcagatacacaatcatcatcttactagttctctgtgttgctcgctaaccagtcccccagttcagtagactggagcccagagcctgcttacttgtcaggtgtttattttgtcttgctttttttttttttttaaatgaagtcaaaatgccaataagaccagatctccagcagttggaaaaatgcattgatgatgctttaagaaaaaatgatttcaaacctttgaaaacacttttgcaaattgatatttgtgaagatgtgaagattaaatgcagcaaacagtttttccacaaggtggacaaccttatatgcagggaacttaataaagaggatatccacaatgtttcagccattttggtttctgttggaagatgtggcaaaaatatcagtgtattggggcaagctggacttctaacgatgataaaacaaggactaatacaaaagatggttgcctggtttgaaaaatccaaggacattattcagagtcaaggaaattcaaaagatgaagctgttctaaatatgatagaagacttagttgatcttctgctggtcatacatgatgtcagtgatgaaggtaaaaaacaagtagtggaaagtttcgtacctcgcatttgttccctggttattgactcaagagtgaatatttgtattcagcaagagattataaaaaaaatgaatgctatgcttgacaaaatgcctcaagatgcccggaaaatactctctaaccaagaaatgttaattctcatgagtagtatgggagaaaggattttagatgctggagattatgacttacaggtaggcattgtagaagctttgtgtagaatgaccacagaaaaacaaagacaagaactggcacatcagtggttttcaatggattttattgctaaggcatttaaaagaattaaggactctgaatttgaaacagattgcaggatatttctcaaccttgtaaatggcatgcttggagacaaaagaagggtctttacatttccttgtttatcagcatttcttgataaatatgagctgcaaataccatcagatgaaaaacttgaggaattttggattgattttaatcttgggagtcagactctctcattctacattgctggagataatgatgatcatcaatgggaagcagttactgtgccagaggaaaaagtacaaatatacagcattgaagtgagagaatcaaagaagctactgacaataattctgaaaaatacagtaaaaattagcaaaagagaagggaaagaattgcttttgtattttgacgcatcactagaaatcactaatgtaactcaaaaaatttttggtgcaactaaacatagggaatctatcagaaaacaaggtatttcagttgccaaaacgtcgctgcatatactttttgacgcaagtggatcacagattctagtgccagaaagtcaaatctcaccagtcggagaagagctcgttagtttaaaggaaaaatcaaagtccccaaaggaatttgctaaaccttcaaaatatatcaaaaacagtgacaaagggaatagaaataatagtcagcttgagaaaactactcctagcaaaagaaaaatgtctgaagcatcaatgattgtttctggtgcagatagatacactatgagaagtccagtgcttttcagcaacacatcaataccaccacgaagaagaagaattaaaccaccactgcaaatgacgagctctgcagagaaacctagtgtttctcaaacatcagaaaatagagtggataatgctgcatcactgaaatctagatcatcagaaggaagacatagaagagataatatagacaaacatatcaaaactgctaagtgtgtagaaaacacagaaaataagaatgttgaattcccaaaccaaaattttagtgaactccaggatgttataccagattcacaggcagcggaaaaaagagatcatactatattacctggtgttttagacaacatctgtggaaataaaatacacagcaaatgggcatgttggacacctgtaacaaacattgaactatgtaataaccaaagagcaagtacttcgtcaggagacacattgaatcaagatattgttataaataaaaaacttactaaacaaaaatcatcctcttcaatatctgatcataattctgaaggaacaggaaaagtgaaatataagaaagaacaaaccgaccatatcaaaatagataaagcagaagtagaagtttgcaagaaacacaatcagcaacaaaatcatcctaaatattcagggcagaaaaatactgaaaatgccaagcagagtgattggcctgttgaatctgaaactacttttaaatcggttctcctaaataagacaattgaagaatcgctgatatataggaagaaatacatattgtcaaaagatgtgaatactgctacttgcgataaaaatccatctgctagcaaaaatgtgcaaagtcatagaaaagcagagaaagaattgacttctgagcttaattcctgggattcgaaacaaaaaaaaatgagagaaaagtcaaaagggaaagaatttaccaatgtagcagaatccttgataagccaaatcaataaaagatacaaaacaaaagatgacatcaagtctacaagaaaattaaaggagtctttgattaacagtggtttttcaaacaaacctgttgtacaactcagtaaggaaaaagttcagaaaaaaagctacagaaaactgaagactacctttgttaatgttacttctgaatgcccagtgaatgatgtttacaattttaatttgaatggagctgatgaccctatcataaaacttggaatccaagagtttcaagctacagctaaagaagcttgtgcggataggtcaattagattggtaggtccaaggaatcatgatgaacttaaatcttctgtcaaaacaaaagataaaaaaattataacaaatcatcaaaagaaaaatctgtttagtgatactgaaacagagtacagatgtgatgacagcaagactgatattagctggctaagagaaccgaaatcaaaaccacagctaatagactatagcagaaataaaaatgtgaagaatcataaaagtggaaaatcaagatcatccttggaaaagggacagccaagctctaaaatgacacccagtaaaaatatcacaaaaaagatggacaagacaattccggaaggaagaatcagacttccacgaaaagcaaccaaaacaaaaaaaaactataaagatctctcaaattcagaatcagagtgtgaacaagaattttcacattcatttaaagagaacataccagtaaaggaggagaatatccattccagaatgaaaacggtaaagctaccaaagaaacaacagaaagtcttctgtgctgaaacagaaaaggaactatcaaaacaatggaaaaactcatctctactaaaagatgctatacgagataattgccttgacttatctcccagatctttatctggcagtccatcatctatagaagtaacgagatgtatagagaaaataacagaaaaggattttactcaggattatgactgcataacaaaatctatatcaccttatccaaaaacttcatcacttgaatccttaaatagtaacagtggagttggaggtacaataaagtcacccaaaaacaatgagaaaaacttcctgtgtgcaagtgaaagttgttcaccaattccacgaccactgtttttgcccagacatactccaactaagagtaatactattgtaaatagaaaaaaaataagttctctggtacttacacaagaaacacaaaacagtaacagctattcagatgtaagcagttatagttcagaagaacggtttatggaaattgaatctccacatatcaatgaaaattatatacaaagcaaaagagaggaaagtcatttagcatcttcattatccaagtctagtgaaggaagagagaaaacgtggtttgacatgccctgtgatgctactcatgtatcaggccccacccaacatcttagtcgcaaaagaatatatatagaagataatctaagtaattccaatgaagtagaaatggaagagaaaggagaaaggagagcaaacttgcttcccaaaaaactgtgtaaaattgaagatgcagatcatcatatccacaaaatgtctgaaagtgtatcttcattatcaacaaatgacttttctattccttgggagacctggcaaaatgaatttgcagggatagagatgacttatgagacttacgagaggctcaattcagaatttaagagaaggaataatatccgacataaaatgttgagttattttactacgcagtcttggaaaacagctcagcaacatctgagaacaatgaatcatcaaagtcaggactctaggattaaaaaacttgataaattccaattcattatcatagaggagctggagaattttgaaaaagattcacagtctttaaaagatttggaaaaggaatttgtggacttttgggaaaagatatttcagaagttcagtgcatatcaaaaaagcgaacaacagaggcttcatcttttgaaaacttcattggctaaaagtgtcttctgtaatactgatagtgaagaaactgtttttacatccgagatgtgtttgatgaaagaagatatgaaagtgctgcaagacaggcttcttaaggacatgctagaagaggagcttcttaatgtacgcagagaactgatgtcagtattcatgtctcatgaaagaaatgctaatgtgtgaaatctagtttttatcaccatactttatctaattattattctctgtatataactgaggaaataagaatagtcctacaaagagaaaaatatacatgtcaccgaagcaagtgtaccctttataggaaccctcaaattaaaaaaaaatgtcttttaatggatgagagggaaccactataacatgagtccaagcccagaagacttctgtctatacaatatttttttttaattttggagataaaagctttaagaaactttttgagttaattatactcataaaatgagtttctttaataaattaaattttattgtgtaaaatgtattattacataaaatgtgtttttgaatcaatgcagtttggggatgaatataattaaaatatgtttaataacttagaattcaactaataaaaatttagccacacttacaagggggaggaagtccctagtttaaaatgtataactgagtggtagatcagtactttcagcacactgttggaaacatttattcagatatggctctaatgtattaggaagcactaaatggcctaaaaaagctactacattgcctaaatatgttaattcaatatagaagtcctatttcataaccaggctgtttgacaaatacttttaatctagtagtcattgtaatatcttgctagattaatttataaaaatgagtatacatttgatttgcttttaatgaagttgaaataaatgcttatgtcacttgaataaatataaatcattata

SEQ ID NO: 188035 - DNA, 5479 bp, Homo sapiens
  Payload ID: 17007
  Gene Symbol: SYCP2
  Gene Name: synaptonemal complex protein 2
  Uniprot ID: Q9BX26
  ENST ID: ENST00000371001
  CDS Start-End: 140-4732
atacacaatcatcatcttactagttctctgtgttgctcgctaaccagtcccccagttcagtagactggagcccagagcctgcttacttgtcaggtgtttattttgtcttgctttttttttttttttaaatgaagtcaaaatgccaataagaccagatctccagcagttggaaaaatgcattgatgatgctttaagaaaaaatgatttcaaacctttgaaaacacttttgcaaattgatatttgtgaagatgtgaagattaaatgcagcaaacagtttttccacaaggtggacaaccttatatgcagggaacttaataaagaggatatccacaatgtttcagccattttggtttctgttggaagatgtggcaaaaatatcagtgtattggggcaagctggacttctaacgatgataaaacaaggactaatacaaaagatggttgcctggtttgaaaaatccaaggacattattcagagtcaaggaaattcaaaagatgaagctgttctaaatatgatagaagacttagttgatcttctgctggtcatacatgatgtcagtgatgaaggtaaaaaacaagtagtggaaagtttcgtacctcgcatttgttccctggttattgactcaagagtgaatatttgtattcagcaagagattataaaaaaaatgaatgctatgcttgacaaaatgcctcaagatgcccggaaaatactctctaaccaagaaatgttaattctcatgagtagtatgggagaaaggattttagatgctggagattatgacttacaggtaggcattgtagaagctttgtgtagaatgaccacagaaaaacaaagacaagaactggcacatcagtggttttcaatggattttattgctaaggcatttaaaagaattaaggactctgaatttgaaacagattgcaggatatttctcaaccttgtaaatggcatgcttggagacaaaagaagggtctttacatttccttgtttatcagcatttcttgataaatatgagctgcaaataccatcagatgaaaaacttgaggaattttggattgattttaatcttgggagtcagactctctcattctacattgctggagataatgatgatcatcaatgggaagcagttactgtgccagaggaaaaagtacaaatatacagcattgaagtgagagaatcaaagaagctactgacaataattctgaaaaatacagtaaaaattagcaaaagagaagggaaagaattgcttttgtattttgacgcatcactagaaatcactaatgtaactcaaaaaatttttggtgcaactaaacatagggaatctatcagaaaacaaggtatttcagttgccaaaacgtcgctgcatatactttttgacgcaagtggatcacagattctagtgccagaaagtcaaatctcaccagtcggagaagagctcgttagtttaaaggaaaaatcaaagtccccaaaggaatttgctaaaccttcaaaatatatcaaaaacagtgacaaagggaatagaaataatagtcagcttgagaaaactactcctagcaaaagaaaaatgtctgaagcatcaatgattgtttctggtgcagatagatacactatgagaagtccagtgcttttcagcaacacatcaataccaccacgaagaagaagaattaaaccaccactgcaaatgacgagctctgcagagaaacctagtgtttctcaaacatcagaaaatagagtggataatgctgcatcactgaaatctagatcatcagaaggaagacatagaagagataatatagacaaacatatcaaaactgctaagtgtgtagaaaacacagaaaataagaatgttgaattcccaaaccaaaattttagtgaactccaggatgttataccagattcacaggcagcggaaaaaagagatcatactatattacctggtgttttagacaacatctgtggaaataaaatacacagcaaatgggcatgttggacacctgtaacaaacattgaactatgtaataaccaaagagcaagtacttcgtcaggagacacattgaatcaagatattgttataaataaaaaacttactaaacaaaaatcatcctcttcaatatctgatcataattctgaaggaacaggaaaagtgaaatataagaaagaacaaaccgaccatatcaaaatagataaagcagaagtagaagtttgcaagaaacacaatcagcaacaaaatcatcctaaatattcagggcagaaaaatactgaaaatgccaagcagagtgattggcctgttgaatctgaaactacttttaaatcggttctcctaaataagacaattgaagaatcgctgatatataggaagaaatacatattgtcaaaagatgtgaatactgctacttgcgataaaaatccatctgctagcaaaaatgtgcaaagtcatagaaaagcagagaaagaattgacttctgagcttaattcctgggattcgaaacaaaaaaaaatgagagaaaagtcaaaagggaaagaatttaccaatgtagcagaatccttgataagccaaatcaataaaagatacaaaacaaaagatgacatcaagtctacaagaaaattaaaggagtctttgattaacagtggtttttcaaacaaacctgttgtacaactcagtaaggaaaaagttcagaaaaaaagctacagaaaactgaagactacctttgttaatgttacttctgaatgcccagtgaatgatgtttacaattttaatttgaatggagctgatgaccctatcataaaacttggaatccaagagtttcaagctacagctaaagaagcttgtgcggataggtcaattagattggtaggtccaaggaatcatgatgaacttaaatcttctgtcaaaacaaaagataaaaaaattataacaaatcatcaaaagaaaaatctgtttagtgatactgaaacagagtacagatgtgatgacagcaagactgatattagctggctaagagaaccgaaatcaaaaccacagctaatagactatagcagaaataaaaatgtgaagaatcataaaagtggaaaatcaagatcatccttggaaaagggacagccaagctctaaaatgacacccagtaaaaatatcacaaaaaagatggacaagacaattccggaaggaagaatcagacttccacgaaaagcaaccaaaacaaaaaaaaactataaagatctctcaaattcagaatcagagtgtgaacaagaattttcacattcatttaaagagaacataccagtaaaggaggagaatatccattccagaatgaaaacggtaaagctaccaaagaaacaacagaaagtcttctgtgctgaaacagaaaaggaactatcaaaacaatggaaaaactcatctctactaaaagatgctatacgagataattgccttgacttatctcccagatctttatctggcagtccatcatctatagaagtaacgagatgtatagagaaaataacagaaaaggattttactcaggattatgactgcataacaaaatctatatcaccttatccaaaaacttcatcacttgaatccttaaatagtaacagtggagttggaggtacaataaagtcacccaaaaacaatgagaaaaacttcctgtgtgcaagtgaaagttgttcaccaattccacgaccactgtttttgcccagacatactccaactaagagtaatactattgtaaatagaaaaaaaataagttctctggtacttacacaagaaacacaaaacagtaacagctattcagatgtaagcagttatagttcagaagaacggtttatggaaattgaatctccacatatcaatgaaaattatatacaaagcaaaagagaggaaagtcatttagcatcttcattatccaagtctagtgaaggaagagagaaaacgtggtttgacatgccctgtgatgctactcatgtatcaggccccacccaacatcttagtcgcaaaagaatatatatagaagataatctaagtaattccaatgaagtagaaatggaagagaaaggagaaaggagagcaaacttgcttcccaaaaaactgtgtaaaattgaagatgcagatcatcatatccacaaaatgtctgaaagtgtatcttcattatcaacaaatgacttttctattccttgggagacctggcaaaatgaatttgcagggatagagatgacttatgagacttacgagaggctcaattcagaatttaagagaaggaataatatccgacataaaatgttgagttattttactacgcagtcttggaaaacagctcagcaacatctgagaacaatgaatcatcaaagtcaggactctaggattaaaaaacttgataaattccaattcattatcatagaggagctggagaattttgaaaaagattcacagtctttaaaagatttggaaaaggaatttgtggacttttgggaaaagatatttcagaagttcagtgcatatcaaaaaagcgaacaacagaggcttcatcttttgaaaacttcattggctaaaagtgtcttctgtaatactgatagtgaagaaactgtttttacatccgagatgtgtttgatgaaagaagatatgaaagtgctgcaagacaggcttcttaaggacatgctagaagaggagcttcttaatgtacgcagagaactgatgtcagtattcatgtctcatgaaagaaatgctaatgtgtgaaatctagtttttatcaccatactttatctaattattattctctgtatataactgaggaaataagaatagtcctacaaagagaaaaatatacatgtcaccgaagcaagtgtaccctttataggaaccctcaaattaaaaaaaaatgtcttttaatggatgagagggaaccactataacatgagtccaagcccagaagacttctgtctatacaatatttttttttaattttggagataaaagctttaagaaactttttgagttaattatactcataaaatgagtttctttaataaattaaattttattgtgtaaaatgtattattacataaaatgtgtttttgaatcaatgcagtttggggatgaatataattaaaatatgtttaataacttagaattcaactaataaaaatttagccacacttacaagggggaggaagtccctagtttaaaatgtataactgagtggtagatcagtactttcagcacactgttggaaacatttattcagatatggctctaatgtattaggaagcactaaatggcctaaaaaagctactacattgcctaaatatgttaattcaatatagaagtcctatttcataaccaggctgtttgacaaatacttttaatctagtagtcattgtaatatcttgctagattaatttataaaaatgagtatacatttgatttgcttttaatgaagttgaaataaatgcttatgtcacttgaataaatataaatcattat

SEQ ID NO: 188036 - DNA, 488 bp, Homo sapiens
  Payload ID: 17007
  Gene Symbol: SYCP2
  Gene Name: synaptonemal complex protein 2
  ENST ID: ENST00000425931
  CDS Start-End: 134-488
tgcggcggtccctgaggcgcagagttgcgacgctcggcggcatagggggcggctccaccgacactacgcggacgcctcctgccgcaggtgtttattttgtcttgctttttttttttttttaaatgaagtcaaaatgccaataagaccagatctccagttggaaaaatgcattgatgatgctttaagaaaaaatgatttcaaacctttgaaaacacttttgcaaattgatatttgtgaagatgtgaagattaaatgcagcaaacagtttttccacaaggtggacaaccttatatgcagggaacttaataaagaggatatccacaatgtttcagccattttggtttctgttggaagatgtggcaaaaatatcagtgtattggggcaagctggacttctaacgatgataaaacaaggactaatacaaaagatggttgcctggtttgaaaaatccaaggacattattcagagtcaaggaaattcaaaagatg

SEQ ID NO: 188037 - DNA, 3341 bp, Homo sapiens
  Payload ID: 17007
  Gene Symbol: SYCP2
  Gene Name: synaptonemal complex protein 2
  ENST ID: ENST00000446834
  CDS Start-End: 271-3341
tgcagagttcgcggcgagggtggctcgcgcaggcgcgaggctccccatcagcacctgcctggccagcctcggcctcggggatgggaaatgggcgctcggagccgcccccgcgcgtgggcgactcggtcaagatacacaatcatcatcttactagttctctgtgttgctcgctaaccagtcccccagttcagtagactggagcccagagcctgcttacttgtcaggtgtttattttgtcttgctttttttttttttttaaatgaagtcaaaatgccaataagaccagatctccagcagttggaaaaatgcattgatgatgctttaagaaaaaatgatttcaaacctttgaaaacacttttgcaaattgatatttgtgaagatgtgaagattaaatgcagcaaacagtttttccacaaggtggacaaccttatatgcagggaacttaataaagaggatatccacaatgtttcagccattttggtttctgttggaagatgtggcaaaaatatcagtgtattggggcaagctggacttctaacgatgataaaacaaggactaatacaaaagatggttgcctggtttgaaaaatccaaggacattattcagagtcaaggaaattcaaaagatgaagctgttctaaatatgatagaagacttagttgatcttctgctggtcatacatgatgtcagtgatgaaggtaaaaaacaagtagtggaaagtttcgtacctcgcatttgttccctggttattgactcaagagtgaatatttgtattcagcaagagattataaaaaaaatgaatgctatgcttgacaaaatgcctcaagatgcccggaaaatactctctaaccaagaaatgttaattctcatgagtagtatgggagaaaggattttagatgctggagattatgacttacaggtaggcattgtagaagctttgtgtagaatgaccacagaaaaacaaagacaagaactggcacatcagtggttttcaatggattttattgctaaggcatttaaaagaattaaggactctgaatttgaaacagattgcaggatatttctcaaccttgtaaatggcatgcttggagacaaaagaagggtctttacatttccttgtttatcagcatttcttgataaatatgagctgcaaataccatcagatgaaaaacttgaggaattttggattgattttaatcttgggagtcagactctctcattctacattgctggagataatgatgatcatcaatgggaagcagttactgtgccagaggaaaaagtacaaatatacagcattgaagtgagagaatcaaagaagctactgacaataattctgaaaaatacagtaaaaattagcaaaagagaagggaaagaattgcttttgtattttgacgcatcactagaaatcactaatgtaactcaaaaaatttttggtgcaactaaacatagggaatctatcagaaaacaaggtatttcagttgccaaaacgtcgctgcatatactttttgacgcaagtggatcacagattctagtgccagaaagtcaaatctcaccagtcggagaagagctcgttagtttaaaggaaaaatcaaagtccccaaaggaatttgctaaaccttcaaaatatatcaaaaacagtgacaaagggaatagaaataatagtcagcttgagaaaactactcctagcaaaagaaaaatgtctgaagcatcaatgattgtttctggtgcagatagatacactatgagaagtccagtgcttttcagcaacacatcaataccaccacgaagaagaagaattaaaccaccactgcaaatgacgagctctgcagagaaacctagtgtttctcaaacatcagaaaatagagtggataatgctgcatcactgaaatctagatcatcagaaggaagacatagaagagataatatagacaaacatatcaaaactgctaagtgtgtagaaaacacagaaaataagaatgttgaattcccaaaccaaaattttagtgaactccaggatgttataccagattcacaggcagcggaaaaaagagatcatactatattacctggtgttttagacaacatctgtggaaataaaatacacagcaaatgggcatgttggacacctgtaacaaacattgaactatgtaataaccaaagagcaagtacttcgtcaggagacacattgaatcaagatattgttataaataaaaaacttactaaacaaaaatcatcctcttcaatatctgatcataattctgaaggaacaggaaaagtgaaatataagaaagaacaaaccgaccatatcaaaatagataaagcagaagtagaagtttgcaagaaacacaatcagcaacaaaatcatcctaaatattcagggcagaaaaatactgaaaatgccaagcagagtgattggcctgttgaatctgaaactacttttaaatcggttctcctaaataagacaattgaagaatcgctgatatataggaagaaatacatattgtcaaaagatgtgaatactgctacttgcgataaaaatccatctgctagcaaaaatgtgcaaagtcatagaaaagcagagaaagaattgacttctgagcttaattcctgggattcgaaacaaaaaaaaatgagagaaaagtcaaaagggaaagaatttaccaatgtagcagaatccttgataagccaaatcaataaaagatacaaaacaaaagatgacatcaagtctacaagaaaattaaaggagtctttgattaacagtggtttttcaaacaaacctgttgtacaactcagtaaggaaaaagttcagaaaaaaagctacagaaaactgaagactacctttgttaatgttacttctgaatgcccagtgaatgatgtttacaattttaatttgaatggagctgatgaccctatcataaaacttggaatccaagagtttcaagctacagctaaagaagcttgtgcggataggtcaattagattggtaggtccaaggaatcatgatgaacttaaatcttctgtcaaaacaaaagataaaaaaattataacaaatcatcaaaagaaaaatctgtttagtgatactgaaacagagtacagatgtgatgacagcaagactgatattagctggctaagagaaccgaaatcaaaaccacagctaatagactatagcagaaataaaaatgtgaagaatcataaaagtggaaaatcaagatcatccttggaaaagggacagccaagctctaaaatgacacccagtaaaaatatcacaaaaaagatggacaagacaattccggaaggaagaatcagacttccacgaaaagcaaccaaaacaaaaaaaaa

SEQ ID NO: 188038 - DNA, 625 bp, Homo sapiens
  Payload ID: 17007
  Gene Symbol: SYCP2
  Gene Name: synaptonemal complex protein 2
  ENST ID: ENST00000412613
  CDS Start-End: 1-625
gagaaaacgtggtttgacatgccctgtgatgctactcatgtatcagtgtctgaaagtgtatcttcattatcaacaaatgacttttctattccttgggagacctggcaaaatgaatttgcagggatagagatgacttatgagacttacgagaggctcaattcagaatttaagagaaggaataatatccgacataaaatgttgagttattttactacgcagtcttggaaaacagctcagcaacatctgagaacaatgaatcatcaaagtcaggactctaggattaaaaaacttgataaattccaattcattatcatagaggagctggagaattttgaaaaagattcacagtctttaaaagatttggaaaaggaatttgtggacttttgggaaaagatatttcagaagttcagtgcatatcaaaaaagcgaacaacagaggcttcatcttttgaaaacttcattggctaaaagtgtcttctgtaatactgatagtgaagaaactgtttttacatccgagatgtgtttgatgaaagaagatatgaaagtgctgcaagacaggcttcttaaggacatgctagaagaggagcttcttaatgtacgcagagaactgatgtcagtattcatgt

SEQ ID NO: 188039 - DNA, 3130 bp, Homo sapiens
  Payload ID: 17008
  Gene Symbol: SYCP2L
  Gene Name: synaptonemal complex protein 2-like
  Uniprot ID: Q5T4T6
  ENST ID: ENST00000283141
  CDS Start-End: 297-2735
gagtgctggctttctcttaaagggtgagtgcgtgcgcccaggtggtttggcctgtgtgcgctagttacttgcacgcgcttcttgagtctcaaaacacagagctctagtaaacttcagggggcggattcgtcaattacagttgcggaagaagactcgactcgaagagcggtccgccaccagggctctttcggcagcgcccccagcgggcggggctcttgggcggggaagcaggagagggccgaccgagcgcaacaaagctgagcggcgcgtcgcttcaggaacgaagaagcctcgttatgcaagcgaaaaacaaagatgctttgcagcctattaaggaagacaggactgggaaggcccaggatgatgctttctggcttcaatcacttattacggatgcattccatgataaaggatttcagaaaataaaagaatactttcaacagaaagagagccactttcctcaaaaatataatcgtcttctattataccgtcttgacagatcaataaataaggaactagataaaaatgaatttcagtctgtgtcactgttgctgaaatgtattcagcgattcctcgtagatggcctgaaagaagatgaacctctgctaattcggcagggactgatcccaaagctagtttcctggtttgaaagaacaacaggaattctgacctcggaaggcctagcctcagacacgtcgctgatttgtgttatagaagatttctttgacactgcattgattatttccaggagtagtagtgaagggaaaattcagatgttggattccttcctacttagcttaggattcctggtgacagaaaagactgtaaatcatttgcttcaacaggagggcttgaagacttttaactgcattttgcacgctgtccctcgagaagagagaaaaaaattccctttgtcagaaggcatgtgtcatcttatgaaagaccttgcaaggacactcttgactgtgggtgattatgaccagcaggttgctatttctgaagcgctgtgtagactgacgattaaaaaatcaagggatgaacttgtccataaatggtttgatgatgaagtcattgctgaagctttcaaagaaattaaggatcgagaatttgagacggacagtagacgttttctcaatcacctaaacaacagacttggtgaccaaagaagggtgtattcatttccgtgtattgctgcttttgctgatgagcatgagatgagaaaaccagcggatgaaaaattagagaaattttggatcgacttcaacctaggaagtcagagtgtcactttttatatagacaatgctgagaatactctatgggactcagtgacacttccgaaggaagcggtgatgaatttcagcataacagaaacggagaagataaagatatttatcatttacctgaagaagcccatgattatcagctacaaagaagtcatgaaaatagaaatccattttgatttgcagttcaacatatcacaagtttccattcaagctttaggagaagacaaacagatgttgcctgaccagacgaaaatctcctcagaactttttagtaagtctgataaagaagacagggagagtcccagtggccttgaaagagaaacagagcaggcagaagaatccactaacatggtggagtttatgagtgctgaagatgaccgctgcctaataactctccacttaaatgaccaatctgagccacctgttattggggaacctgcctctgatagtcaccttcagccggtccctccgttcggggtccctgacttcccgcaacaacctaagtctcattacagaaaacatctcttctctgagagtaatcaagattcaagtaccagtgaactatcttggaccagtaaccagaaaaagaaatccctaaaatcatattccagtagaaagaagacaagaaccagaagtaatttgagaatcttgccagttttccctcccagtagtggcagtggccatgagaaagaccaagctaagcttctatcaccatcagagaaagaaatacccgagcaaaataacaccacatctccaaagacttctgaacaaaaattccaagatagttttgcttttttgactgctgaagattctgcccagaaaacagagcttcaagatcctcactcactgagtgagctctcttccttgaagcactcagaagatgaagaaaaacctaagattgtgaaccaagaatcactaacagaaagtactagcttgaaacataagctgagaaacttggaagacaaagacataccagaaggtagttttgctaagtcacaacaatcaagattggaagaagaggttgctccgggatcccctttctcaataacagaagaaagagagttgccagaaggaatttccacttcatccctagaagttgtgccagagaacttgaacggttctgccattctcccaacctttgaaaacttcactaaaaaacggaaaagaaaatatgagcttaggtacagaaagcgtccgtttaattcagaaaatgcaaagaaagcaccggattgcctaataaaacttttaaaccagatgcaactgttcagactcaataaactagagcgctttcaaaatttggttcttcaagagttgagcagtcttaagcaggatattcaggccctggaacaccttgagaaggaggttctggaattctgggggaaacagtctgctgatctgcaatctttctgtgatctgcaagtgctgaggttcaattcaactcagacttcataagaaagccaaagcctggttttatgattgcagccctcagcctgggctgcctgaagacgaagagaaagagcaaggttattgttggctcaggccttgttagccagacttcgtgctctgtacgcattcaatttcctcccctccaaacatcatccctgggaactgctgagttcagatagaatatatgttggtagtttgcagttgggttattatccatttgttcataaaaattaaccttttgtattaaaatttggtcagatagtattaatagaaagttcaggatgttaaacaacttggagtggtgttgctttttttttataaaagtaaaatggacttttttttgtttgagaaatgtcttcaagttttgtgtgaataaaacactttagcagcatctgtataaa

SEQ ID NO: 188040 - DNA, 3069 bp, Homo sapiens
  Payload ID: 17008
  Gene Symbol: SYCP2L
  Gene Name: synaptonemal complex protein 2-like
  Uniprot ID: Q5T4T6
  ENST ID: ENST00000341041
  CDS Start-End: 297-1172
gagtgctggctttctcttaaagggtgagtgcgtgcgcccaggtggtttggcctgtgtgcgctagttacttgcacgcgcttcttgagtctcaaaacacagagctctagtaaacttcagggggcggattcgtcaattacagttgcggaagaagactcgactcgaagagcggtccgccaccagggctctttcggcagcgcccccagcgggcggggctcttgggcggggaagcaggagagggccgaccgagcgcaacaaagctgagcggcgcgtcgcttcaggaacgaagaagcctcgttatgcaagcgaaaaacaaagatgctttgcagcctattaaggaagacaggactgggaaggcccaggatgatgctttctggcttcaatcacttattacggatgcattccatgataaaggatttcagaaaataaaagaatactttcaacagaaagagagccactttcctcaaaaatataatcgtcttctattataccgtcttgacagatcaataaataaggaactagataaaaatgaatttcagtctgtgtcactgttgctgaaatgtattcagcgattcctcgtagatggcctgaaagaagatgaacctctgctaattcggcagggactgatcccaaagctagtttcctggtttgaaagaacaacaggaattctgacctcggaaggcctagcctcagacacgtcgctgatttgtgttatagaagatttctttgacactgcattgattatttccaggagtagtagtgaagggaaaattcagatgttggattccttcctacttagcttaggattcctggtgacagaaaagactgtaaatcatttgcttcaacaggagggcttgaagacttttaactgcattttgcacgctgtccctcgagaagagagaaaaaaattccctttgtcagaaggcatgtgtcatcttatgaaagaccttgcaaggacactcttgactgtgggtgattatgaccagcaggttgctatttctgaagcgctgtgtagactgacgattaaaaaatcaagggatgaacttgtccataaatggtttgatgatgaagtcattgctgaagctttcaaagaaattaaggatcgagaatttgagacggacagtagacgttttctcaatcacctaaacaacagacttggtgaccaaagaagatgagaaaaccagcggatgaaaaattagagaaattttggatcgacttcaacctaggaagtcagagtgtcactttttatatagacaatgctgagaatactctatgggactcagtgacacttccgaaggaagcggtgatgaatttcagcataacagactttccctggagtgatgagtaaaatgtccggcaagattagtattttggggagatcatggaggcttactctagaccagcactgtcctatagaaatatgagaaacggagaagataaagatatttatcatttacctgaagaagcccatgattatcagctacaaagaagtcatgaaaatagaaatccattttgatttgcagttcaacatatcacaagtttccattcaagctttaggagaagacaaacagatgttgcctgaccagacgaaaatctcctcagaactttttagtaagtctgataaagaagacagggagagtcccagtggccttgaaagagaaacagagcaggcagaagaatccactaacatggtggagtttatgagtgctgaagatgaccgctgcctaataactctccacttaaatgaccaatctgagccacctgttattggggaacctgcctctgatagtcaccttcagccggtccctccgttcggggtccctgacttcccgcaacaacctaagtctcattacagaaaacatctcttctctgagagtaatcaagattcaagtaccagtgaactatcttggaccagtaaccagaaaaagaaatccctaaaatcatattccagtagaaagaagacaagaaccagaagtaatttgagaatcttgccagttttccctcccagtagtggcagtggccatgagaaagaccaagctaagcttctatcaccatcagagaaagaaatacccgagcaaaataacaccacatctccaaagacttctgaacaaaaattccaagatagttttgcttttttgactgctgaagattctgcccagaaaacagagcttcaagatcctcactcactgagtgagctctcttccttgaagcactcagaagatgaagaaaaacctaagattgtgaaccaagaatcactaacagaaagtactagcttgaaacataagctgagaaacttggaagacaaagacataccagaaggtagttttgctaagtcacaacaatcaagattggaagaagaggttgctccgggatcccctttctcaataacagaagaaagagagttgccagaaggaatttccacttcatccctagaagttgtgccagagaacttgaacggttctgccattctcccaacctttgaaaacttcactaaaaaacggaaaagaaaatatgagcttaggtacagaaagcgtccgtttaattcagaaaatgcaaagaaagcaccggattgcctaataaaacttttaaaccagatgcaactgttcagactcaataaactagagcgctttcaaaatttggttcttcaagagttgagcagtcttaagcaggatattcaggccctggaacaccttgagaaggaggttctggaattctgggggaaacagtctgctgatctgcaatctttctgtgatctgcaagtgctgaggttcaattcaactcagacttcataagaaagccaaagcctggttttatgattgcagccctcagcctgggctgcctgaagacgaagagaaagagcaaggttattgttggctcaggccttgttagccagacttcgtgctctgtacgcattcaatttcctcccctccaaacatcatccctgggaactgctgagttcagatagaatatatgttggtagtttgcagttgggttattatccatttgttcataaaaattaaccttttgtattaaaatttggtcagatagtattaatagaaagttcaggatgtt

SEQ ID NO: 188041 - DNA, 644 bp, Homo sapiens
  Payload ID: 17008
  Gene Symbol: SYCP2L
  Gene Name: synaptonemal complex protein 2-like
  ENST ID: ENST00000487561
  CDS Start-End: 1-330
gtttcctggtttgaaagaacaacaggaattctgacctcggaaggcctagcctcagacacgtcgctgatttgtgttatagaagatttctttgacactgcattgattatttccaggagtagtagtgaagggaaaattcagatgttggattccttcctacttagcttaggattcctggtgacagaaaagactgtaaatcatttgcttcaacaggagggcttgaagacttttaactgcattttgcacgctgtccctcgagaagagagaaaaaaattccctttgtcagaaggcatgtgtcatcttatgacagtagacgttttctcaatcacctaaacaacagacttggtgaccaaagaagggtgtattcatttccgtgtattgctgcttttgctgatgagcatgagatgagaaaaccagcggatgaaaaattagagaaattttggatcgacttcaacctaggaagtcagagtgtcactttttatatagacaatgctgagaatactctatgggactcagtgacacttccgaaggaagcggtgatgaatttcagcataacagaaacggagaagataaagatatttatcatttacctgaagaagcccatgattatcagctacaaagaagtcatgaaaatagaaatccatttt

SEQ ID NO: 188042 - DNA, 2436 bp, Homo sapiens
  Payload ID: 17008
  Gene Symbol: SYCP2L
  Gene Name: synaptonemal complex protein 2-like
  ENST ID: ENST00000543878
  CDS Start-End: 1-2436
acacagaaaaacaaagatgctttgcagcctattaaggaagacaggactgggaaggcccaggatgatgctttctggcttcaatcacttattacggatgcattccatgataaaggatttcagaaaataaaagaatactttcaacagaaagagagccactttcctcaaaaatataatcgtcttctattataccgtcttgacagatcaataaataaggaactagataaaaatgaatttcagtctgtgtcactgttgctgaaatgtattcagcgattcctcgtagatggcctgaaagaagatgaacctctgctaattcggcagggactgatcccaaagctagtttcctggtttgaaagaacaacaggaattctgacctcggaaggcctagcctcagacacgtcgctgatttgtgttatagaagatttctttgacactgcattgattatttccaggagtagtagtgaagggaaaattcagatgttggattccttcctacttagcttaggattcctggtgacagaaaagactgtaaatcatttgcttcaacaggagggcttgaagacttttaactgcattttgcacgctgtccctcgagaagagagaaaaaaattccctttgtcagaaggcatgtgtcatcttatgaaagaccttgcaaggacactcttgactgtgggtgattatgaccagcaggttgctatttctgaagcgctgtgtagactgacgattaaaaaatcaagggatgaacttgtccataaatggtttgatgatgaagtcattgctgaagctttcaaagaaattaaggatcgagaatttgagacggacagtagacgttttctcaatcacctaaacaacagacttggtgaccaaagaagggtgtattcatttccgtgtattgctgcttttgctgatgagcatgagatgagaaaaccagcggatgaaaaattagagaaattttggatcgacttcaacctaggaagtcagagtgtcactttttatatagacaatgctgagaatactctatgggactcagtgacacttccgaaggaagcggtgatgaatttcagcataacagaaacggagaagataaagatatttatcatttacctgaagaagcccatgattatcagctacaaagaagtcatgaaaatagaaatccattttgatttgcagttcaacatatcacaagtttccattcaagctttaggagaagacaaacagatgttgcctgaccagacgaaaatctcctcagaactttttagtaagtctgataaagaagacagggagagtcccagtggccttgaaagagaaacagagcaggcagaagaatccactaacatggtggagtttatgagtgctgaagatgaccgctgcctaataactctccacttaaatgaccaatctgagccacctgttattggggaacctgcctctgatagtcaccttcagccggtccctccgttcggggtccctgacttcccgcaacaacctaagtctcattacagaaaacatctcttctctgagagtaatcaagattcaagtaccagtgaactatcttggaccagtaaccagaaaaagaaatccctaaaatcatattccagtagaaagaagacaagaaccagaagtaatttgagaatcttgccagttttccctcccagtagtggcagtggccatgagaaagaccaagctaagcttctatcaccatcagagaaagaaatacccgagcaaaataacaccacatctccaaagacttctgaacaaaaattccaagatagttttgcttttttgactgctgaagattctgcccagaaaacagagcttcaagatcctcactcactgagtgagctctcttccttgaagcactcagaagatgaagaaaaacctaagattgtgaaccaagaatcactaacagaaagtactagcttgaaacataagctgagaaacttggaagacaaagacataccagaaggtagttttgctaagtcacaacaatcaagattggaagaagaggttgctccgggatcccctttctcaataacagaagaaagagagttgccagaaggaatttccacttcatccctagaagttgtgccagagaacttgaacggttctgccattctcccaacctttgaaaacttcactaaaaaacggaaaagaaaatatgagcttaggtacagaaagcgtccgtttaattcagaaaatgcaaagaaagcaccggattgcctaataaaacttttaaaccagatgcaactgttcagactcaataaactagagcgctttcaaaatttggttcttcaagagttgagcagtcttaagcaggatattcaggccctggaacaccttgagaaggaggttctggaattctgggggaaacagtctgctgatctgcaatctttctgtgatctgcaagtgctgaggttcaattcaactcagacttcataa

SEQ ID NO: 188043 - DNA, 1068 bp, Homo sapiens
  Payload ID: 17009
  Gene Symbol: SYCP3
  Gene Name: synaptonemal complex protein 3
  Uniprot ID: Q8IZU3
  ENST ID: ENST00000266743
  CDS Start-End: 79-789
cgcgcttgtggaggagttgtggaggacgcctgtcgacgaccagtaactggtcctcggccattgcggaagcatctaaatatggtgtcctccggaaaaaagtattccaggaaatctgggaagccgtctgtggaagatcagtttacgagagcctatgactttgagactgaagataagaaagatctgagtggatcagaggaagatgttattgaagggaagactgcagtcattgagaaacgtaggaagaaaaggtcttctgcaggagtagttgaagatatggggggtgaagtgcagaatatgctggaaggagttggagttgacattaacaaggctcttcttgccaagagaaagagactagaaatgtataccaaggcttctctcaaaactagtaaccagaaaattgaacatgtttggaaaacacaacaagatcaaaggcagaagcttaaccaagaatattctcagcagtttctgactttgtttcagcagtgggatttagatatgcagaaagctgaggaacaagaagaaaaaatacttaatatgtttcgacagcaacaaaagattcttcaacaatctagaattgttcagagccagagattgaaaacaattaaacagttatatgagcagttcataaagagtatggaagagttggagaagaatcatgataatctacttactggtgcacaaaatgaatttaaaaaagaaatggctatgttgcaaaaaaaaattatgatggaaactcagcagcaagagatagcaagtgttcggaagtctcttcaatccatgttattctgatgactctttgaagaaagaacttgaacctaagtaatatgatacaattataacgttagctaagaagcatattgtaagtctttagaatagtttaattgtaacatctttaatcataaacctgtttcattgtaagacctccctttctgttaagtcaaatctaaatagttatgagttagttagcaactattcctaaagaatatgtattaagctttcagctctttagtaatgatagtgaatttttctctctaacactgtcaattaaataaagacgatttaatttta

SEQ ID NO: 188044 - DNA, 845 bp, Homo sapiens
  Payload ID: 17009
  Gene Symbol: SYCP3
  Gene Name: synaptonemal complex protein 3
  Uniprot ID: Q8IZU3
  ENST ID: ENST00000392924
  CDS Start-End: 81-791
gagttgtggaggacgcctgtcgacgaccagtaactggtcctcggccattgcggtgtgtttcagtcaggaagcatctaaatatggtgtcctccggaaaaaagtattccaggaaatctgggaagccgtctgtggaagatcagtttacgagagcctatgactttgagactgaagataagaaagatctgagtggatcagaggaagatgttattgaagggaagactgcagtcattgagaaacgtaggaagaaaaggtcttctgcaggagtagttgaagatatggggggtgaagtgcagaatatgctggaaggagttggagttgacattaacaaggctcttcttgccaagagaaagagactagaaatgtataccaaggcttctctcaaaactagtaaccagaaaattgaacatgtttggaaaacacaacaagatcaaaggcagaagcttaaccaagaatattctcagcagtttctgactttgtttcagcagtgggatttagatatgcagaaagctgaggaacaagaagaaaaaatacttaatatgtttcgacagcaacaaaagattcttcaacaatctagaattgttcagagccagagattgaaaacaattaaacagttatatgagcagttcataaagagtatggaagagttggagaagaatcatgataatctacttactggtgcacaaaatgaatttaaaaaagaaatggctatgttgcaaaaaaaaattatgatggaaactcagcagcaagagatagcaagtgttcggaagtctcttcaatccatgttattctgatgactctttgaagaaagaacttgaacctaagtaatatgatacaattataacgtt

SEQ ID NO: 188045 - DNA, 1120 bp, Homo sapiens
  Payload ID: 17009
  Gene Symbol: SYCP3
  Gene Name: synaptonemal complex protein 3
  Uniprot ID: Q8IZU3
  ENST ID: ENST00000392927
  CDS Start-End: 133-843
ttgcctcagaagcgtcgcggagaaggggccacctcaggtgaagcgcgcttgtggaggagttgtggaggacgcctgtcgacgaccagtaactggtcctcggccattgcggtgtgtttcaggaagcatctaaatatggtgtcctccggaaaaaagtattccaggaaatctgggaagccgtctgtggaagatcagtttacgagagcctatgactttgagactgaagataagaaagatctgagtggatcagaggaagatgttattgaagggaagactgcagtcattgagaaacgtaggaagaaaaggtcttctgcaggagtagttgaagatatggggggtgaagtgcagaatatgctggaaggagttggagttgacattaacaaggctcttcttgccaagagaaagagactagaaatgtataccaaggcttctctcaaaactagtaaccagaaaattgaacatgtttggaaaacacaacaagatcaaaggcagaagcttaaccaagaatattctcagcagtttctgactttgtttcagcagtgggatttagatatgcagaaagctgaggaacaagaagaaaaaatacttaatatgtttcgacagcaacaaaagattcttcaacaatctagaattgttcagagccagagattgaaaacaattaaacagttatatgagcagttcataaagagtatggaagagttggagaagaatcatgataatctacttactggtgcacaaaatgaatttaaaaaagaaatggctatgttgcaaaaaaaaattatgatggaaactcagcagcaagagatagcaagtgttcggaagtctcttcaatccatgttattctgatgactctttgaagaaagaacttgaacctaagtaatatgatacaattataacgttagctaagaagcatattgtaagtctttagaatagtttaattgtaacatctttaatcataaacctgtttcattgtaagacctccctttctgttaagtcaaatctaaatagttatgagttagttagcaactattcctaaagaatatgtattaagctttcagctctttagtaatgatagtgaatttttctctctaacactgtcaattaaataaagacgatttaattt

SEQ ID NO: 188046 - DNA, 2498 bp, Homo sapiens
  Payload ID: 17010
  Gene Symbol: SYP
  Gene Name: synaptophysin
  Uniprot ID: P08247
  ENST ID: ENST00000263233
  CDS Start-End: 74-1015
aacgagcgcgcgccgcccccgccgcgccccgcgccgcccttgctagccgagcctcccgccccctgcattgctgatgctgctgctggcggacatggacgtggtgaatcagctggtggctgggggtcagttccgggtggtcaaggagcccctcggctttgtgaaggtgctgcaatgggtcttcgccatcttcgcctttgccacatgcggcagctacagtggggagctccagctgagcgtggattgtgccaacaagaccgagagtgacctcagcatcgaggtcgagttcgagtaccccttcaggctgcaccaagtgtactttgatgcacccacctgccgagggggcaccaccaaggtcttcttagttggggactactcctcgtcagccgaattctttgtcaccgtggccgtgtttgccttcctctactccatgggggctctggccacctacatcttcctgcagaacaagtaccgagagaataacaaagggcccatgctggactttctggccacggctgtgttcgccttcatgtggctagttagctcatcggcatgggccaaggggctgtcagatgtgaagatggccacagacccagagaacattatcaaggagatgcctgtctgccgccagacagggaacacatgcaaggagctgagagaccctgtgacctcgggactcaacacctcggtggtgttcggcttcctgaacctggtgctctgggtcggcaacctgtggttcgtgtttaaggagacaggctgggccgccccgttcctgcgcgcgcctcccggcgcccccgagaaacaaccggcacccggggacgcctacggcgatgcaggctacgggcagggccccggcgggtacgggccccaggattcctacgggcctcagggcggctaccagcctgactatggtcaaccagccggcagcggtggcagtggctacgggcctcagggcgactatgggcagcaaggctacggcccgcagggtgcacccacctccttctccaatcagatgtagtctggtcagtgaagcccaggaggacctggggggggcaagagctcaggagaaggcctgccccccttcccacccctataccctaggtctccacccctcaagccaggagaccctgtctttgctgtttatatatatatatattatatataaatatctatttatctgtctgagccctgccctcactccactcccctcatccactaggtgcccagtcttgagtgggccccctctcttaccccgtccctttccctgcatcccttggcccctctctgtttaccctccctgtcccctgaggttaaggggatctaaaaggaggacagggagggaacagacctcggctgtgtggggagggtgggcgtgacttcagactctctcctctctctccctccactcctcccaactctggccttggttcctccagcaatgcctgcctgaacaaaggccgttagggaaatccaactccagggttaaagaaaggcagagattgggggggcttggggtagagaggacagtttaggacccaaggtggtcttggagaggaggtgtggagtggaggggtcagcaggggggttgggttccagacagagtggatctggagtctgaaggagaggagtgcgctagagcattctggggtggggcttggaagggcgctgagggcagggttctagaaggggcgaggctttaagcgaggcagaatggtgggctccagagtaggtgggtcttggattggtaccagagcctatggaaagggtgtggcttggaacatttgggagactgagcttgattctaaaggggacagatcttgagcaaggcaagaagtgggattcaggaatgggccaagccagggttccagacagggtggggcttagaatggggcttccatggtggtttcagaaagggcagcccctccccatggtgcagtgaagaaaatgttttacaatggctgggtttgggcagtggagaggggacttggataggagcttccagatgggttttgttaggggtgggggagaatggctctggctacgacttgggacggaagtggcctgagaagagtcgagtgatatggcttgtagggtgaggcgtgggatccagagagaagcaccccaccacacacacccttccccactcccgtgatgaaacagctaggttaataggaggacagaaccaacgggtctgtgggactggcccacccctcttcccccttcccctgcgccctccctccctccacacctccacccgtcctggggtggttggaggcctggtctggagcccctatcctgcaccctctgctatgtctgtgatgtcagtagtgcctgtgatcgtgtgttgccattttgtctggctgtggcccctccttctcccctccagacccctaccctttcccaaacccttcggtattgttcaaagaacccccctccccaaggaagaacaaatatgattctcctctcccaaataaactccttaaccacctagtctacccggc

SEQ ID NO: 188047 - DNA, 858 bp, Homo sapiens
  Payload ID: 17010
  Gene Symbol: SYP
  Gene Name: synaptophysin
  ENST ID: ENST00000376303
  CDS Start-End: 8-130
attgctgatgctgctgctggcggacatggacgtggtgaatcagctggtggctgggggtcagttccgggtggtcaaggagcccctcggctttgtgaaggtgctgcaatgggctgcaccaagtgtactttgatgcacccacctgccgagggggcaccaccaaggtcttcttagttggggactactcctcgtcagccgaattctttgtcaccgtggccgtgtttgccttcctctactccatgggggctctggccacctacatcttcctgcagaacaagtaccgagagaataacaaagggcccatgctggactttctggccacggctgtgttcgccttcatgtggctagttagctcatcggcatgggccaaggggctgtcagatgtgaagatggccacagacccagagaacattatcaaggagatgcctgtctgccgccagacagggaacacatgcaaggagctgagagaccctgtgacctcgggactcaacacctcggtggtgttcggcttcctgaacctggtgctctgggtcggcaacctgtggttcgtgtttaaggagacaggctgggccgccccgttcctgcgcgcgcctcccggcgcccccgagaaacaaccggcacccggggacgcctacggcgatgcaggctacgggcagggccccggcgggtacgggccccaggattcctacgggcctcagggcggctaccagcctgactatggtcaaccagccggcagcggtggcagtggctacgggcctcagggcgactatgggcagcaaggctacggcccgcagggtgcacccacctccttctccaatcagatgtagtctggtcagtgaagcccaggaggacctggggggg

SEQ ID NO: 188048 - DNA, 1850 bp, Homo sapiens
  Payload ID: 17010
  Gene Symbol: SYP
  Gene Name: synaptophysin
  Uniprot ID: P08247
  ENST ID: ENST00000479808
  CDS Start-End: 14-955
ccctgcattgctgatgctgctgctggcggacatggacgtggtgaatcagctggtggctgggggtcagttccgggtggtcaaggagcccctcggctttgtgaaggtgctgcaatgggtcttcgccatcttcgcctttgccacatgcggcagctacagtggggagctccagctgagcgtggattgtgccaacaagaccgagagtgacctcagcatcgaggtcgagttcgagtaccccttcaggctgcaccaagtgtactttgatgcacccacctgccgagggggcaccaccaaggtcttcttagttggggactactcctcgtcagccgaattctttgtcaccgtggccgtgtttgccttcctctactccatgggggctctggccacctacatcttcctgcagaacaagtaccgagagaataacaaagggcccatgctggactttctggccacggctgtgttcgccttcatgtggctagttagctcatcggcatgggccaaggggctgtcagatgtgaagatggccacagacccagagaacattatcaaggagatgcctgtctgccgccagacagggaacacatgcaaggagctgagagaccctgtgacctcgggactcaacacctcggtggtgttcggcttcctgaacctggtgctctgggtcggcaacctgtggttcgtgtttaaggagacaggctgggccgccccgttcctgcgcgcgcctcccggcgcccccgagaaacaaccggcacccggggacgcctacggcgatgcaggctacgggcagggccccggcgggtacgggccccaggattcctacgggcctcagggcggctaccagcctgactatggtcaaccagccggcagcggtggcagtggctacgggcctcagggcgactatgggcagcaaggctacggcccgcagggtgcacccacctccttctccaatcagatgtagtctggtgagtgaccggcgagcggtgcggccaaggagggtacaaggaaggagacgagcgggtcagtgaaccaataagagtcaggggtagagagtacgtaaggcgtttactggggcaagtaaggactgaagtttgaaggagccaatcaagaggcagaactacctgctaagagctgaaaaactagctaatgaatggagaaaagaagaatggtgcttcaagatggacagaatgaagagccaatgggagggaggtagaagggcaactcggcggaaaggcggggggagagaagcagagcaaccaataaagggagggaatatcgggggacttgcgcagtggcgaatcagcggagcgcaagagccacggaagcgacgaggaggtgggtcttagaagtgactgataagccaataggtgataaggccaatagatggtgagggtaaatgggcgtggatcttgaaggtcagacgagctcaccaatccgggaggaggggatagatctgccgcctctccccaacgctggaggggagggaagtagtgtggaatttcaaaggaggaagagggatagggtggggtcctggaaaggtttgccggccttcttgctgggccttaaaagagaagtgagggtcggggcttggtggctcatgcctgtaatctcagcactttgggagaccgaggcgggcgggccgcttgagcccaagagttcgagaccagcctgggcaacatgatgaaatcccacctctacaaaaaatacaaaaattagccgggcgtggtggcatgcatctgtggacccatctactcaggaggctgaagtgggaggatcacttaagcccaggaggttgaggctgccgtgagctatgatcctgccactgcactccagcctgggcaacagagcgagacctt

SEQ ID NO: 188049 - DNA, 761 bp, Homo sapiens
  Payload ID: 17010
  Gene Symbol: SYP
  Gene Name: synaptophysin
  ENST ID: ENST00000472598
  CDS Start-End: 1-611
tggcggacatggacgtggtgaatcagctggtggctgggggtcagttccgggtggtcaaggagcccctcggctttgtgaaggtgctgcaatgggactttctggccacggctgtgttcgccttcatgtggctagttagctcatcggcatgggccaaggggctgtcagatgtgaagatggccacagacccagagaacattatcaaggagatgcctgtctgccgccagacagggaacacatgcaaggagctgagagaccctgtgacctcgggactcaacacctcggtggtgttcggcttcctgaacctggtgctctgggtcggcaacctgtggttcgtgtttaaggagacaggctgggccgccccgttcctgcgcgcgcctcccggcgcccccgagaaacaaccggcacccggggacgcctacggcgatgcaggctacgggcagggccccggcgggtacgggccccaggattcctacgggcctcagggcggctaccagcctgactatggtcaaccagccggcagcggtggcagtggctacgggcctcagggcgactatgggcagcaaggctacggcccgcagggtgcacccacctccttctccaatcagatgtagtctggtcagtgaagcccaggaggacctggggggggcaagagctcaggagaaggcctgccccccttcccacccctataccctaggtctccacccctcaagccaggagaccctgtctttgctgtttatatatatatatattatatataaata

SEQ ID NO: 188050 - DNA, 581 bp, Homo sapiens
  Payload ID: 17010
  Gene Symbol: SYP
  Gene Name: synaptophysin
  ENST ID: ENST00000469389
  CDS Start-End: 8-364
attgctgatgctgctgctggcggacatggacgtggtgaatcagctggtggctgggggtcagttccgggtggtcaaggagcccctcggctttgtgaaggtgctgcaatgggtcttcgccatcttcgcctttgccacatgcggcagctacagtggggagctccagctgagcgtggattgtgccaacaagaccgagagtgacctcagcatcgaggtcgagttcgagtaccccttcaggtgtgctcccaccctgggataccaacagacctgggagaggaaggggcagggtggaaccggccaatacctccccccgcaagtagctcctgcccagctcccacctcgaggctacatccactgggatcactgagcacctgccttgtacctggcactgctctggactctaggactatgtggctgcaccaagtgtactttgatgcacccacctgccgagggggcaccaccaaggtcttcttagttggggactactcctcgtcagccgaattctttgtcaccgtggccgtgtttgccttcctctactccatgggggctctggccacctacatcttcctgcagaacaagtaccg

SEQ ID NO: 188051 - DNA, 513 bp, Homo sapiens
  Payload ID: 17010
  Gene Symbol: SYP
  Gene Name: synaptophysin
  ENST ID: ENST00000466635
  CDS Start-End: 8-364
attgctgatgctgctgctggcggacatggacgtggtgaatcagctggtggctgggggtcagttccgggtggtcaaggagcccctcggctttgtgaaggtgctgcaatgggtcttcgccatcttcgcctttgccacatgcggcagctacagtggggagctccagctgagcgtggattgtgccaacaagaccgagagtgacctcagcatcgaggtcgagttcgagtaccccttcaggtgtgctcccaccctgggataccaacagacctgggagaggaaggggcagggtggaaccggccaatacctccccccgcaagtagctcctgcccagctcccacctcgaggctacatccactgggatcactgagcacctgccttgtacctggcactgctctggactctaggactatgtggtgagcaaggcagacataggctgtggccctctggctctgttccagcgaaggggctgcaccaagtgtactttgatgcacccacctgccgagggggcaccaccaa

SEQ ID NO: 188052 - DNA, 2127 bp, Homo sapiens
  Payload ID: 17011
  Gene Symbol: SYPL1
  Gene Name: synaptophysin-like 1
  Uniprot ID: Q16563
  ENST ID: ENST00000011473
  CDS Start-End: 48-827
gagtgccaggggctgaaccgcagggaagggggcgcggcgcacgcagtatggcgcccaacatctacttggttcgccagcggatcagtcgactcggccagaggatgtccggcttccagatcaacctcaacccgctcaaggagccactcggcttcatcaaggtcctcgagtggattgcttctatctttgcttttgccacctgtggaggttttaagggccaaacagaaattcaagtgaattgtcctcctgcagttactgagaataaaactgttacagctacttttggttatccattcaggttgaatgaggcatcatttcagccacctccaggtgtaaacatatgtgatgtaaattggaaagattacgtcctcataggcgattactcttcttctgcacaattctatgttacctttgcagtctttgtgttcctgtactgcattgctgcccttctgctttatgttggctacacgagtctgtatctggatagtcgtaaacttcctatgatagactttgttgttacacttgttgccacttttttgtggttggtgagcacttcagcctgggctaaagctctgacagatattaaaatagctactggtcacaatattattgatgaacttccgccttgtaagaagaaagcagtactgtgttactttggctctgtgaccagtatgggatccctaaatgtatctgtgatatttggctttctaaatatgatactctggggaggaaatgcttggtttgtgtacaaggagaccagcctacacagtccatcaaatacatctgcccctcatagccaaggaggtattccacctcctaccggaatataattaaagggagaaatacactgtatgaagtatatgttgatactatgacatgttgccaacaccttgagaagcattatttgtttctaataaaagtaatggctttgtcaatatattggtgggtttaaaactttgctgcttttttacataaagcctgtgcctttcctagaaagttaagatgtaaatgtattctcacatgtaaatttgaaagttcaggggtctattatgaaatgatacacatttttaaatgaaccataatttttttcactaagctgtttgccttccaaagtgtttacaccttaagccttaacatgtatcttcattcagaaaacagttatattgtcataccatagtaggaagaaaaacctttatttggaatatacactactgtaagtttgtacagatcatatacctaccacctgtctttgcttaaagagccttgattacataaatatgtaggaaaaaacatattgagttcaaaatttatatctaacattgtttatgttatgatttttttttaattgcaaagactaggtgtatatttttttctgtttttctaaatgacccgtggtacttaataggtgtactaaaattgtgttgggagcagggatttggaaatttctgagagatgtgtagttaatttagtaattctgtttcatgagatatgatctgttatgctagtggtttaataggcttgctatgtaagtagaacgtggctcaactagatatctttatatgtatgggcattactcttagtgatatttgtttcctgtcctttgttgctcatgctgtttaagtgcaggctgagacccagcctctttgtaagtacagtaaaataatccaccgttttttacagaccctagtcaaagggttaaaaaaattaagattgctttccatgtttgaaatttaccattgagagtcaatgaagttgctattttgagtttagcattgatattgtgaaaataagtgcaatttggatttcatgtttcttaatattcattcttgtttcacaaatgaatgattaaggaattatgcatcataaaggaacctaagtgaggtatatgatgagtgtattgtctttgcacacacatataggtatattctgaatacaagcttattcacattttgcttcctaatctttttgttgtacagggattcaggtttcttattcttacaacatgattgtttatatgtgaagcacatcttgctgttgccttatttttgatgcttttattcatgacaagaattgtcaatataagaatgtatatcttttttgcaaccaatttaataaaggagttgaaagaaa

SEQ ID NO: 188053 - DNA, 2151 bp, Homo sapiens
  Payload ID: 17011
  Gene Symbol: SYPL1
  Gene Name: synaptophysin-like 1
  Uniprot ID: Q16563
  ENST ID: ENST00000455385
  CDS Start-End: 124-849
gcctccgagcccggccagcgcgccagccccgcctgcccttcctcgccaccgggctgctctggtctcgtcggtcccctcctccgccccgtcgtcctgactctctctccctcctttcctcagaggatgtccggcttccagatcaacctcaacccgctcaaggagccactcggcttcatcaaggtcctcgagtggattgcttctatctttgcttttgccacctgtggaggttttaagggccaaacagaaattcaagtgaattgtcctcctgcagttactgagaataaaactgttacagctacttttggttatccattcaggttgaatgaggcatcatttcagccacctccaggtgtaaacatatgtgatgtaaattggaaagattacgtcctcataggcgattactcttcttctgcacaattctatgttacctttgcagtctttgtgttcctgtactgcattgctgcccttctgctttatgttggctacacgagtctgtatctggatagtcgtaaacttcctatgatagactttgttgttacacttgttgccacttttttgtggttggtgagcacttcagcctgggctaaagctctgacagatattaaaatagctactggtcacaatattattgatgaacttccgccttgtaagaagaaagcagtactgtgttactttggctctgtgaccagtatgggatccctaaatgtatctgtgatatttggctttctaaatatgatactctggggaggaaatgcttggtttgtgtacaaggagaccagcctacacagtccatcaaatacatctgcccctcatagccaaggaggtattccacctcctaccggaatataattaaagggagaaatacactgtatgaagtatatgttgatactatgacatgttgccaacaccttgagaagcattatttgtttctaataaaagtaatggctttgtcaatatattggtgggtttaaaactttgctgcttttttacataaagcctgtgcctttcctagaaagttaagatgtaaatgtattctcacatgtaaatttgaaagttcaggggtctattatgaaatgatacacatttttaaatgaaccataatttttttcactaagctgtttgccttccaaagtgtttacaccttaagccttaacatgtatcttcattcagaaaacagttatattgtcataccatagtaggaagaaaaacctttatttggaatatacactactgtaagtttgtacagatcatatacctaccacctgtctttgcttaaagagccttgattacataaatatgtaggaaaaaacatattgagttcaaaatttatatctaacattgtttatgttatgatttttttttaattgcaaagactaggtgtatatttttttctgtttttctaaatgacccgtggtacttaataggtgtactaaaattgtgttgggagcagggatttggaaatttctgagagatgtgtagttaatttagtaattctgtttcatgagatatgatctgttatgctagtggtttaataggcttgctatgtaagtagaacgtggctcaactagatatctttatatgtatgggcattactcttagtgatatttgtttcctgtcctttgttgctcatgctgtttaagtgcaggctgagacccagcctctttgtaagtacagtaaaataatccaccgttttttacagaccctagtcaaagggttaaaaaaattaagattgctttccatgtttgaaatttaccattgagagtcaatgaagttgctattttgagtttagcattgatattgtgaaaataagtgcaatttggatttcatgtttcttaatattcattcttgtttcacaaatgaatgattaaggaattatgcatcataaaggaacctaagtgaggtatatgatgagtgtattgtctttgcacacacatataggtatattctgaatacaagcttattcacattttgcttcctaatctttttgttgtacagggattcaggtttcttattcttacaacatgattgtttatatgtgaagcacatcttgctgttgccttatttttgatgcttttattcatgacaagaattgtcaatataagaatgtatatcttttttgcaaccaatttaataaaggagttgaaagaaaga

SEQ ID NO: 188054 - DNA, 1017 bp, Homo sapiens
  Payload ID: 17011
  Gene Symbol: SYPL1
  Gene Name: synaptophysin-like 1
  ENST ID: ENST00000464029
  CDS Start-End: 1-446
taaacatatgtgatgtaaattggaaagattacgtcctcataggcgattactcttcttctgcacaattctatgttacctttgcagtctttgtgttcctgtactgcattgctgcccttctgctttatgttggctacacgagtctgtatctggatagtcgtaaacttcctatgatagactttgttgttacacttgttgccacttttttgtggttggtgagcacttcagcctgggctaaagctctgacagatattaaaatagctactggtcacaatattattgatgaacttccgccttgtaagaagaaagcagtactgtgttactttggctctgtgaccagtatgggatccctaaatgtatctgtgatggagtttcgctatgtcgctcagactggagtgcagtggcatgatctcggcacactgcaacctccgcctcctgggttcaagtgattctcctacctcagcctcccaggtagctgggattacagatatttggctttctaaatatgatactctggggaggaaatgcttggtttgtgtacaaggagaccagcctacacagtccatcaaatacatctgcccctcatagccaaggaggtattccacctcctaccggaatataattaaagggagaaatacactgtatgaagtatatgttgatactatgacatgttgccaacaccttgagaagcattatttgtttctaataaaagtaatggctttgtcaatatattggtgggtttaaaactttgctgcttttttacataaagcctgtgcctttcctagaaagttaagatgtaaatgtattctcacatgtaaatttgaaagttcaggggtctattatgaaatgatacacatttttaaatgaaccataatttttttcactaagctgtttgccttccaaagtgtttacaccttaagccttaacatgtatcttcattcagaaaacagttatattgtcataccatagtaggaagaaaaacctttatttggaatatacactactgtaagtttgtacaga

SEQ ID NO: 188055 - DNA, 1193 bp, Homo sapiens
  Payload ID: 17011
  Gene Symbol: SYPL1
  Gene Name: synaptophysin-like 1
  ENST ID: ENST00000470347
  CDS Start-End: 14-688
ctttcctcagaggatgtccggcttccagatcaacctcaacccgctcaaggagccactcggcttcatcaaggtcctcgagtggattgcttctatctttgcttttgccacctgtggaggttttaagggccaaacagaaattcaagtgaattgtcctcctgcagttactgagaataaaactgttacagctacttttggttatccattcaggttgaatgaggcatcatttcagccacctccaggtgtaaacatatgtgatgtaaattggaaagattacgtcctcataggcgattactcttcttctgcacaattctatgttacctttgcagtctttgtgttcctgtactgcattgctgcccttctgctttatgttggctacacgagtctgtatctggatagtcgtaaacttcctatgatagactttgttgttacacttgttgccacttttttgtggttggtgagcacttcagcctgggctaaagctctgacagatattaaaatagctactggtcacaatattattgatgaacttccgccttgtaagaagaaagcagtactgtgttactttggctctgtgaccagtatgggatccctaaatgtatctgtgatggagtttcgctatgtcgctcagactggagtgcagtggcatgatctcggcacactgcaacctccgcctcctgggttcaagtgattctcctacctcagcctcccagatatttggctttctaaatatgatactctggggaggaaatgcttggtttgtgtacaaggagaccagcctacacagtccatcaaatacatctgcccctcatagccaaggaggtattccacctcctaccggaatataattaaagggagaaatacactgtatgaagtatatgttgatactatgacatgttgccaacaccttgagaagcattatttgtttctaataaaagtaatggctttgtcaatatattggtgggtttaaaactttgctgcttttttacataaagcctgtgcctttcctagaaagttaagatgtaaatgtattctcacatgtaaatttgaaagttcaggggtctattatgaaatgatacacatttttaaatgaaccataatttttttcactaagctgtttgccttccaaagtgtttacaccttaagccttaacatgtatcttcattcagaaaacagttatattgtcataccatagt

SEQ ID NO: 188056 - DNA, 835 bp, Homo sapiens
  Payload ID: 17011
  Gene Symbol: SYPL1
  Gene Name: synaptophysin-like 1
  ENST ID: ENST00000634737
  CDS Start-End: 1-408
tggattgcttctatctttgcttttgccacctgtggaggttttaagggccaaacagaaattcaagtgaattgtcctcctgcagttactgagaataaaactgttacagctacttttggttatccattcaggttgaatgaggcatcatttcagccacctccaggtgtaaacatatgtgatgtaaattggaaagattacgtcctcataggcgattactcttcttctgcacaattctatgttacctttgcagtctttgtgttcctgtactgcattgctgcccttctgctttatgttggctacacgagtctgtatctggatagtcgtaaacttcctatgataaatggaaatggactttgttgttacacttgttgccacttttttgtggttggtgagcacttcagcctgggctaaagctctgacagatattaaaatagctactggtcacaatattattgatgaacttccgccttgtaagaagaaagcagtactgtgttactttggctctgtgaccagtatgggatccctaaatgtatctgtgatatttggctttctaaatatgatactctggggaggaaatgcttggtttgtgtacaaggagaccagcctacacagtccatcaaatacatctgcccctcatagccaaggaggtattccacctcctaccggaatataattaaagggagaaatacactgtatgaagtatatgttgatactatgacatgttgccaacaccttgagaagcattatttgtttctaataaaagtaatggctttgtcaatatattggtgggtttaaaactttgctgcttttttacataaagcctgtgcctttcctagaa

SEQ ID NO: 188057 - DNA, 3624 bp, Homo sapiens
  Payload ID: 17012
  Gene Symbol: SYPL2
  Gene Name: synaptophysin-like 2
  Uniprot ID: Q5VXT5
  ENST ID: ENST00000369872
  CDS Start-End: 217-1035
gcggccgcagcctctgagagcacgaacagcagcgcccccgcgtcccagccagccagccagccagactggactccggcccaccgacggccgctcgcgctccggccccgctcgcctgctctgccccggacctgcagctccccgctcccccgccgtgtccgccgcctcccggccagagagccaagccaccacgccgcgcccagcgctcgccgcgccagcatgtcctcgaccgagagcgccggccgcacggcggacaagtcgccgcgccagcaggtggaccgcctactcgtggggctgcgctggcggcggctggaggagccgctgggcttcatcaaagttctccagtggctctttgctattttcgccttcgggtcctgtggctcctacagcggggagacaggagcaatggttcgctgcaacaacgaagccaaggacgtgagctccatcatcgttgcatttggctatcccttcaggttgcaccggatccaatatgagatgcccctctgcgatgaagagtccagctccaagaccatgcacctcatgggggacttctctgcacccgccgagttcttcgtgacccttggcatcttttccttcttctataccatggctgccctagttatctacctgcgcttccacaacctctacacagagaacaaacgcttcccgctggtggacttctgtgtgactgtctccttcaccttcttctggctggtagctgcagctgcctggggcaagggcctgaccgatgtcaagggggccacacgaccatccagcttgacagcagccatgtcagtgtgccatggagaggaagcagtgtgcagtgccggggccacgccctctatgggcctggccaacatctccgtgctctttggctttatcaacttcttcctgtgggccgggaactgttggtttgtgttcaaggagaccccgtggcatggacagggccagggccaggaccaggaccaggaccaggaccagggccagggtcccagccaggagagtgcagctgagcagggagcagtggagaagcagtaagcagccccccacctggctattcccgaactggacagcacctcttcaaccacctccggcttccaggacctttctcttcctcctcctccaattcccctcccccatcattctggtctttgagctttgagacgatgggcaggcatcagctgttggaaacctgggcagccctctcagtggcttcctatcctccttcttgctggagccatgaatggcaggagctcagtgcttcttgtgcagtgcctggacccaggtatcttacttggggtcttacttgtacccttacagtctctgagaaccagcctctgctgcaggtgagggttgggggcaggaaaccagtgctctgagactggttcctagcagccacctttctgtcaacctgtccggcttcaacaatattagggggaagggaaatcagctagtagccttcccctctggtcccttgtgtggaggccccaatagtggtttggcgacccctcctcagtggctgtcatctagtccctgcgtctgatctccagtcatcccatgactcagtgtgccttccactgtcttctctggcctctgcctgcccacagaatccaccatgtgtgaaccagagaggtccaccagcctagaaaacagcccttcagagggtcctgatgaggccttcctggactcagctgggagcaagataaattgcaactgagttgcagcttcaagaaagtaaagccagtaagcttgctggcagaatcaatttcttctatcccctcaatcctcccacccaccaggctggggcactttccaccaacactctaaactctactttagaaacgccctatcttcctccctgtcctccttcttggtctcacacttgggactcaaaaatgtggagtcaggacctgcctcctaatccccttacttctctgtccatctcccttccccagcatcgtgcatctgaggcatttgagatcctttttgaagtctgtccaggccttccttttattcctgtggggccagacaggggcttaggaagggccaaaggaccatcatgaggctaagttgccccagagccccaggatggatgggcccattttttccttattccctgctcagttttttcccctgctccttctctagtccttctttcatatttctccttctcatcttgaaaacaggatgttccctcttcccttgctgtcccatttctcccctgtgtccttatttctcccagtctctatcccctctcaagtccagggcaggccgatgctattggtgcttcttcactttgggacccagttccatatttgtctttagtgtatatcctcttcctgatacctccttcagtccctctctgggccccaaggctgagaatcagtgttaactgggtaaggatcatttgcttcctacccagctcaatctgccctggccatagggcttcccagggaaggaagaagagggaagaatccgaccactttccaatccagtgccaattggcccactaagcatcctaaaggtgaatgtgccctgtgccaatctctcctcaggactgagtcaacccccttcaacctcctcacctctctaaacaccatccatagtaacatgtgcattactggggtacctaggagtcaggacttttgacttcaggccagtcatttcctcccgatggggaaagggtgagatttacatccccaaatgcttgagtccctcagtgaaagaattagtttttgtttgtttgtttaagattttggggaagagatttgaggaggaaagaaaggagatggggtgagagggtttttaagtctgaaactctctgtcatgagctgtccccatggttactcaaggacaaggggggacagttttgcctacagctccagagacacagagaacaaaggggtgaccttcatttttcttcaagccggcctctgtgggggtctgtgagcagcttctactggatctttgtttggattctgtgtctgtatttataatttatttgaaatgtgctgggtagtgttctcatttgggggctgaagttagcaactgggccttcagctagggaaagcagttgcgggcagggggtggggggagattatattcactcctgccaaggactcccagcccaggactctctttagagcaaggaagcctcgttctctttcttctcaagaggctctcttgttctccatcaggagagccttgatttaggctacggcctcactctctatggccaccctaagaggaaaggctacttcacctcattacctccagagggctgggcagggccaagtgcctcataggactcatgttctctccaaccagggctggcatcactgctttgcaaagtggggcctgaggtagaagaaggtgtctggtttctccagctgctgtaggaggctaatgggcagggtacttgccctttgtcccactagactctaacccagcaccagggtgcccacctaggacctttcctggacatgagtttccttcactatcatagtcatgagcctcctacttctgggattgcagatcaggggtggggggagaatgttgcatgttgttttctggtgcttgttattatatatttgaataaacagtgctgcaagtacttgccatgaagga

SEQ ID NO: 188058 - DNA, 5374 bp, Homo sapiens
  Payload ID: 17013
  Gene Symbol: SYNPO
  Gene Name: synaptopodin
  Uniprot ID: Q8N3V7
  ENST ID: ENST00000307662
  CDS Start-End: 530-3241
ctgataaagagctgggctgagtcatctgtggaggagaaaagtcacatccagctccttcatgttgctgccgatgtgggattttcctggcttcgtcagccaagcaattggctgcctttgccggaggctttgagaaccaaggcttgaaggccggcaggagcatccagggggaagcttggcttcagggaggacctagcagacgttgggccggagcactagcctcacggagaaggatctgaaagaagccaaggcgcggagccagcagattgcagcccagctgaccacccctcccagctccaattcccgtggcgtccagctcttcaacaggcgccggcagagggtgaacgagttcaccttggagagccacggccagaggggacagaagcccagccaggagtccctcagagtgctcccttcaagcctcccaggccatgcaccggggctcagcctgagttccacctcgctgccggagccaggccctccacggcaccccagtccccagagccccgacagaggggtccctggccacagcatggaggggtactcagaggaggctagcttgctgcggcacctggagaaggtggccagtgaggaggaagaggtaccactggtggtttatctaaaggagaatgcagcactgctgacagccaatgggctgcacctgtcccaaaaccgagaggcccagcagtcctcaccggccccacctccagctgaggtccacagcccagctgcagatgtcaaccaaaaccttgcctcgcccagtgccacgctcaccacaccaacttctaacagcagccacaatccgccagccaccgatgtcaatcagaacccaccggcaactgttgtcccacagagcctgccactttctagcatccaacagaattcctcagaggcccaactcccatctaatggcacagggcctgcttccaaacccagcaccctgtgtgctgatgggcaaccccaggcaccggctgaggaggtgagatgcagcacactcctaattgacaaggtatcaactccagctaccaccaccagcaccttctccagagaagctacgctcatccccagctccaggcccccagcctcagatttcatgtccagctccctgctcattgacatccagcccaacaccctagtggtgtcagcagatcaagagatgtctgggcgagcagctgccaccacgcccaccaaggtctacagtgaggtccacttcacactggccaagcccccatcagtggtcaacaggacggccaggccttttgggatccaggcgccagggggcaccagccagatggagaggagccccatgctagagagacgacattttggggagaaggccccggctccccagccccccagtttgccagacaggagcccccggccacagagacacataatgtcccgcagccccatggtggaaaggaggatgatggggcagcgaagcccggcctcagagagacgccccttggggaacttcactgcaccccccacctacactgagaccttgtccacagcccctctggcttcctgggtgaggtctcctccctcatattctgtcctgtatcccagctccgaccccaagtcttctcatctgaagggccaggcggttcctgccagcaagacgggcattctggaggagtcgatggcccgccggggcagccgcaaatccatgtttactttcgtggagaagcccaaggtgaccccgaatccagacttgctggatctggtacagacagcggatgagaagcggcggcagagggaccagggggaggtaggcgtggaggaggagcccttcgcactgggggccgaggcctccaacttccagcaggagccagcacctcgtgacagggccagccccgcggcggcggaggaggtggtaccagagtgggcctcctgcctcaagtcaccccgcatccaggccaagccgaagcccaaacccaaccagaacctctccgaggcctctgggaagggagctgagctctacgcccgccgccagtcacggatggagaaatatgtcatcgagtcttcaagccacacgccagagctggcccgctgcccatcacctaccatgtccctgccttcctcctggaaataccccactaacgcccccggggccttccgagtggcatcccgaagcccagcccggaccccgcctgcctccctctaccatggctacctgcctgagaacggggtcctgcgcccagagcccaccaagcagccgccataccagctgcgcccctcgctctttgtcctctcacctatcaaggagcctgccaaggtctcaccaagagctgcctcgcccgccaagcccagctccttggacctggtgcccaacctgcccaagggggctctccctccatctcctgccctgcctcggccctcgcgctcctcaccgggcctctacacctcccccggccaggacagcctgcagcccactgccgtgagccctccttacggcggtgacatctcccccgtgtctccctccagggcgtggtctccccgagccaagcaggcccccaggccctccttctctacccggaacgccgggatcgaggctcaggaccgccgggagagcctgcccacctccccaccctggacgccgggcgcgtcccggccccccagcagcctagacggctgggtgagcccgggcccgtgggagccaggtcgcgggagcagcatgagcagccccccgccgctgccgccgccaccgcccatgtctccctcgtggagcgagcgctcggtgtccccgctgcgacctgagaccgaggcgcggccccccagccgccagctgcaggcgcttctggcgcgaaacatcatcaatgcggcccggcgcaagagcgcctccccgcggtcggcgggcgccgagaacccgcggcccttctccccgccgagggcgccaccgcccccgcccccgcccccgcccccgcccccgcgcatgcgctcgccacagcccgcccgccccggctcggctgctgtgccgggggcagccttcgcgcccatcccgcggagcccgttgcccgccggtccttcgtcctgcaccagtccccggagcccgctgcccgcgcctcccaggcccttcctctaccgccgctcgcccacggactccgacgtgtccctcgactccgaggactccggggctaagtctccaggcatcctgggctacaatatctgtccccgcgggtggaatggcagccttcggctcaagcgtggcagcctccccgccgaggcctcctgcaccacctagagccccacccccgaccccaccccgggagggcagagccagaagaaggctcattagacctgggggacccaaagggtctggcctctttgggcagccccagagatgaggggtcagcagaggagagctctggggttggggatgggttagggacgcaagcttgagttctagcccttgctctcattcagctgttgtgtgaccctgggtaagacccttccttgtttgaccctcagctttcccatctgtttaatggtggctttggccaaggcaatccacaaacgtcaaaattccccttcccatcagtacacacaccgatgcacacacactctctctttctctctctctctctctcacacacacacacacacacacacacacacacacacacacacacactagttagtgccttggatgaggcggggcagtgtgtatatggacccctggacttgctaccttcagggttccatactcgtccctcccctcctggctctgctgtctggagtctggcaagcggggtgtgttcagaaggtcctaggcctgtgtcgcatgtccaggcactggcctgaccatccggctccctggcaccaagtcccaggcaggagcagctgttttccatcccttcccagacaagctctatttttatcacaatgacctttagagaggtctcccaggccagctcaaggtgtcccactatcccctctggagggaagaggcaggaaaattctccccgggtccctgtcatgctactttctccatcccagttcagactgtccaggacatcttatctgcagccataagagaattataaggcagtgatttcccttaggcccaggacttgggcctccagctcatctgttccttctgggcccattcatggcaggttctgggctcaaagctgaactggggagagaagagatacagagctaccatgtgactttacctgattgccctcagtttggggttgcttattgggaaagagagagacaaagagttacttgttacgggaaatatgaaaagcatggccaggatgcatagaggagattctagcaggggacaggattggctcagatgacccctgagggctcttccagtcttgaaatgcattccatgatattaggaagtcgggggtgggtggtggtggtgggctagttgggcttgaatttaggggccgatgagcttgggtacgtgagcagggtgttaagttagggtctgcctgtatttctggtccccttggaaatgtccccttcttcagtgtcagacctcagtcccagtgtccatatcgtgcccagaaaagtagacattatcctgccccatcccttccccagtgcactctgacctagctagtgcctggtgcccagtgacctgggggagcctggctgcaggccctcactggttccctaaaccttggtggctgtgattcaggtccccaggggggactcagggaggaatatggctgagttctgtagtttccagagttggctggtagagccttctagaggttcagaatattagcttcaggatcagctgggggtatggaattggctgaggatcaaacgtatgtaggtgaaaggataccaggatgttgctaaaggtgagggacagtttgggtttgggacttaccggggtgatgttagatctggaacccccaagtgaggctggagggagttaaggtcagtatggaagatagggttgggacagggtgctttggaatgaaagagtgaccttagagggctccttgggcctcaggaatgctcctgctgctgtgaagatgagaaggtgctcttactcagttaatgatgagtgactatatttaccaaagcccctacctgctgctgggtcccttgtagcacaggagactggggctaagggcccctcccagggaagggacaccatcaggcctctggctgaggcagtagcatagaggatccatttctacctgcatttcccagaggactagcaggaggcagccttgagaaaccggcagttcccaagccagcgcctggctgttctctcattgtcactgccctctccccaacctctcctctaacccactagagattgcctgtgtcctgcctcttgcctcttgtagaatgcagctctggccctcaataaatgcttcctgcattcttctgcctcctg

SEQ ID NO: 188059 - DNA, 7063 bp, Homo sapiens
  Payload ID: 17013
  Gene Symbol: SYNPO
  Gene Name: synaptopodin
  Uniprot ID: Q8N3V7
  ENST ID: ENST00000394243
  CDS Start-End: 375-3164
agagcgcgagtgaggagcaggcgggcaggcggcgggcagccgggcagccgtggacagaggcccgggcacagccagttgctgtgccagagggtgtggtgtccggctacagattgccccaaagcggcctcacaccagagacgggttaagaagagggattggaggtccaccactccactagcccaggaaggacttatctttcgtctcagccagacctcaccccaattctgtgaatcagcggaggaaggcaaaagtgcagagagtcagaggaggctgtgtaaggagcagagaccagggctcacacagctggccccagcccaggccctggcccaggcccaggagcctgcttccctgcatcgctgaggaagaacagcaccatgctgggtcctcacctcccacctccgccccttgcacccagcgaagggaggcctaccccctgcgccttccagatccctgatggaagctacaggtgtctggctctggaagccgaggagagcagcggtgaggagggcctgcagggagaggtggggcctaccgacctggaagaggatgagggggtcagcaggagtggggacgactctgcctgcagagtcacccaggggacaccgcagctgcccaaagccctgggcatccaaccacccagctgctccagagaggaacaaggggcgtcccagcacgacgacagggccagccaggactgggatgtagtgaaggccgggcagatgatgacagccagccccagccctggccctgggcccagagtggcccagaaaccagcgttgggccggagcactagcctcacggagaaggatctgaaagaagccaaggcgcggagccagcagattgcagcccagctgaccacccctcccagctccaattcccgtggcgtccagctcttcaacaggcgccggcagagggtgaacgagttcaccttggagagccacggccagaggggacagaagcccagccaggagtccctcagagtgctcccttcaagcctcccaggccatgcaccggggctcagcctgagttccacctcgctgccggagccaggccctccacggcaccccagtccccagagccccgacagaggggtccctggccacagcatggaggggtactcagaggaggctagcttgctgcggcacctggagaaggtggccagtgaggaggaagaggtaccactggtggtttatctaaaggagaatgcagcactgctgacagccaatgggctgcacctgtcccaaaaccgagaggcccagcagtcctcaccggccccacctccagctgaggtccacagcccagctgcagatgtcaaccaaaaccttgcctcgcccagtgccacgctcaccacaccaacttctaacagcagccacaatccgccagccaccgatgtcaatcagaacccaccggcaactgttgtcccacagagcctgccactttctagcatccaacagaattcctcagaggcccaactcccatctaatggcacagggcctgcttccaaacccagcaccctgtgtgctgatgggcaaccccaggcaccggctgaggaggtgagatgcagcacactcctaattgacaaggtatcaactccagctaccaccaccagcaccttctccagagaagctacgctcatccccagctccaggcccccagcctcagatttcatgtccagctccctgctcattgacatccagcccaacaccctagtggtgtcagcagatcaagagatgtctgggcgagcagctgccaccacgcccaccaaggtctacagtgaggtccacttcacactggccaagcccccatcagtggtcaacaggacggccaggccttttgggatccaggcgccagggggcaccagccagatggagaggagccccatgctagagagacgacattttggggagaaggccccggctccccagccccccagtttgccagacaggagcccccggccacagagacacataatgtcccgcagccccatggtggaaaggaggatgatggggcagcgaagcccggcctcagagagacgccccttggggaacttcactgcaccccccacctacactgagaccttgtccacagcccctctggcttcctgggtgaggtctcctccctcatattctgtcctgtatcccagctccgaccccaagtcttctcatctgaagggccaggcggttcctgccagcaagacgggcattctggaggagtcgatggcccgccggggcagccgcaaatccatgtttactttcgtggagaagcccaaggtgaccccgaatccagacttgctggatctggtacagacagcggatgagaagcggcggcagagggaccagggggaggtaggcgtggaggaggagcccttcgcactgggggccgaggcctccaacttccagcaggagccagcacctcgtgacagggccagccccgcggcggcggaggaggtggtaccagagtgggcctcctgcctcaagtcaccccgcatccaggccaagccgaagcccaaacccaaccagaacctctccgaggcctctgggaagggagctgagctctacgcccgccgccagtcacggatggagaaatatgtcatcgagtcttcaagccacacgccagagctggcccgctgcccatcacctaccatgtccctgccttcctcctggaaataccccactaacgcccccggggccttccgagtggcatcccgaagcccagcccggaccccgcctgcctccctctaccatggctacctgcctgagaacggggtcctgcgcccagagcccaccaagcagccgccataccagctgcgcccctcgctctttgtcctctcacctatcaaggagcctgccaaggtctcaccaagagctgcctcgcccgccaagcccagctccttggacctggtgcccaacctgcccaagggggctctccctccatctcctgccctgcctcggccctcgcgctcctcaccgggcctctacacctcccccggccaggacagcctgcagcccactgccgtgagccctccttacggcggtgacatctcccccgtgtctccctccagggcgtggtctccccgagccaagcaggcccccaggccctccttctctacccggaacgccgggatcgaggctcaggtgtggaagccttccttctgcttcaagtaacgaaccccacgggggtcccactgccggtcaagttcccctccttgagggccagatggagagcagatgtggcaggaaatggcacagagctgagtgaggagaatggggagtccatggttcaaggtcagatgcggccaccagctggctttgtgaccttgggcgagtcgcctcccctctctgagctgaagccgcccctcccctactacaacaggggtcggactccatgtctgagcggggaggagggtcatggagagagaactgtctggcagccctgatgcggtagaggggcatcctctggcctttgtgagctgtagggatgcagagtctgatgccagcgtcttgctgggggagtggcctagaaggggatcctaacagggacttctggagcagacagagcctgccagtgcctgtggagtcagccagccgagggtctgcctcctcagctgccccaggggggcctccctcctgaggctcaagctcctggcgtctttcttcctgttgctggattctcacctccatgggcctgtctcttctgcctctgccttctggacaccgtttcctctccgctgcttcagagagctttgcctcgcctccgcctgcgctcccctccagggtccttctgctggctgcggactcggcccaccactgctgtctgacgcttttcttcctgccccctctgaggcctggctctgttttagggagatcactgggcccaggcctcagccccagttctacctggcttgctgtcaccgctctaggggtgggggacgtcccaggggatccccaggagaaggagagccctgtagggggctgtgcagatgtgggtgtgccacagggagggtggcccctagccatgtatccattggctgttttggcttcagattcaaccaagatctgcctgactaaaagaagccacctcagcgcagtggaacggggcccagggggaggcaggagaggagggttccggtcccatgtcaccttctcatttgctgtgtgactttggcccactcacattctctttgggcctcagttttatcatttatacaaggagggcttttctagctgtaacaatctgtgaggattgagaggataggctggtgctttgaagaaaggccttgtaagtgacaagacagtcccctgggaagaaagagaaaggaaatgggctattgccaaaggacaggtggcgttagatggctgtgagggtgacctggtgagggaagggttggaatgagctgctgcaggaggccaagggatgcctgggctgggctgggctgggctggcttaggctcaggattgcctggggacagtaggagcatggcaggagctggggcaggtgcatagcagtgcagtgggaagggacagaggagatcttagaattttgaggaaaatctgggacttgagacctggattctaacagaccaactgcatgtgtgtctgtaggtctcagtttccacattcatacagtgagggtgttaagtcaggtagctggagacttcccatcgcctctgacacttttggaggtgatatgatacagcccccgaccaaaccaggctttgtggggggtgagagaatacagacacaagtggcaggattcagatggaagcttcgcaaggctgggggccgaggaccacccacttctctttcccagccctagttctgggttccccagtggggcaaggggtggtggaggcagtgcccatgctgggctgagcctgcagtttttgtgagctctgggcttgtctccatgggaacaggggtgccttcttagtgagctcatttcacacagatcgagggggtatgcgtgggggagttgtgagtgagctcagctccttcaggcctggcctctcccagaacagagtgaagcccctgccctggacccctgctcccttctacccttgagggccaccaatggaagagcccgcccttcattctgcagctcctgcggccaggctgagctctgcccccaactttgttttctctcatgttctcaatacactctgcctcaaatccgtcttgcttctttctttcttccgtgctgctaggggtcagggttcccttcctcctgcctgattctagcctgggaagtggagtgggcctgctcaattactgtgtgtgaaagtgtggctgtgtcctgcgtgctgcctgcacctgccgtgtgtctggttctgcactggtacagacgtgtgctgggttggaaatgagggcttcctctctacagcactcagggagccagaaccctgtgcaaatcgcaaccttttgttctttccttccctcagagtttggccaaaaatactttagaggatttttggggaaaatgcactacctcttctcgttgaggtttgtttgggttctttacaagtggaatagaaattcctctagccagcattcgctctccagttccctcaggtcccctccctgctccccattatctaaatttggccatttcccacatttgccattgttttcactgtctggatcctaaaagcatggagtttctgcccctggtggggaggaaagaactgccatcaagggtcaggagagctgggttctagccccaggtctgcatctgattcgtgtgtgacctcagacaacctcttccaatctctgggcctcagtttccccttctgtgcagtgaaaggattacagaaggaggtcagagaccatttggtctccgacagtccaggtttgactgtgttctacttatgtattcaccccacacatgtgccctgctttgggtctggggttgggttgagtggatgctactttttgaattttcacccaccgcattcccaaggagctctggtgtgcacggtgcattgagctctctgtcagaaagtgaacagttctgatttcctgcagccttttcgtactgtgcacacccccgactcaaaaacatacacacagagtcagtgcccaggcatggctgttagggtgaggtcaggctctggcccatctccagatgatggggatctgcttaccactgccctcaacattcaatcccgtttgagcccttctgttttgtagtcttggctgaattgttatttcttccacttgttggcctcagcattccccttgtggccaccaaaggcagaaacaatgctttagagatttttaggtagttatcatagctctcctgtgcagcctactctcctggctgaagaccccaggttccgctgccttgggtggttattgactggcttgggtcatgaactctaggccctacctccctgctcagggtggcactgtggtcaggtgttgggtcatgccagagcccaccctgatttggcatttggccctagccctcctcttctagccctggagctgggaccttcctcccagctcctctccctaaactgtggggtctgccttctgcggccagcctgactgggatgttccactggcacagagaagctcccagtgtctctggctcatgtatacacaattctgaccctgggaagaaaacagtgggatcccaggctgagccttaactttcagcttgatgactgggagcttggatgtccctagggagtctctaagggtcactccagcattagtatcccatgaaaaatgtcctgctcaggctgttgtataacattcttctttaggttaaagggctccagtttggagtctgggctcatctagcagctgctacattctgtttggataaaacatacaattggtgtctatttcctttggattgggaggaattagaagactctcagttggatgagaggatgactggcttggttatggctgatcactgattggatgaaagaataaatctttggatggttctagattttgatcgggtaggaagcatggaatggactggctagctctgaactctggtggatgactgctagtgaatttggattggattaaatggcaaggtggactggtta

SEQ ID NO: 188060 - DNA, 5098 bp, Homo sapiens
  Payload ID: 17013
  Gene Symbol: SYNPO
  Gene Name: synaptopodin
  Uniprot ID: Q8N3V7
  ENST ID: ENST00000522122
  CDS Start-End: 308-3097
agtttgcatcttaggtcacaccactcctgtgattcctgtggtattgccccaaagcggcctcacaccagagacgggttaagaagagggattggaggtccaccactccactagcccaggaaggacttatctttcgtctcagccagacctcaccccaattctgtgaatcagcggaggaaggcaaaagtgcagagagtcagaggaggctgtgtaaggagcagagaccagggctcacacagctggccccagcccaggccctggcccaggcccaggagcctgcttccctgcatcgctgaggaagaacagcaccatgctgggtcctcacctcccacctccgccccttgcacccagcgaagggaggcctaccccctgcgccttccagatccctgatggaagctacaggtgtctggctctggaagccgaggagagcagcggtgaggagggcctgcagggagaggtggggcctaccgacctggaagaggatgagggggtcagcaggagtggggacgactctgcctgcagagtcacccaggggacaccgcagctgcccaaagccctgggcatccaaccacccagctgctccagagaggaacaaggggcgtcccagcacgacgacagggccagccaggactgggatgtagtgaaggccgggcagatgatgacagccagccccagccctggccctgggcccagagtggcccagaaaccagcgttgggccggagcactagcctcacggagaaggatctgaaagaagccaaggcgcggagccagcagattgcagcccagctgaccacccctcccagctccaattcccgtggcgtccagctcttcaacaggcgccggcagagggtgaacgagttcaccttggagagccacggccagaggggacagaagcccagccaggagtccctcagagtgctcccttcaagcctcccaggccatgcaccggggctcagcctgagttccacctcgctgccggagccaggccctccacggcaccccagtccccagagccccgacagaggggtccctggccacagcatggaggggtactcagaggaggctagcttgctgcggcacctggagaaggtggccagtgaggaggaagaggtaccactggtggtttatctaaaggagaatgcagcactgctgacagccaatgggctgcacctgtcccaaaaccgagaggcccagcagtcctcaccggccccacctccagctgaggtccacagcccagctgcagatgtcaaccaaaaccttgcctcgcccagtgccacgctcaccacaccaacttctaacagcagccacaatccgccagccaccgatgtcaatcagaacccaccggcaactgttgtcccacagagcctgccactttctagcatccaacagaattcctcagaggcccaactcccatctaatggcacagggcctgcttccaaacccagcaccctgtgtgctgatgggcaaccccaggcaccggctgaggaggtgagatgcagcacactcctaattgacaaggtatcaactccagctaccaccaccagcaccttctccagagaagctacgctcatccccagctccaggcccccagcctcagatttcatgtccagctccctgctcattgacatccagcccaacaccctagtggtgtcagcagatcaagagatgtctgggcgagcagctgccaccacgcccaccaaggtctacagtgaggtccacttcacactggccaagcccccatcagtggtcaacaggacggccaggccttttgggatccaggcgccagggggcaccagccagatggagaggagccccatgctagagagacgacattttggggagaaggccccggctccccagccccccagtttgccagacaggagcccccggccacagagacacataatgtcccgcagccccatggtggaaaggaggatgatggggcagcgaagcccggcctcagagagacgccccttggggaacttcactgcaccccccacctacactgagaccttgtccacagcccctctggcttcctgggtgaggtctcctccctcatattctgtcctgtatcccagctccgaccccaagtcttctcatctgaagggccaggcggttcctgccagcaagacgggcattctggaggagtcgatggcccgccggggcagccgcaaatccatgtttactttcgtggagaagcccaaggtgaccccgaatccagacttgctggatctggtacagacagcggatgagaagcggcggcagagggaccagggggaggtaggcgtggaggaggagcccttcgcactgggggccgaggcctccaacttccagcaggagccagcacctcgtgacagggccagccccgcggcggcggaggaggtggtaccagagtgggcctcctgcctcaagtcaccccgcatccaggccaagccgaagcccaaacccaaccagaacctctccgaggcctctgggaagggagctgagctctacgcccgccgccagtcacggatggagaaatatgtcatcgagtcttcaagccacacgccagagctggcccgctgcccatcacctaccatgtccctgccttcctcctggaaataccccactaacgcccccggggccttccgagtggcatcccgaagcccagcccggaccccgcctgcctccctctaccatggctacctgcctgagaacggggtcctgcgcccagagcccaccaagcagccgccataccagctgcgcccctcgctctttgtcctctcacctatcaaggagcctgccaaggtctcaccaagagctgcctcgcccgccaagcccagctccttggacctggtgcccaacctgcccaagggggctctccctccatctcctgccctgcctcggccctcgcgctcctcaccgggcctctacacctcccccggccaggacagcctgcagcccactgccgtgagccctccttacggcggtgacatctcccccgtgtctccctccagggcgtggtctccccgagccaagcaggcccccaggccctccttctctacccggaacgccgggatcgaggctcaggtgtggaagccttccttctgcttcaagtaacgaaccccacgggggtcccactgccggtcaagttcccctccttgagggccagatggagagcagatgtggcaggaaatggcacagagctgagtgaggagaatggggagtccatggttcaaggtcagatgcggccaccagctggctttgtgaccttgggcgagtcgcctcccctctctgagctgaagccgcccctcccctactacaacaggggtcggactccatgtctgagcggggaggagggtcatggagagagaactgtctggcagccctgatgcggtagaggggcatcctctggcctttgtgagctgtagggatgcagagtctgatgccagcgtcttgctgggggagtggcctagaaggggatcctaacagggacttctggagcagacagagcctgccagtgcctgtggagtcagccagccgagggtctgcctcctcagctgccccaggggggcctccctcctgaggctcaagctcctggcgtctttcttcctgttgctggattctcacctccatgggcctgtctcttctgcctctgccttctggacaccgtttcctctccgctgcttcagagagctttgcctcgcctccgcctgcgctcccctccagggtccttctgctggctgcggactcggcccaccactgctgtctgacgcttttcttcctgccccctctgaggcctggctctgttttagggagatcactgggcccaggcctcagccccagttctacctggcttgctgtcaccgctctaggggtgggggacgtcccaggggatccccaggagaaggagagccctgtagggggctgtgcagatgtgggtgtgccacagggagggtggcccctagccatgtatccattggctgttttggcttcagattcaaccaagatctgcctgactaaaagaagccacctcagcgcagtggaacggggcccagggggaggcaggagaggagggttccggtcccatgtcaccttctcatttgctgtgtgactttggcccactcacattctctttgggcctcagttttatcatttatacaaggagggcttttctagctgtaacaatctgtgaggattgagaggataggctggtgctttgaagaaaggccttgtaagtgacaagacagtcccctgggaagaaagagaaaggaaatgggctattgccaaaggacaggtggcgttagatggctgtgagggtgacctggtgagggaagggttggaatgagctgctgcaggaggccaagggatgcctgggctgggctgggctgggctggcttaggctcaggattgcctggggacagtaggagcatggcaggagctggggcaggtgcatagcagtgcagtgggaagggacagaggagatcttagaattttgaggaaaatctgggacttgagacctggattctaacagaccaactgcatgtgtgtctgtaggtctcagtttccacattcatacagtgagggtgttaagtcaggtagctggagacttcccatcgcctctgacacttttggaggtgatatgatacagcccccgaccaaaccaggctttgtggggggtgagagaatacagacacaagtggcaggattcagatggaagcttcgcaaggctgggggccgaggaccacccacttctctttcccagccctagttctgggttccccagtggggcaaggggtggtggaggcagtgcccatgctgggctgagcctgcagtttttgtgagctctgggcttgtctccatgggaacaggggtgccttcttagtgagctcatttcacacagatcgagggggtatgcgtgggggagttgtgagtgagctcagctccttcaggcctggcctctcccagaacagagtgaagcccctgccctggacccctgctcccttctacccttgagggccaccaatggaagagcccgcccttcattctgcagctcctgcggccaggctgagctctgcccccaactttgttttctctcatgttctcaatacactctgcctc

SEQ ID NO: 188061 - DNA, 4571 bp, Homo sapiens
  Payload ID: 17013
  Gene Symbol: SYNPO
  Gene Name: synaptopodin
  Uniprot ID: Q8N3V7
  ENST ID: ENST00000519664
  CDS Start-End: 510-2567
gtcatctgtggaggagaaaagtcacatccagctccttcatgttgctgccgatgtgggattttcctggcttcgtcagccaagcaattggctgcctttgccggaggctttgagaaccaaggcttgaaggccggcaggagcatccagggggaagcttggcttcagggaggacctagcagacgttgggccggagcactagcctcacggagaaggatctgaaagaagccaaggcgcggagccagcagattgcagcccagctgaccacccctcccagctccaattcccgtggcgtccagctcttcaacaggcgccggcagagggtgaacgagttcaccttggagagccacggccagaggggacagaagcccagccaggagtccctcagagtgctcccttcaagcctcccaggccatgcaccggggctcagcctgagttccacctcgctgccggagccaggccctccacggcaccccagtccccagagccccgacagaggggtccctggccacagcatggaggggtactcagaggaggctagcttgctgcggcacctggagaaggtggccagtgaggaggaagaggtaccactggtggtttatctaaaggagaatgcagcactgctgacagccaatgggctgcacctgtcccaaaaccgagaggcccagcagtcctcaccggccccacctccagctgaggtccacagcccagctgcagatgtcaaccaaaaccttgcctcgcccagtgccacgctcaccacaccaacttctaacagcagccacaatccgccagccaccgatgtcaatcagaacccaccggcaactgttgtcccacagagcctgccactttctagcatccaacagaattcctcagaggcccaactcccatctaatggcacagggcctgcttccaaacccagcaccctgtgtgctgatgggcaaccccaggcaccggctgaggaggtgagatgcagcacactcctaattgacaaggtatcaactccagctaccaccaccagcaccttctccagagaagctacgctcatccccagctccaggcccccagcctcagatttcatgtccagctccctgctcattgacatccagcccaacaccctagtggtgtcagcagatcaagagatgtctgggcgagcagctgccaccacgcccaccaaggtctacagtgaggtccacttcacactggccaagcccccatcagtggtcaacaggacggccaggccttttgggatccaggcgccagggggcaccagccagatggagaggagccccatgctagagagacgacattttggggagaaggccccggctccccagccccccagtttgccagacaggagcccccggccacagagacacataatgtcccgcagccccatggtggaaaggaggatgatggggcagcgaagcccggcctcagagagacgccccttggggaacttcactgcaccccccacctacactgagaccttgtccacagcccctctggcttcctgggtgaggtctcctccctcatattctgtcctgtatcccagctccgaccccaagtcttctcatctgaagggccaggcggttcctgccagcaagacgggcattctggaggagtcgatggcccgccggggcagccgcaaatccatgtttactttcgtggagaagcccaaggtgaccccgaatccagacttgctggatctggtacagacagcggatgagaagcggcggcagagggaccagggggaggtaggcgtggaggaggagcccttcgcactgggggccgaggcctccaacttccagcaggagccagcacctcgtgacagggccagccccgcggcggcggaggaggtggtaccagagtgggcctcctgcctcaagtcaccccgcatccaggccaagccgaagcccaaacccaaccagaacctctccgaggcctctgggaagggagctgagctctacgcccgccgccagtcacggatggagaaatatgtcatcgagtcttcaagccacacgccagagctggcccgctgcccatcacctaccatgtccctgccttcctcctggaaataccccactaacgcccccggggccttccgagtggcatcccgaagcccagcccggaccccgcctgcctccctctaccatggctacctgcctgagaacggggtcctgcgcccagagcccaccaagcagccgccataccagctgcgcccctcgctctttgtcctctcacctatcaaggagcctgccaaggtctcaccaagagctgcctcgcccgccaagcccagctccttggacctggtgcccaacctgcccaagggggctctccctccatctcctgccctgcctcggccctcgcgctcctcaccgggcctctacacctcccccggccaggacagcctgcagcccactgccgtgagccctccttacggcggtgacatctcccccgtgtctccctccagggcgtggtctccccgagccaagcaggcccccaggccctccttctctacccggaacgccgggatcgaggctcaggtgtggaagccttccttctgcttcaagtaacgaaccccacgggggtcccactgccggtcaagttcccctccttgagggccagatggagagcagatgtggcaggaaatggcacagagctgagtgaggagaatggggagtccatggttcaaggtcagatgcggccaccagctggctttgtgaccttgggcgagtcgcctcccctctctgagctgaagccgcccctcccctactacaacaggggtcggactccatgtctgagcggggaggagggtcatggagagagaactgtctggcagccctgatgcggtagaggggcatcctctggcctttgtgagctgtagggatgcagagtctgatgccagcgtcttgctgggggagtggcctagaaggggatcctaacagggacttctggagcagacagagcctgccagtgcctgtggagtcagccagccgagggtctgcctcctcagctgccccaggggggcctccctcctgaggctcaagctcctggcgtctttcttcctgttgctggattctcacctccatgggcctgtctcttctgcctctgccttctggacaccgtttcctctccgctgcttcagagagctttgcctcgcctccgcctgcgctcccctccagggtccttctgctggctgcggactcggcccaccactgctgtctgacgcttttcttcctgccccctctgaggcctggctctgttttagggagatcactgggcccaggcctcagccccagttctacctggcttgctgtcaccgctctaggggtgggggacgtcccaggggatccccaggagaaggagagccctgtagggggctgtgcagatgtgggtgtgccacagggagggtggcccctagccatgtatccattggctgttttggcttcagattcaaccaagatctgcctgactaaaagaagccacctcagcgcagtggaacggggcccagggggaggcaggagaggagggttccggtcccatgtcaccttctcatttgctgtgtgactttggcccactcacattctctttgggcctcagttttatcatttatacaaggagggcttttctagctgtaacaatctgtgaggattgagaggataggctggtgctttgaagaaaggccttgtaagtgacaagacagtcccctgggaagaaagagaaaggaaatgggctattgccaaaggacaggtggcgttagatggctgtgagggtgacctggtgagggaagggttggaatgagctgctgcaggaggccaagggatgcctgggctgggctgggctgggctggcttaggctcaggattgcctggggacagtaggagcatggcaggagctggggcaggtgcatagcagtgcagtgggaagggacagaggagatcttagaattttgaggaaaatctgggacttgagacctggattctaacagaccaactgcatgtgtgtctgtaggtctcagtttccacattcatacagtgagggtgttaagtcaggtagctggagacttcccatcgcctctgacacttttggaggtgatatgatacagcccccgaccaaaccaggctttgtggggggtgagagaatacagacacaagtggcaggattcagatggaagcttcgcaaggctgggggccgaggaccacccacttctctttcccagccctagttctgggttccccagtggggcaaggggtggtggaggcagtgcccatgctgggctgagcctgcagtttttgtgagctctgggcttgtctccatgggaacaggggtgccttcttagtgagctcatttcacacagatcgagggggtatgcgtgggggagttgtgagtgagctcagctccttcaggcctggcctctcccagaacagagtgaagcccctgccctggacccctgctcccttctacccttgagggccaccaatggaagagcccgcccttcattctgcagctcctgcggccaggctgagctctgcccccaactttgttttctctcatgttctcaatacactctgcctcaaa

SEQ ID NO: 188062 - DNA, 7295 bp, Homo sapiens
  Payload ID: 17014
  Gene Symbol: SYNPO2
  Gene Name: synaptopodin 2
  Uniprot ID: Q9UMS6
  ENST ID: ENST00000307142
  CDS Start-End: 197-3982
gagcccattagccgcacaaattcgcagcaggcggctggggcggcggctggggcagcggctgcagcagcggcggacgctctgcattacccagtcttgcgtcctcggcaggcgcccgaagctgagtgcgcatcctctaccgcacccaagcttcgtctgtctcgtcaagctcttcatgctgcccaactaaaaggaaaacatgggcacaggggattttatctgcatttccatgactggaggggcgccctgggggttcagattgcaaggtggcaaggagcagaagcagcccttacaagttgcaaagattcgaaatcagagcaaagcctctgggtctgggctctgtgagggagatgaagtggtttccatcaatggcaacccttgtgcagatctcacctaccctgaagtcatcaagctcatggaaagcataacagactctctccaaatgctcatcaaaagaccatccagtggaataagtgaggctttgatatctgaaaatgaaaacaaaaacctcgagcatctcacacatgggggttatgtggaaagtaccaccctgcagattcgaccggccacaaagacccagtgcacagaattcttcctcgcccctgtcaagactgaagttcccctagctgagaaccaaagaagtggtcccgactgtgcaggcagcttgaaagaagaaacaggcccgagctaccaaagggctccccaaatgcctgactcccaaagaggacgcgtggcagaagagctgatcttaagggagaaggtagaagcggtacagcctgggcctgtggttgagctgcaactgtccctttcacaggagagacataagggcgctagtggccctttagtggctctcccgggagctgaaaaatctaagtctcctgacccagaccctaacttgtcacatgacaggattgtccacataaattcgatccctactaatgagaaagcagaccctttcctgaggtccagcaagataatccagatctccagtggcagagagttgagagtgatccaggaaagtgaagcaggagatgcgggactgccccgggtggaagtgatcctcgactgctctgacaggcagaagacagaagggtgcaggcttcaggcaggaaaggagtgtgtggattctccagtggaaggagggcagtcagaagcacctccttctctggtatcctttgccgtctcatcagaaggcacagagcagggagaagatccacgctcggaaaaagatcacagcagacctcacaagcaccgagcgcggcatgcacggctcaggaggagtgaaagcctgtcagaaaaacaagtgaaggaagcaaaatctaaatgcaaaagcattgcccttcttctaacggatgctcccaaccccaactccaagggggtgttgatgtttaagaagcgacgtcggagggccaggaaatacaccctagttagctacggtactggcgagcttgagcgagaggcggacgaggaggaagaaggtgacaaggaggatacatgtgaagtagcatttcttggtgcaagcgaatcagaggtggatgaagagttattgtctgacgttgacgacaacacacaagttgtgaactttgactgggattctggactggtggacattgaaaagaaactgaacagaggggacaagatggagatgttaccagacaccacaggcaagggagccctcatgtttgccaagaggagggagagaatggatcagatcacagcccaaaaagaagaggacaaggtaggtggaacgccaagcagagaacaagatgctgcccagaccgatggcctgagaaccacgacttcttaccaaagaaaggaggaagagtcggtaagaacgcagagctctgtgagcaaaagctacatcgaggtgagtcatggtcttggccatgttccccaacagaatggcttcagtgggacatctgagacagcaaacatccagaggatggtccccatgaatagaacggccaaacccttcccagggtctgtgaatcagccagctacccccttctcgccaacccgaaacatgacgagtcccattgctgactttcctgcacctccaccttactctgcagtcactcctccccctgacgccttctccagaggggtttcaagtccgattgctggcccagcacagccccctccatggccccagcctgccccgtggtcccagccagccttttacgattcgtctgagcgaatagcttcccgagatgagaggatctcagtgccagcaaaaagaacaggaatattgcaggaggccaaaaggagaagcacgacaaaacccatgtttacttttaaagagcccaaagtaagcccaaatcctgaactcttgtcactccttcaaaattcagaaggcaaacggggcactggagctggaggtgattccggaccggaagaagactacctcagcttgggggcagaggcttgtaatttcatgcaaagctcctctgccaaacaaaagacccctcctcctgttgctccaaaacctgcagtcaagtcctcatcctcccaaccagtaactccagtttccccagtctggtctccaggagtggctcccacccaacctcctgccttccccacatccaacccatcaaagggcaccgttgtctcctccatcaaaatagcccagccttcttaccctcctgcccggcctgcaagtactttgaacgtggctggtcccttcaaaggaccacaagcagcagtagccagtcagaattacacacccaaaccaacagtttccacaccaacagtcaatgctgttcagcctggtgcagtgggaccatccaatgagcttccaggaatgagtgggagaggagctcagctctttgctaaaaggcagtcgagaatggagaagtatgtggtcgattcagacacggtgcaggcccacgctgctcgagctcagtctcccactccatctctcccggccagttggaagtactcctccaatgtccgagcacctcctcctgtggcctataatcctatccactcgccgtcttacccactggctgctctcaagtctcagccatcagctgcacagccctccaaaatgggcaagaaaaagggaaagaaacccctcaatgcattagatgtcatgaagcaccaaccgtatcagctcaatgcatccttgtttactttccaacctccagatgcaaaggatggcctcccccagaagtcatcagtcaaggtcaattcagccctggccatgaagcaagctcttcctccccggccagtgaatgctgcctcacctacgaatgtgcaggcttcgtcagtgtactcggtaccagcctatacctctcctccttccttctttgcagaggcctcctcaccagtcagtgcatccccagtgcctgtgggcattcccacctcgccaaagcaagaatcagcctcatcatcttattttgtggcaccaaggccaaagttctcagccaagaaaagtggtgtcacaattcaggagagtgggcgctccctttctcttcctggaagatcagtcccaccccccatttctacatctccttgggtataccagcctacttatagttactctagtaaaccaaccgatggactagagaaagcaaacaagagaccaactccttgggaagcagcagcaaagtctcctctcggtctagtggatgatgctttccaacccagaaacatccaggaatccattgtggcaaatgtggtttcagcagctcggaggaaggtgcttccagggcctccagaggattggaatgaaagactgtcctatattcctcaaacccagaaggcctatatgggctcatgtggaaggcaagagtataatgtcacagccaataataatatgtccaccacctcccaatatggttcacagttgccatatgcatattataggcaggcttcaagaaatgattctgcaatcatgtccatggaaaccaggtctgattactgtcttccagtagctgattacaactacaacccacacccaaggggatggagacgccaaacatgaaagttagaagaacggatcatgtgccaactgtagttttttaaaaaaaacgctcctttgtagggttttaaacttttctaatagatttagattcacttttggtcttggcttgttctcataagtcatttatctaagtttgtgtttctgtgtgtgtgtgtgtgtgtgtatgtatgtgaatatacacacacacacacacacaggtgagtgtgaatacttccttgttggctgatccatagagcattacttggaagaaaatttcactatttgcattgatgtgctggcatttatatgtaattcataattttgattccattaataggtagtctatgcaacaaactctactcaattaaagtaaaactaagtatttcttcattgtaccttagtccaggaagaaattaatggaatatggtgtgctaattatcactacctataacatgaggaatataacattgcagaaatttctcataggggcatgccagtgagcaattactttataaaaatattttccttggtgttaagtatttctctgcaacttttttttttttttttttttttttttgagatggagtcttgctctgtcccacccagtctggagtgcaatggtgcgatcttggctcactgcaacctgcgcctcctgggttcaagcaattctcctgcctcagcctcctgagtagctgggattacaggcatgaaccaccacacctggataatttttgtatttttagtagacacaaagtttcaccatgttggtcagactggtcttgaactcctgacctcgtgatctgcccgcctcagcctcccaaagtgctgggattacaggcgtgagccaccacacctggcctttctgcaacatttttttaaaaaaatctaataaatcttagatttttaaaaaagaattaaaatgtgggagttctcagaaagaaataaacacatgagaataagattattacacattttggaaggacttttgaggaatgatgtgatgtgtagagaatagaaagatttagatatatgcctgtgacaggaatagattctgggttcaggggtccccatctgtcaaatgagaagattggattatctaatcttttagatccttaacaactctgatattctgagattctctcatttgtagaatgcccgctgatgcattgtttattttttttgctcataatataaatatcagattatgtttaggagtggattaggtaattagtgtcactacatgtatcattaaaggtcctaaaaggaattgttaggcggcaggctttgtgttacgtgttacatggagtgagggtagatgtgaagatttaaaacgattgatggatttaaggaagtggtacataaatatgtctgttattatgcaatcgtaggtcatgataatttattcagttatagaaaacatgccacagaagcctatgtaacaagtggtgcttctttagaaagttgtcattagaatgttctgaggaagttaagcagctgcttcatcaatcccatgacacatgccttgttagcatgcccatcaaataatcagatcaaacacctgctccttattgccatacccacgaactgttaaatataaaaaaattcaaagtatttgacatcttaagcaaatatccagaatatttttaagtaaaaaaccatcttaagtattcaaaatttccttggttttttaaaggtgataattttgctttgtgttacttttttgctcttgaatgtatcgttatgatggtctcttataatcatggtatctttcacagaataaaaattaaaaataatgccagggtgcaagtgaccaaggccttatcttgaaagttaaaaaaaaaaagtaaagaaatcacagtaagttctattagtgatgatagaaccagatataaaattgttcagtgatggagaaaagaaacgataaatactttccaaggttatattgttaaattatcttaaattatcaaggtgtaagatgtaatgatcccaagagtttttatagaatcctaaaaaataacgcctgatgtatagattagttagcaaattctcagaaatcccccacataaaagccttactttgttcaaaatttattatagtggtttaatcattttagatttgaatgttttaagataggagagacttagcagaaaatacttggcttgccagggccacgttctacttcattgctttcttttataagtgcaaggagttatttccatcagttgacatagatattattcactaaaattttcagcagactcaaaatagagaggagactttaaacttacatgttagcataaaacagacttctctctcattgcatgcactagatcaatattatcatctgtattaagctatctgaatttattcgagacattaagaaaaagacagtacatggtgggaaagctgcacatttctcacaaggaaaaaaacattctatatttgtagcagaaatcagtggtttgaaaagtcatactttgcagatatgaacctgaaaatcaaagtgccattgttaaatcatcctaaagtgtactgtgggtattctccagcatacttgaaaatgaataaagttagattgctcacattgaagctaatggttgagacaagacacctgccagagtgaagtttgattcctatgggtgagaagatgtagatgactattgttctcactaaagttctaaaataatagcaagtgtagagaagagccgttgctttgaaaatacataccacatttgttataaagcatttgtttgttagtatcaatcacataggtagaaagagtttgagttttactgtggattaaaaagccttccctaaaaagagagcatgccagtcatagagacactaatttggcacttttcctccttcttaggtttaaatgttataccaatgcatgtgtttgaaatatccattaagatgatttaaaatttgtcttgtattttgagtttcttaaatgcgtggattcttgttcatttatctctgaatatgtctcttttatattttggcacaattatacacattggaaagggccaacctattagggctcaagtatgtatatgcaaaaaaaaaaagttatatcaaacaggcacagttattacaactagagagaaattccagaaatatttgtttttttaagagaaagtaaattttcacattagatttctattcaaagtactaatatctacatggtccacacttttctattttaaaaaattgtgttctcttgttaaatagattaacatttccacttctgtttatcacaaaagactgtatttgaaatatgcatacggaaaattgaaattatattagtaataaatgtaacttgaaaaatcaa

SEQ ID NO: 188063 - DNA, 3588 bp, Homo sapiens
  Payload ID: 17014
  Gene Symbol: SYNPO2
  Gene Name: synaptopodin 2
  Uniprot ID: Q9UMS6
  ENST ID: ENST00000434046
  CDS Start-End: 1-3330
atgggcacaggggattttatctgcatttccatgactggaggggcgccctgggggttcagattgcaaggtggcaaggagcagaagcagcccttacaagttgcaaagattcgaaatcagagcaaagcctctgggtctgggctctgtgagggagatgaagtggtttccatcaatggcaacccttgtgcagatctcacctaccctgaagtcatcaagctcatggaaagcataacagactctctccaaatgctcatcaaaagaccatccagtggaataagtgaggctttgatatctgaaaatgaaaacaaaaacctcgagcatctcacacatgggggttatgtggaaagtaccaccctgcagattcgaccggccacaaagacccagtgcacagaattcttcctcgcccctgtcaagactgaagttcccctagctgagaaccaaagaagtggtcccgactgtgcaggcagcttgaaagaagaaacaggcccgagctaccaaagggctccccaaatgcctgactcccaaagaggacgcgtggcagaagagctgatcttaagggagaaggtagaagcggtacagcctgggcctgtggttgagctgcaactgtccctttcacaggagagacataagggcgctagtggccctttagtggctctcccgggagctgaaaaatctaagtctcctgacccagaccctaacttgtcacatgacaggattgtccacataaattcgatccctactaatgagaaagcagaccctttcctgaggtccagcaagataatccagatctccagtggcagagagttgagagtgatccaggaaagtgaagcaggagatgcgggactgccccgggtggaagtgatcctcgactgctctgacaggcagaagacagaagggtgcaggcttcaggcaggaaaggagtgtgtggattctccagtggaaggagggcagtcagaagcacctccttctctggtatcctttgccgtctcatcagaaggcacagagcagggagaagatccacgctcggaaaaagatcacagcagacctcacaagcaccgagcgcggcatgcacggctcaggaggagtgaaagcctgtcagaaaaacaagtgaaggaagcaaaatctaaatgcaaaagcattgcccttcttctaacggatgctcccaaccccaactccaagggggtgttgatgtttaagaagcgacgtcggagggccaggaaatacaccctagttagctacggtactggcgagcttgagcgagaggcggacgaggaggaagaaggtgacaaggaggatacatgtgaagtagcatttcttggtgcaagcgaatcagaggtggatgaagagttattgtctgacgttgacgacaacacacaagttgtgaactttgactgggattctggactggtggacattgaaaagaaactgaacagaggggacaagatggagatgttaccagacaccacaggcaagggagccctcatgtttgccaagaggagggagagaatggatcagatcacagcccaaaaagaagaggacaaggtaggtggaacgccaagcagagaacaagatgctgcccagaccgatggcctgagaaccacgacttcttaccaaagaaaggaggaagagtcggtaagaacgcagagctctgtgagcaaaagctacatcgaggtgagtcatggtcttggccatgttccccaacagaatggcttcagtgggacatctgagacagcaaacatccagaggatggtccccatgaatagaacggccaaacccttcccagggtctgtgaatcagccagctacccccttctcgccaacccgaaacatgacgagtcccattgctgactttcctgcacctccaccttactctgcagtcactcctccccctgacgccttctccagaggggtttcaagtccgattgctggcccagcacagccccctccatggccccagcctgccccgtggtcccagccagccttttacgattcgtctgagcgaatagcttcccgagatgagaggatctcagtgccagcaaaaagaacaggaatattgcaggaggccaaaaggagaagcacgacaaaacccatgtttacttttaaagagcccaaagtaagcccaaatcctgaactcttgtcactccttcaaaattcagaaggcaaacggggcactggagctggaggtgattccggaccggaagaagactacctcagcttgggggcagaggcttgtaatttcatgcaaagctcctctgccaaacaaaagacccctcctcctgttgctccaaaacctgcagtcaagtcctcatcctcccaaccagtaactccagtttccccagtctggtctccaggagtggctcccacccaacctcctgccttccccacatccaacccatcaaagggcaccgttgtctcctccatcaaaatagcccagccttcttaccctcctgcccggcctgcaagtactttgaacgtggctggtcccttcaaaggaccacaagcagcagtagccagtcagaattacacacccaaaccaacagtttccacaccaacagtcaatgctgttcagcctggtgcagtgggaccatccaatgagcttccaggaatgagtgggagaggagctcagctctttgctaaaaggcagtcgagaatggagaagtatgtggtcgattcagacacggtgcaggcccacgctgctcgagctcagtctcccactccatctctcccggccagttggaagtactcctccaatgtccgagcacctcctcctgtggcctataatcctatccactcgccgtcttacccactggctgctctcaagtctcagccatcagctgcacagccctccaaaatgggcaagaaaaagggaaagaaacccctcaatgcattagatgtcatgaagcaccaaccgtatcagctcaatgcatccttgtttactttccaacctccagatgcaaaggatggcctcccccagaagtcatcagtcaaggtcaattcagccctggccatgaagcaagctcttcctccccggccagtgaatgctgcctcacctacgaatgtgcaggcttcgtcagtgtactcggtaccagcctatacctctcctccttccttctttgcagaggcctcctcaccagtcagtgcatccccagtgcctgtgggcattcccacctcgccaaagcaagaatcagcctcatcatcttattttgtggcaccaaggccaaagttctcagccaagaaaagtggtgtcacaattcaggtgaaatgtaaatctgggatccatagtcaagatatcataaggacctacttcccagcctacctttcttcctctacctgataatgataatactcaaaataacaacattcaaaggaaacacaaagaaatcctgctttcacatctcctatttcttgggctccttaataactactgatggtttgttcatgaaaaaaaatttttaaatcaaaagattgtacttggccctgagttgaaaaaatttcaaaaatcaaaagtttgtacttggccctgagttgaaaaaaaaaattcacattctaagaataaacagaaaaatgttcttcttggaagtaaataacaaaa

SEQ ID NO: 188064 - DNA, 9920 bp, Homo sapiens
  Payload ID: 17014
  Gene Symbol: SYNPO2
  Gene Name: synaptopodin 2
  Uniprot ID: Q9UMS6
  ENST ID: ENST00000429713
  CDS Start-End: 183-3464
cacaaattcgcagcaggcggctggggcggcggctggggcagcggctgcagcagcggcggacgctctgcattacccagtcttgcgtcctcggcaggcgcccgaagctgagtgcgcatcctctaccgcacccaagcttcgtctgtctcgtcaagctcttcatgctgcccaactaaaaggaaaacatgggcacaggggattttatctgcatttccatgactggaggggcgccctgggggttcagattgcaaggtggcaaggagcagaagcagcccttacaagttgcaaagattcgaaatcagagcaaagcctctgggtctgggctctgtgagggagatgaagtggtttccatcaatggcaacccttgtgcagatctcacctaccctgaagtcatcaagctcatggaaagcataacagactctctccaaatgctcatcaaaagaccatccagtggaataagtgaggctttgatatctgaaaatgaaaacaaaaacctcgagcatctcacacatgggggttatgtggaaagtaccaccctgcagattcgaccggccacaaagacccagtgcacagaattcttcctcgcccctgtcaagactgaagttcccctagctgagaaccaaagaagtggtcccgactgtgcaggcagcttgaaagaagaaacaggcccgagctaccaaagggctccccaaatgcctgactcccaaagaggacgcgtggcagaagagctgatcttaagggagaaggtagaagcggtacagcctgggcctgtggttgagctgcaactgtccctttcacaggagagacataagggcgctagtggccctttagtggctctcccgggagctgaaaaatctaagtctcctgacccagaccctaacttgtcacatgacaggattgtccacataaattcgatccctactaatgagaaagcagaccctttcctgaggtccagcaagataatccagatctccagtggcagagagttgagagtgatccaggaaagtgaagcaggagatgcgggactgccccgggtggaagtgatcctcgactgctctgacaggcagaagacagaagggtgcaggcttcaggcaggaaaggagtgtgtggattctccagtggaaggagggcagtcagaagcacctccttctctggtatcctttgccgtctcatcagaaggcacagagcagggagaagatccacgctcggaaaaagatcacagcagacctcacaagcaccgagcgcggcatgcacggctcaggaggagtgaaagcctgtcagaaaaacaagtgaaggaagcaaaatctaaatgcaaaagcattgcccttcttctaacggatgctcccaaccccaactccaagggggtgttgatgtttaagaagcgacgtcggagggccaggaaatacaccctagttagctacggtactggcgagcttgagcgagaggcggacgaggaggaagaaggtgacaaggaggatacatgtgaagtagcatttcttggtgcaagcgaatcagaggtggatgaagagttattgtctgacgttgacgacaacacacaagttgtgaactttgactgggattctggactggtggacattgaaaagaaactgaacagaggggacaagatggagatgttaccagacaccacaggcaagggagccctcatgtttgccaagaggagggagagaatggatcagatcacagcccaaaaagaagaggacaaggtaggtggaacgccaagcagagaacaagatgctgcccagaccgatggcctgagaaccacgacttcttaccaaagaaaggaggaagagtcggtaagaacgcagagctctgtgagcaaaagctacatcgaggtgagtcatggtcttggccatgttccccaacagaatggcttcagtgggacatctgagacagcaaacatccagaggatggtccccatgaatagaacggccaaacccttcccagggtctgtgaatcagccagctacccccttctcgccaacccgaaacatgacgagtcccattgctgactttcctgcacctccaccttactctgcagtcactcctccccctgacgccttctccagaggggtttcaagtccgattgctggcccagcacagccccctccatggccccagcctgccccgtggtcccagccagccttttacgattcgtctgagcgaatagcttcccgagatgagaggatctcagtgccagcaaaaagaacaggaatattgcaggaggccaaaaggagaagcacgacaaaacccatgtttacttttaaagagcccaaagtaagcccaaatcctgaactcttgtcactccttcaaaattcagaaggcaaacggggcactggagctggaggtgattccggaccggaagaagactacctcagcttgggggcagaggcttgtaatttcatgcaaagctcctctgccaaacaaaagacccctcctcctgttgctccaaaacctgcagtcaagtcctcatcctcccaaccagtaactccagtttccccagtctggtctccaggagtggctcccacccaacctcctgccttccccacatccaacccatcaaagggcaccgttgtctcctccatcaaaatagcccagccttcttaccctcctgcccggcctgcaagtactttgaacgtggctggtcccttcaaaggaccacaagcagcagtagccagtcagaattacacacccaaaccaacagtttccacaccaacagtcaatgctgttcagcctggtgcagtgggaccatccaatgagcttccaggaatgagtgggagaggagctcagctctttgctaaaaggcagtcgagaatggagaagtatgtggtcgattcagacacggtgcaggcccacgctgctcgagctcagtctcccactccatctctcccggccagttggaagtactcctccaatgtccgagcacctcctcctgtggcctataatcctatccactcgccgtcttacccactggctgctctcaagtctcagccatcagctgcacagccctccaaaatgggcaagaaaaagggaaagaaacccctcaatgcattagatgtcatgaagcaccaaccgtatcagctcaatgcatccttgtttactttccaacctccagatgcaaaggatggcctcccccagaagtcatcagtcaaggtcaattcagccctggccatgaagcaagctcttcctccccggccagtgaatgctgcctcacctacgaatgtgcaggcttcgtcagtgtactcggtaccagcctatacctctcctccttccttctttgcagaggcctcctcaccagtcagtgcatccccagtgcctgtgggcattcccacctcgccaaagcaagaatcagcctcatcatcttattttgtggcaccaaggccaaagttctcagccaagaaaagtggtgtcacaattcaggtgtggaaaccatctgttgtggaagagtaatcttgtagctgaagctgagtgtccactttgcttgaaatgaattgtttgcagtgtttcttgagtccctgagaatgcctagcaaagtcctcaacttacttaatttcagatatgtcacctcctaatctgggtccaaggagtataatatttttaatgagtcaaaaatccaactcagattgacctaaaatatatttatcttctttgcacacttaaaaaatccaggagcaccccaaaatagacatgtaccgttatattaagtaagcaggagacttaggatttgtgctgtagccacaagaaagacagtgatcagtgatatcaaacatcaggaatcagcctttatgtaacataacagctgtcctcctatggtgaaaggttcaaatgtagtgaaggtataacctatattgactgagatttcccttttaggtagtgccttatctctattactagtgttaaaggaataaggaatctatgaaggacagggagcagctctggtctgtcaatctcagccacctgtttgatatcacagagaagatactcggaggattgttggaatgtatatagtttagtaagaagtgggtaagaaagagggtcttaattactgagcacttattatgtattaggttctttgccagatgtttttacatatataaactcatttcagaaaacttatttaaagtaaatggggccgggtatggtggttcatgcctggaatcctagcactttgggaggctgaggtaggaggactgcttgaggccgggagttggagaccagcctgagcaacatagtgagaccctgtctcaataataataataataatagtaataatgaagtaaatgggataaggaaagaaggataattatctttaaaggttgattcccaccctccctccccagttacttaaggaactaagtgagtacatctccagttgcccatgaaagcataagtttgttttcctcagctgaggcaagtggtagagtatacaggataacgaagtaacatgtaaaaggcaggacgcacataaaggtgtacatggctattgtttcacctggagaaaccacatgattgggacctgaaggtttactgactgactacaggggctgattgtgaagcacgaggaaccccatgtgtgtggagactgtagggtgagagcacacaattattagcatcatttctgagtgatctcacagattttttttcttgtgtttgctttgctttttgacaactgcttctcccacgttccttgcaattctattctctcaccttcactttactatttgtattcgatggaccaggataattcaggcaaggttaccttgtaaactttaattggccacacaccatgttgtcacccagctggctatgaagtgaataatggtactgaaagtaaacctgaagacctttctcagatctattttaagtctgagtctgaccaaccatggaaaatattcgacatgaattaatgtagagaactataaagcatttatgacagctccaagaaaaatcatctactctatgcaggagatatgtttagagacctctcagaaaaacttgcctggtttgagggtacacagtaccattttaatcttctgaaaatatctgtattcctgctctttttctgctgtcactgtcaatctgctatatttttcactatcctattaaaatattactgtctcctttatctgttcaatgtccatattttaaaaaaatcttccttgtatgagctattctgatctaaataatttctctgatatttctctatatggctcccacaacaatttcattgttgttagcatatctatttctccatacattgtaaaactgtaatccttaggtatttctaaaacataaagaggagaattaagtcagctgcagaacaatggggctgattcttctgctttttctctggaaaatctttcattgcttttggtggaaatttacctagaggttacaaccacaggatgtagcttggtctcttatttgcctttttgggaaaccaattaagattaatacaggataaaggaaaaaagcaatctattcattatataacacagttgtttgtattacttgttccctgcaaaggaaatctgttgaatgcttgcattttgaattcttttctaatagaacaaccaaaaaaggcttcttatggtgcagcaggaaaaaagatcatttttatagctttgcattcttaacatagcatttaaagagcggcatgaattagaggaaagacatggaacacacaggtagtcggtttgagatcatcggcttaaaagtatcctaggatggtaatgacccagaagtatttccagttgtctagtggtgtggtatgcaggaatgagaagtgttttctttccatttcctgttggacaggtggcaatcttagcagagccactatttggagttgataactaaagatgcaaataacatgactatgccttctggtcatcctaggactatttggagttctccaaaaccttgtaagaggcatgtcaggcatgcagtaaaagcatctacaacttcagctgggcactggcagcataggtctcatcttggaccatacagtcccactttatagaagagggtggaagttctccaaaacaatatccacaacaaagtctgacctcactctgagggagatgggaagtgggaggaagaaggactaaccagctccctggagtaagaggaatttgctttccctgtctgcccaccaggggctatatgtgccacctttcaggttggggccaaggaagtgatgtcagtgtgacagaagggagagttagacctccagacgtcagcctccctcccatggggtacattttcaatctgagtgttgttgccttagctgtgttggtattagcttgattggttggtccgctggttatgaggtgtagggaggcagtttttgtttagtttttaggactttgcctcttcctttgtccttagcataatttctaggcagagcatccacgaagtcggttttcattgccagctcaagagcgacaatcatttacgagttcctatgttatgttaggtgccttatgtatattatcccaaatccactgcatggtttaaatacaggcactggaatataaatgaaaaaggtcattacagtcactgactttctgcaggaccttaaacatttctctttccacaagtttccccttaatcatgtgtcaaacctctcttcctgacgggaatgttgtgctataatgaatctgcataacgcttgggattctaggaggaaggaaggttccatggacatgtaagtacagcatattcccctcagtcttctaggagggcagagtgaatcccagaactggtaagattgggaatctgagcattgccactttaatcttagaatatttatcattttgacacatcctgttttttagagaggaaaacaaacacagtttctgcattggtagtgtaaagcataccttgttaggaacgtgttttgtaagacacatttgggttgtcactctagagcatgtcaaactttgtacttcaaaatatatttagtatgattgttagtggtaacatatatcaaggctttgaattaactgttttatttaattttcacaagaagcacttattttagccataggaaaaccaatctgagctacaaatagttctttaaaataagcccaggttatttagctattctagaaagtgccgacttctttcaagaagcaggcattgtaggacagctgagaattatcacatagcctaaattctagcctggcagcaagagtcacatctgagatgtccaaaaaaaaaaaaaaaacacctgatctacattgaaagggggtagactaacgtatgtgagaccattttcctatttgcagttacaaggttaaagaactttgaaggtcattcggctgctaagaggcatgtcgaacactctgtgtggctctttcacagtaaaccctcctaagagcagaagacacatggctgttagtgtctgcgtttagatttaatttctcaaataaaggcccttggctgcgtatcatttcatccagttataaactagggctcctgcaagcacccccattctaagggtgaattattgaaatcagttgctatttgatgagtcacaactggcccagcaggcagggcatttgaagtcatggtcatcaaaaagaaatgattgttttttgaaaagctaaatgcttaaaatgcttctagagggaagtcgtggggcgtgtgctcattctctttaaaatcagggttgttgagtttgtttttaaacatttttataagttcatgagaaaaaatatataaattctaagaaccaacactgtattcccagaaacatgaccctcgctggtcttgggtccacatatcattggactctgggggacacaaagatgcctgtgacactttggtgttgccgagttagtcaacaattattctgggaaaaagcagaattgaattcttctctagatgtcctaccagggttggccaagggccacaaagcaggctaataaattcccacaggatccagacaccaggcaaaattgctctaagaagccagttactgtcatccctctatggttctagaaaaaatagtacaaaaatgacaggtcatcctatgagcgtcatgccaatgaaaccccatcttctggagaagcccttgaatcagaattatcttttttcttgatgtcgtcagatgcagccagtttcttaatttttttaaaaactgtatgtttctgtggtatgtatatttgtacacctaactacctggcacttggaaatcacagcactactcagaggcaattgaataaagagaaatttaattttaaatatcaagtcctgtcaaacatttctcaaacttctgattttatcaaaggtttgccagccaataaagtgcatcccaagtatacaggggagaaagctagactcctacagggtcctagagtttaagtaatttttttgttattaatataggtaataatttttctaatttttattttttggttccaaatgtaaagctccttgtgtttacctctgtttatgtcattcttgacatgtttatctaaattatgtgtgctctgtgacaggtgaaatgtaaatctgggatccatagtcaagatatcataaggacctacttcccagcctacctttcttcctctacctgataatgataatactcaaaataacaacattcaaaggaaacacaaagaaatcctgctttcacatctcctatttcttgggctccttaataactactgatggtttgttcatgaaaaaaaatttttaaatcaaaagattgtacttggccctgagttgaaaaaatttcaaaaatcaaaagtttgtacttggccctgagttgaaaaaaaaaattcacattctaagaataaacagaaaaatgttcttcttggaagtaaataacaaaagccatagtgttttcatttgtcttttcttcaggatacacggtagaagtcagagaatctttgatacttttatttggtgcaataatcaaggccatgcaacaacccaaaatcaagcattttggttcaagtcaggatgacatgagtggggacagaagctgtggcagtcattcaaataatctcatgggtcctgaggaaaagacaggagttaatgtattaagtttctactatatgcaggaactgtgttaaatattttacataagttttgataatagctaacattagctgagcacaaaatttgggccctgatttgtgctgagtatctttcacagattactgcttttaatcagcagtccttgtgagctaggtatgatcattatccccattttatagattacagatgagattctgaggcacaaagaggctaagtaacttgccaaagatcatacgatgttaagtaatggcccctggattcagtctgcagcctgaattcttaaccaattatactgtgatttcattattcttcagaattacactaaaaagaaggtattattcccattttacagatgaggtatctaagctcagagaagctaaacaacttgtgcaacaatcactaagcttataagcagtggattagggttagatttagatatttgtctggcatccaaacctgtgctctccctacagtaccacatggtttccacagtctcatcagaccccggaatttcactccctgagactgcttaattgtgaatttcccaaactgattcaccaagagcctactgtctctgctttgtagatagctttgaccacattcaatgacattaggaaagactccatttcccaagatggctcagaaaatcagatgctatgacgcatgttgaaagtgaaaacccatctctgagaaagaagcatctgttttattagtaaaaaaaaaaaatgaaatttacagcaatgttgtgtgacttctcaaaattctttcattttcttatttcagaatgaatagtgttgttcgttggctgggaatggggaagaatgtgatttttaaaaataaagcataatcaaactctgc

SEQ ID NO: 188065 - DNA, 4298 bp, Homo sapiens
  Payload ID: 17014
  Gene Symbol: SYNPO2
  Gene Name: synaptopodin 2
  ENST ID: ENST00000448416
  CDS Start-End: 197-568
gagcccattagccgcacaaattcgcagcaggcggctggggcggcggctggggcagcggctgcagcagcggcggacgctctgcattacccagtcttgcgtcctcggcaggcgcccgaagctgagtgcgcatcctctaccgcacccaagcttcgtctgtctcgtcaagctcttcatgctgcccaactaaaaggaaaacatgggcacaggggattttatctgcatttccatgactggaggggcgccctgggggttcagattgcaaggtggcaaggagcagaagcagcccttacaagttgcaaagattcgaaatcagagcaaagcctctgggtctgggctctgtgagggagatgaagtggtttccatcaatggcaacccttgtgcagatctcacctaccctgaagtcatcaagctcatggaaagcataacagactctctccaaatgctcatcaaaaggagagtgggcgctccctttctcttcctggaagatcagtcccaccccccatttctacatctccttgggtataccagcctacttatagttactctagtaaaccaaccgatggactagagaaagcaaacaagagaccaactccttgggaagcagcagcaaagtctcctctcggtctagtggatgatgctttccaacccagaaacatccaggaatccattgtggcaaatgtggtttcagcagctcggaggaaggtgcttccagggcctccagaggattggaatgaaagactgtcctatattcctcaaacccagaaggcctatatgggctcatgtggaaggcaagagtataatgtcacagccaataataatatgtccaccacctcccaatatggttcacagttgccatatgcatattataggcaggcttcaagaaatgattctgcaatcatgtccatggaaaccaggtctgattactgtcttccagtagctgattacaactacaacccacacccaaggggatggagacgccaaacatgaaagttagaagaacggatcatgtgccaactgtagttttttaaaaaaaacgctcctttgtagggttttaaacttttctaatagatttagattcacttttggtcttggcttgttctcataagtcatttatctaagtttgtgtttctgtgtgtgtgtgtgtgtgtgtatgtatgtgaatatacacacacacacacacacaggtgagtgtgaatacttccttgttggctgatccatagagcattacttggaagaaaatttcactatttgcattgatgtgctggcatttatatgtaattcataattttgattccattaataggtagtctatgcaacaaactctactcaattaaagtaaaactaagtatttcttcattgtaccttagtccaggaagaaattaatggaatatggtgtgctaattatcactacctataacatgaggaatataacattgcagaaatttctcataggggcatgccagtgagcaattactttataaaaatattttccttggtgttaagtatttctctgcaacttttttttttttttttttttttttttgagatggagtcttgctctgtcccacccagtctggagtgcaatggtgcgatcttggctcactgcaacctgcgcctcctgggttcaagcaattctcctgcctcagcctcctgagtagctgggattacaggcatgaaccaccacacctggataatttttgtatttttagtagacacaaagtttcaccatgttggtcagactggtcttgaactcctgacctcgtgatctgcccgcctcagcctcccaaagtgctgggattacaggcgtgagccaccacacctggcctttctgcaacatttttttaaaaaaatctaataaatcttagatttttaaaaaagaattaaaatgtgggagttctcagaaagaaataaacacatgagaataagattattacacattttggaaggacttttgaggaatgatgtgatgtgtagagaatagaaagatttagatatatgcctgtgacaggaatagattctgggttcaggggtccccatctgtcaaatgagaagattggattatctaatcttttagatccttaacaactctgatattctgagattctctcatttgtagaatgcccgctgatgcattgtttattttttttgctcataatataaatatcagattatgtttaggagtggattaggtaattagtgtcactacatgtatcattaaaggtcctaaaaggaattgttaggcggcaggctttgtgttacgtgttacatggagtgagggtagatgtgaagatttaaaacgattgatggatttaaggaagtggtacataaatatgtctgttattatgcaatcgtaggtcatgataatttattcagttatagaaaacatgccacagaagcctatgtaacaagtggtgcttctttagaaagttgtcattagaatgttctgaggaagttaagcagctgcttcatcaatcccatgacacatgccttgttagcatgcccatcaaataatcagatcaaacacctgctccttattgccatacccacgaactgttaaatataaaaaaattcaaagtatttgacatcttaagcaaatatccagaatatttttaagtaaaaaaccatcttaagtattcaaaatttccttggttttttaaaggtgataattttgctttgtgttacttttttgctcttgaatgtatcgttatgatggtctcttataatcatggtatctttcacagaataaaaattaaaaataatgccagggtgcaagtgaccaaggccttatcttgaaagttaaaaaaaaaaagtaaagaaatcacagtaagttctattagtgatgatagaaccagatataaaattgttcagtgatggagaaaagaaacgataaatactttccaaggttatattgttaaattatcttaaattatcaaggtgtaagatgtaatgatcccaagagtttttatagaatcctaaaaaataacgcctgatgtatagattagttagcaaattctcagaaatcccccacataaaagccttactttgttcaaaatttattatagtggtttaatcattttagatttgaatgttttaagataggagagacttagcagaaaatacttggcttgccagggccacgttctacttcattgctttcttttataagtgcaaggagttatttccatcagttgacatagatattattcactaaaattttcagcagactcaaaatagagaggagactttaaacttacatgttagcataaaacagacttctctctcattgcatgcactagatcaatattatcatctgtattaagctatctgaatttattcgagacattaagaaaaagacagtacatggtgggaaagctgcacatttctcacaaggaaaaaaacattctatatttgtagcagaaatcagtggtttgaaaagtcatactttgcagatatgaacctgaaaatcaaagtgccattgttaaatcatcctaaagtgtactgtgggtattctccagcatacttgaaaatgaataaagttagattgctcacattgaagctaatggttgagacaagacacctgccagagtgaagtttgattcctatgggtgagaagatgtagatgactattgttctcactaaagttctaaaataatagcaagtgtagagaagagccgttgctttgaaaatacataccacatttgttataaagcatttgtttgttagtatcaatcacataggtagaaagagtttgagttttactgtggattaaaaagccttccctaaaaagagagcatgccagtcatagagacactaatttggcacttttcctccttcttaggtttaaatgttataccaatgcatgtgtttgaaatatccattaagatgatttaaaatttgtcttgtattttgagtttcttaaatgcgtggattcttgttcatttatctctgaatatgtctcttttatattttggcacaattatacacattggaaagggccaacctattagggctcaagtatgtatatgcaaaaaaaaaaagttatatcaaacaggcacagttattacaactagagagaaattccagaaatatttgtttttttaagagaaagtaaattttcacattagatttctattcaaagtactaatatctacatggtccacacttttctattttaaaaaattgtgttctcttgttaaatagattaacatttccacttctgtttatcacaaaagactgtatttgaaatatgcatacggaaaattgaaattatattagtaataaatgtaacttgaaaaatc

SEQ ID NO: 188066 - DNA, 6779 bp, Homo sapiens
  Payload ID: 17014
  Gene Symbol: SYNPO2
  Gene Name: synaptopodin 2
  ENST ID: ENST00000504178
  CDS Start-End: 1-3466
gggagatgaagtggtttccatcaatggcaacccttgtgcagatctcacctaccctgaagtcatcaagctcatggaaagcataacagactctctccaaatgctcatcaaaagaccatccagtggaataagtgaggctttgatatctgaaaatgaaaacaaaaacctcgagcatctcacacatgggggttatgtggaaagtaccaccctgcagattcgaccggccacaaagacccagtgcacagaattcttcctcgcccctgtcaagactgaagttcccctagctgagaaccaaagaagtggtcccgactgtgcaggcagcttgaaagaagaaacaggcccgagctaccaaagggctccccaaatgcctgactcccaaagaggacgcgtggcagaagagctgatcttaagggagaaggtagaagcggtacagcctgggcctgtggttgagctgcaactgtccctttcacaggagagacataagggcgctagtggccctttagtggctctcccgggagctgaaaaatctaagtctcctgacccagaccctaacttgtcacatgacaggattgtccacataaattcgatccctactaatgagaaagcagaccctttcctgaggtccagcaagataatccagatctccagtggcagagagttgagagtgatccaggaaagtgaagcaggagatgcgggactgccccgggtggaagtgatcctcgactgctctgacaggcagaagacagaagggtgcaggcttcaggcaggaaaggagtgtgtggattctccagtggaaggagggcagtcagaagcacctccttctctggtatcctttgccgtctcatcagaaggcacagagcagggagaagatccacgctcggaaaaagatcacagcagacctcacaagcaccgagcgcggcatgcacggctcaggaggagtgaaagcctgtcagaaaaacaagtgaaggaagcaaaatctaaatgcaaaagcattgcccttcttctaacggatgctcccaaccccaactccaagggggtgttgatgtttaagaagcgacgtcggagggccaggaaatacaccctagttagctacggtactggcgagcttgagcgagaggcggacgaggaggaagaaggtgacaaggaggatacatgtgaagtagcatttcttggtgcaagcgaatcagaggtggatgaagagttattgtctgacgttgacgacaacacacaagttgtgaactttgactgggattctggactggtggacattgaaaagaaactgaacagaggggacaagatggagatgttaccagacaccacaggcaagggagccctcatgtttgccaagaggagggagagaatggatcagatcacagcccaaaaagaagaggacaaggtaggtggaacgccaagcagagaacaagatgctgcccagaccgatggcctgagaaccacgacttcttaccaaagaaaggaggaagagtcggtaagaacgcagagctctgtgagcaaaagctacatcgaggtgagtcatggtcttggccatgttccccaacagaatggcttcagtgggacatctgagacagcaaacatccagaggatggtccccatgaatagaacggccaaacccttcccagggtctgtgaatcagccagctacccccttctcgccaacccgaaacatgacgagtcccattgctgactttcctgcacctccaccttactctgcagtcactcctccccctgacgccttctccagaggggtttcaagtccgattgctggcccagcacagccccctccatggccccagcctgccccgtggtcccagccagccttttacgattcgtctgagcgaatagcttcccgagatgagaggatctcagtgccagcaaaaagaacaggaatattgcaggaggccaaaaggagaagcacgacaaaacccatgtttacttttaaagagcccaaagtaagcccaaatcctgaactcttgtcactccttcaaaattcagaaggcaaacggggcactggagctggaggtgattccggaccggaagaagactacctcagcttgggggcagaggcttgtaatttcatgcaaagctcctctgccaaacaaaagacccctcctcctgttgctccaaaacctgcagtcaagtcctcatcctcccaaccagtaactccagtttccccagtctggtctccaggagtggctcccacccaacctcctgccttccccacatccaacccatcaaagggcaccgttgtctcctccatcaaaatagcccagccttcttaccctcctgcccggcctgcaagtactttgaacgtggctggtcccttcaaaggaccacaagcagcagtagccagtcagaattacacacccaaaccaacagtttccacaccaacagtcaatgctgttcagcctggtgcagtgggaccatccaatgagcttccaggaatgagtgggagaggagctcagctctttgctaaaaggcagtcgagaatggagaagtatgtggtcgattcagacacggtgcaggcccacgctgctcgagctcagtctcccactccatctctcccggccagttggaagtactcctccaatgtccgagcacctcctcctgtggcctataatcctatccactcgccgtcttacccactggctgctctcaagtctcagccatcagctgcacagccctccaaaatgggcaagaaaaagggaaagaaacccctcaatgcattagatgtcatgaagcaccaaccgtatcagctcaatgcatccttgtttactttccaacctccagatgcaaaggatggcctcccccagaagtcatcagtcaaggtcaattcagccctggccatgaagcaagctcttcctccccggccagtgaatgctgcctcacctacgaatgtgcaggcttcgtcagtgtactcggagagtgggcgctccctttctcttcctggaagatcagtcccaccccccatttctacatctccttgggtataccagcctacttatagttactctagtaaaccaaccgatggactagagaaagcaaacaagagaccaactccttgggaagcagcagcaaagtctcctctcggtctagtggatgatgctttccaacccagaaacatccaggaatccattgtggcaaatgtggtttcagcagctcggaggaaggtgcttccagggcctccagaggattggaatgaaagactgtcctatattcctcaaacccagaaggcctatatgggctcatgtggaaggcaagagtataatgtcacagccaataataatatgtccaccacctcccaatatggttcacagttgccatatgcatattataggcaggcttcaagaaatgattctgcaatcatgtccatggaaaccaggtctgattactgtcttccagtagctgattacaactacaacccacacccaaggggatggagacgccaaacatgaaagttagaagaacggatcatgtgccaactgtagttttttaaaaaaaacgctcctttgtagggttttaaacttttctaatagatttagattcacttttggtcttggcttgttctcataagtcatttatctaagtttgtgtttctgtgtgtgtgtgtgtgtgtgtatgtatgtgaatatacacacacacacacacacaggtgagtgtgaatacttccttgttggctgatccatagagcattacttggaagaaaatttcactatttgcattgatgtgctggcatttatatgtaattcataattttgattccattaataggtagtctatgcaacaaactctactcaattaaagtaaaactaagtatttcttcattgtaccttagtccaggaagaaattaatggaatatggtgtgctaattatcactacctataacatgaggaatataacattgcagaaatttctcataggggcatgccagtgagcaattactttataaaaatattttccttggtgttaagtatttctctgcaacttttttttttttttttttttttttttgagatggagtcttgctctgtcccacccagtctggagtgcaatggtgcgatcttggctcactgcaacctgcgcctcctgggttcaagcaattctcctgcctcagcctcctgagtagctgggattacaggcatgaaccaccacacctggataatttttgtatttttagtagacacaaagtttcaccatgttggtcagactggtcttgaactcctgacctcgtgatctgcccgcctcagcctcccaaagtgctgggattacaggcgtgagccaccacacctggcctttctgcaacatttttttaaaaaaatctaataaatcttagatttttaaaaaagaattaaaatgtgggagttctcagaaagaaataaacacatgagaataagattattacacattttggaaggacttttgaggaatgatgtgatgtgtagagaatagaaagatttagatatatgcctgtgacaggaatagattctgggttcaggggtccccatctgtcaaatgagaagattggattatctaatcttttagatccttaacaactctgatattctgagattctctcatttgtagaatgcccgctgatgcattgtttattttttttgctcataatataaatatcagattatgtttaggagtggattaggtaattagtgtcactacatgtatcattaaaggtcctaaaaggaattgttaggcggcaggctttgtgttacgtgttacatggagtgagggtagatgtgaagatttaaaacgattgatggatttaaggaagtggtacataaatatgtctgttattatgcaatcgtaggtcatgataatttattcagttatagaaaacatgccacagaagcctatgtaacaagtggtgcttctttagaaagttgtcattagaatgttctgaggaagttaagcagctgcttcatcaatcccatgacacatgccttgttagcatgcccatcaaataatcagatcaaacacctgctccttattgccatacccacgaactgttaaatataaaaaaattcaaagtatttgacatcttaagcaaatatccagaatatttttaagtaaaaaaccatcttaagtattcaaaatttccttggttttttaaaggtgataattttgctttgtgttacttttttgctcttgaatgtatcgttatgatggtctcttataatcatggtatctttcacagaataaaaattaaaaataatgccagggtgcaagtgaccaaggccttatcttgaaagttaaaaaaaaaaagtaaagaaatcacagtaagttctattagtgatgatagaaccagatataaaattgttcagtgatggagaaaagaaacgataaatactttccaaggttatattgttaaattatcttaaattatcaaggtgtaagatgtaatgatcccaagagtttttatagaatcctaaaaaataacgcctgatgtatagattagttagcaaattctcagaaatcccccacataaaagccttactttgttcaaaatttattatagtggtttaatcattttagatttgaatgttttaagataggagagacttagcagaaaatacttggcttgccagggccacgttctacttcattgctttcttttataagtgcaaggagttatttccatcagttgacatagatattattcactaaaattttcagcagactcaaaatagagaggagactttaaacttacatgttagcataaaacagacttctctctcattgcatgcactagatcaatattatcatctgtattaagctatctgaatttattcgagacattaagaaaaagacagtacatggtgggaaagctgcacatttctcacaaggaaaaaaacattctatatttgtagcagaaatcagtggtttgaaaagtcatactttgcagatatgaacctgaaaatcaaagtgccattgttaaatcatcctaaagtgtactgtgggtattctccagcatacttgaaaatgaataaagttagattgctcacattgaagctaatggttgagacaagacacctgccagagtgaagtttgattcctatgggtgagaagatgtagatgactattgttctcactaaagttctaaaataatagcaagtgtagagaagagccgttgctttgaaaatacataccacatttgttataaagcatttgtttgttagtatcaatcacataggtagaaagagtttgagttttactgtggattaaaaagccttccctaaaaagagagcatgccagtcatagagacactaatttggcacttttcctccttcttaggtttaaatgttataccaatgcatgtgtttgaaatatccattaagatgatttaaaatttgtcttgtattttgagtttcttaaatgcgtggattcttgttcatttatctctgaatatgtctcttttatattttggcacaattatacacattggaaagggccaacctattagggctcaagtatgtatatgcaaaaaaaaaaagttatatcaaacaggcacagttattacaactagagagaaattccagaaatatttgtttttttaagagaaagtaaattttcacattagatttctattcaaagtactaatatctacatggtccacacttttctattttaaaaaattgtgttctcttgttaaatagattaacatttccacttctgtttatcacaaaagactgtatttgaaatatgcatacggaaaattgaaattatattagtaataaatgtaacttgaaaaatcaa

SEQ ID NO: 188067 - DNA, 3934 bp, Homo sapiens
  Payload ID: 17014
  Gene Symbol: SYNPO2
  Gene Name: synaptopodin 2
  Uniprot ID: Q9UMS6
  ENST ID: ENST00000610556
  CDS Start-End: 242-3934
atttgttgccttcaaaatattcagaacatgttgctctggagctcaggagagaaggtgaagtaaagatctgaattcggcaactcggaagcgaagctccaatcttgaggatggatcagattggtgagggagactgtcatatagagtgagaagagagatccaaggacagaactgcaggaagcatcaatatttgaggaatgagaaaggaagaaaagcctcccacaaaagagatgagacaagaggaatggttacacagattcgaaatcagagcaaagcctctgggtctgggctctgtgagggagatgaagtggtttccatcaatggcaacccttgtgcagatctcacctaccctgaagtcatcaagctcatggaaagcataacagactctctccaaatgctcatcaaaagaccatccagtggaataagtgaggctttgatatctgaaaatgaaaacaaaaacctcgagcatctcacacatgggggttatgtggaaagtaccaccctgcagattcgaccggccacaaagacccagtgcacagaattcttcctcgcccctgtcaagactgaagttcccctagctgagaaccaaagaagtggtcccgactgtgcaggcagcttgaaagaagaaacaggcccgagctaccaaagggctccccaaatgcctgactcccaaagaggacgcgtggcagaagagctgatcttaagggagaaggtagaagcggtacagcctgggcctgtggttgagctgcaactgtccctttcacaggagagacataagggcgctagtggccctttagtggctctcccgggagctgaaaaatctaagtctcctgacccagaccctaacttgtcacatgacaggattgtccacataaattcgatccctactaatgagaaagcagaccctttcctgaggtccagcaagataatccagatctccagtggcagagagttgagagtgatccaggaaagtgaagcaggagatgcgggactgccccgggtggaagtgatcctcgactgctctgacaggcagaagacagaagggtgcaggcttcaggcaggaaaggagtgtgtggattctccagtggaaggagggcagtcagaagcacctccttctctggtatcctttgccgtctcatcagaaggcacagagcagggagaagatccacgctcggaaaaagatcacagcagacctcacaagcaccgagcgcggcatgcacggctcaggaggagtgaaagcctgtcagaaaaacaagtgaaggaagcaaaatctaaatgcaaaagcattgcccttcttctaacggatgctcccaaccccaactccaagggggtgttgatgtttaagaagcgacgtcggagggccaggaaatacaccctagttagctacggtactggcgagcttgagcgagaggcggacgaggaggaagaaggtgacaaggaggatacatgtgaagtagcatttcttggtgcaagcgaatcagaggtggatgaagagttattgtctgacgttgacgacaacacacaagttgtgaactttgactgggattctggactggtggacattgaaaagaaactgaacagaggggacaagatggagatgttaccagacaccacaggcaagggagccctcatgtttgccaagaggagggagagaatggatcagatcacagcccaaaaagaagaggacaaggtaggtggaacgccaagcagagaacaagatgctgcccagaccgatggcctgagaaccacgacttcttaccaaagaaaggaggaagagtcggtaagaacgcagagctctgtgagcaaaagctacatcgaggtgagtcatggtcttggccatgttccccaacagaatggcttcagtgggacatctgagacagcaaacatccagaggatggtccccatgaatagaacggccaaacccttcccagggtctgtgaatcagccagctacccccttctcgccaacccgaaacatgacgagtcccattgctgactttcctgcacctccaccttactctgcagtcactcctccccctgacgccttctccagaggggtttcaagtccgattgctggcccagcacagccccctccatggccccagcctgccccgtggtcccagccagccttttacgattcgtctgagcgaatagcttcccgagatgagaggatctcagtgccagcaaaaagaacaggaatattgcaggaggccaaaaggagaagcacgacaaaacccatgtttacttttaaagagcccaaagtaagcccaaatcctgaactcttgtcactccttcaaaattcagaaggcaaacggggcactggagctggaggtgattccggaccggaagaagactacctcagcttgggggcagaggcttgtaatttcatgcaaagctcctctgccaaacaaaagacccctcctcctgttgctccaaaacctgcagtcaagtcctcatcctcccaaccagtaactccagtttccccagtctggtctccaggagtggctcccacccaacctcctgccttccccacatccaacccatcaaagggcaccgttgtctcctccatcaaaatagcccagccttcttaccctcctgcccggcctgcaagtactttgaacgtggctggtcccttcaaaggaccacaagcagcagtagccagtcagaattacacacccaaaccaacagtttccacaccaacagtcaatgctgttcagcctggtgcagtgggaccatccaatgagcttccaggaatgagtgggagaggagctcagctctttgctaaaaggcagtcgagaatggagaagtatgtggtcgattcagacacggtgcaggcccacgctgctcgagctcagtctcccactccatctctcccggccagttggaagtactcctccaatgtccgagcacctcctcctgtggcctataatcctatccactcgccgtcttacccactggctgctctcaagtctcagccatcagctgcacagccctccaaaatgggcaagaaaaagggaaagaaacccctcaatgcattagatgtcatgaagcaccaaccgtatcagctcaatgcatccttgtttactttccaacctccagatgcaaaggatggcctcccccagaagtcatcagtcaaggtcaattcagccctggccatgaagcaagctcttcctccccggccagtgaatgctgcctcacctacgaatgtgcaggcttcgtcagtgtactcggtaccagcctatacctctcctccttccttctttgcagaggcctcctcaccagtcagtgcatccccagtgcctgtgggcattcccacctcgccaaagcaagaatcagcctcatcatcttattttgtggcaccaaggccaaagttctcagccaagaaaagtggtgtcacaattcaggagagtgggcgctccctttctcttcctggaagatcagtcccaccccccatttctacatctccttgggtataccagcctacttatagttactctagtaaaccaaccgatggactagagaaagcaaacaagagaccaactccttgggaagcagcagcaaagtctcctctcggtctagtggatgatgctttccaacccagaaacatccaggaatccattgtggcaaatgtggtttcagcagctcggaggaaggtgcttccagggcctccagaggattggaatgaaagactgtcctatattcctcaaacccagaaggcctatatgggctcatgtggaaggcaagagtataatgtcacagccaataataatatgtccaccacctcccaatatggttcacagttgccatatgcatattataggcaggcttcaagaaatgattctgcaatcatgtccatggaaaccaggtctgattactgtcttccagtagctgattacaactacaacccacacccaaggggatggagacgccaaacatga

SEQ ID NO: 188068 - DNA, 4121 bp, Homo sapiens
  Payload ID: 17015
  Gene Symbol: SYNPO2L
  Gene Name: synaptopodin 2-like
  Uniprot ID: Q9H987
  ENST ID: ENST00000372873
  CDS Start-End: 23-2284
agccaacaccgcctttctcagcatggagacctttgagcccatcagccaagagcccctcagccaagccagctatgacaaagccccagacccagttcctgagctccaagactcgttctatgcagaactgcaacgtgcagagagcctccaagagaagagcataaaagaggccaagaccaaatgcaggacaattgcatccctgctcactgcagcccccaacccccactccaaaggggtacttatgtttaagaaacggcggcagagagccaagaagtacaccctggtgagcttcggggctgctgctgggacaggcgctgaggaggaggacggcgttccccccacgagtgagtccgagctggacgaagaagccttctctgacgcccgcagcctcaccaatcaatctgactgggacagtccctatctggacatggagcttgccagggcgggctcaagagcatcagagggccagggctctgggctgggagggcagctgagtgaggtctctgggcgaggggtgcagctctttgaacagcagcgccagcgcgcagactccagcacccaggaactggcacgggtcgaaccagcagccatgctcaacggggaaggcctgcagtcaccacctcgggcccagagtgctcccccagaggcagctgtgctcccacccagccccttgccggcgcctgtagccagccccagacccttccaaccaggtggtggagccccgaccccagctccaagcatctttaaccggtcagccaggccctttaccccgggcctacaagggcagcggccaactaccacctcggttattttccggcctttagcccccaaaagggcgaacgacagcctggggggcctcagccccgccccaccccccttcttgtcttcgcaggggcccacccctctgcccagcttcacttcaggggttcccagccacgcgccagtctctggttcccccagcaccccacgctcctcgggccctgtgacagccaccagctccctgtacatcccagcccctagtcggcctgtcaccccaggtggagctccagagccccccgctcctcctagcgcagctgccatgacctccaccgcttctatcttcctatctgcgcctttgcgaccctctgcgcgcccagaggcgcctgccccaggcccaggggctcctgagccccccagcgctcgcgagcagcgcatctctgtgccagctgcccgcacgggtatcctgcaggaggcccggcgccgggggacccggaagcagatgttccggccgggaaaggaggagacgaagaactcgcccaaccccgagctgctatcgctggtacagaacctggatgaaaagcctcgggccgggggtgcagaatctggtcctgaagaagatgctctgagcctcggggctgaagcctgcaacttcatgcagccagtaggggccaggagttacaagaccctgcctcacgtgacacctaagaccccccctccaatggctcccaagaccccgccccctatgactcctaagactccacccccagtggctcctaagcccccatctcgagggctccttgatgggctcgtgaatggggcagcctcttcggctggaatccctgagccaccaaggctgcagggcaggggtggggagctgtttgctaagcggcagagccgtgcggacaggtatgtggtggaaggtacacctggtcctggtcttggccctcggcctagaagtccttctcctaccccgtctctgcccccttcctggaaatattcacccaacatccgtgccccgcctcctattgcttacaacccactgctctctccctttttcccccaggcggcccgaactctccctaaggcccaatcccaggggcctcgggcaacacccaagcagggcatcaaggctctagattttatgcggcatcagccctatcaacttaaaactgccatgttctgttttgatgaggttcccccgactcctggccctatcgcctcagggtcccccaaaactgcccgagtccaggagattcgccggttttccactccggcaccccagcccactgcagaacccctggctcccactgtgcttgccccccgagcagccactacactggatgagcccatctggagaacagaactggcctcagcccctgttcctagcccagcccctcctccagaggctcccaggggccttggggcttctcccagctcctgcggtttccaggtagccaggccccgattttcagccaccagaacaggattgcaagctcatgtgtggaggcctggggcagggcaccagtgaacaggcacaggtcccaggaccaaggagaggtggaacatccagttcctaaagttgcttctcctaccctatcccatcccctgtcacgcatctggaagctaaattgcctcctgccagagatggtttccaagttgatgtccccttcccccaccttcctcctcactctctacctccctgccgctttccaaccaagtatgtctgctttggtatctttgcctctctttgtctctgcatttcctttcctggatctctgtctttatttccaggcttctccacccatattcctccacagatctctcttccttgacatttgtgcttttctccctgggcctcattttaatgttcagtgagaagtaaacagagcagaagtgaccactgggacttcaggcaagaagctcaccaccaggcacacagcaaagggactgaactgacccctgtttgcactaagccacccccaccccccactctgctttcccaagcttgactggcatatacctaggcctgtgtgtgtgtgtgtgtgtgtgtgtgtgtgtgtgtgtgtgctcttccgtctaaggcatgaataagaggggaggtcaaaataaagacccaatctgaggccgggcacggtggctcacgccggtaatcccagcactttgggaggccgaggcgggcggatcacgaggtcaggagatcgagaccatcctggctaacacggtgaaaccccatttccactaaaaatacaaaaaattagctgggcgtggtggcgagcgcctgtagtcccagctactcgggaggctgaggcaggagaatggcatgaacctggaaggcggagcttgcagtgagctgagattgcgccactgcactccagcctgggcgacggagcgagactctgtctcaaaacaaacaaacaaacaaaagacccaatctgagtcttatcgttgtactgatagaagggtcagatatccccacatggagttgagtgggagaaagagattcactagagaataactccttagagaccaatgtctgtagcaggtgtacagcatcttgtgaaagttatggagcatgaaaagactgaagggccaggacagtttgcatgggctgagttataccagctagaccaggaatagaacaaagaattctatacctcaggatttcaaaaagttagcaacttgagaggccagtgctgagcaacccagtacccaggaaatgaaaaaaagaaagaaaattccctccgagaatgaacaaatcattggcttcattgcctcatgagcttgagagaaaggagaagagagccagagtgtggcaagtgaggccaaaatcagaagcatggcagaaatgagtgtaagtgattgagccacagacagaagtgtggcgagggacaatgccatattgggagaaggtaaagttgagtaacaagaaaccaaccgtgtgtgagagggggattggaaaaaaatttgagggagaagaatgttagaatggaagggaatgatggtggaagggaggtgtgagggtgtgtgctgagtgttgaaagaacggttggtgtctgtgtgattttccttgagtctgttcttcagtgtgtcttctgcagcttgccatgactgcctgggaaagagtagggaaatacccagagccaaaacctcctttcagtcccaccccatccctcaaaaccccagctattgcttcttttcagcttcaggtcctgatctccaatcttagtatggactcccttctcaccaagaccaccaccagctacgtttgctgtgtaatctggaaagtgataatttcctttgcttgttgggtgtgagtcacaatactttggtttgtgcacaagaataaatttatgccccataccttc

SEQ ID NO: 188069 - DNA, 4921 bp, Homo sapiens
  Payload ID: 17015
  Gene Symbol: SYNPO2L
  Gene Name: synaptopodin 2-like
  Uniprot ID: Q9H987
  ENST ID: ENST00000394810
  CDS Start-End: 151-3084
gttgcctgcctgtggtgtgtggtgtgggggggaggcctggggcagcaggagcaggacagccggacaggaagcccagacggggttcgagcacctcaacttctctcctggggacactgttcaaactccgggggccataggccaagctgagcgatgggtgctgaggaggaggtgctggtcacactatcagggggagccccctggggcttccgacttcatgggggggccgagcagaggaaaccgttacaggtgtctaagattcgaagacggagccaggctggcagagcaggactccgagagagggaccagctcttggcaatcaatggggtctcttgcaccaacctctcccatgccagtgccatgagcctcatcgatgcctcaggaaatcagcttgtcctcactgtgcagcggttagcagacgagggtcctgtgcaatctccatctccccatgagcttcaggtgctgtcacccttatctccactaagtcctgagccccctggtgctccagttcctcagcctcttcagcctgggagccttcgttcacctcctgatagtgaggcttactacggagagactgacagtgatgctgatggccctgccacccaggagaagccccgtcgacctcgccgccgaggccccacaaggcccacccctccgggtgccccacctgatgaggtctacctgtctgacagccctgcagagccagcacctactatccctggccctcccagccagggtgacagccgtgtgagctccccgtcttgggaggatggggcagcccttcagccacccccagctgaggctctgctgttaccccatggccccctccgacctggtcctcatctcatccctatggtggggcctgttccccacccagtggcagaagatcttactaccacctacacccagaaggccaagcaagccaaactgcaacgtgcagagagcctccaagagaagagcataaaagaggccaagaccaaatgcaggacaattgcatccctgctcactgcagcccccaacccccactccaaaggggtacttatgtttaagaaacggcggcagagagccaagaagtacaccctggtgagcttcggggctgctgctgggacaggcgctgaggaggaggacggcgttccccccacgagtgagtccgagctggacgaagaagccttctctgacgcccgcagcctcaccaatcaatctgactgggacagtccctatctggacatggagcttgccagggcgggctcaagagcatcagagggccagggctctgggctgggagggcagctgagtgaggtctctgggcgaggggtgcagctctttgaacagcagcgccagcgcgcagactccagcacccaggaactggcacgggtcgaaccagcagccatgctcaacggggaaggcctgcagtcaccacctcgggcccagagtgctcccccagaggcagctgtgctcccacccagccccttgccggcgcctgtagccagccccagacccttccaaccaggtggtggagccccgaccccagctccaagcatctttaaccggtcagccaggccctttaccccgggcctacaagggcagcggccaactaccacctcggttattttccggcctttagcccccaaaagggcgaacgacagcctggggggcctcagccccgccccaccccccttcttgtcttcgcaggggcccacccctctgcccagcttcacttcaggggttcccagccacgcgccagtctctggttcccccagcaccccacgctcctcgggccctgtgacagccaccagctccctgtacatcccagcccctagtcggcctgtcaccccaggtggagctccagagccccccgctcctcctagcgcagctgccatgacctccaccgcttctatcttcctatctgcgcctttgcgaccctctgcgcgcccagaggcgcctgccccaggcccaggggctcctgagccccccagcgctcgcgagcagcgcatctctgtgccagctgcccgcacgggtatcctgcaggaggcccggcgccgggggacccggaagcagatgttccggccgggaaaggaggagacgaagaactcgcccaaccccgagctgctatcgctggtacagaacctggatgaaaagcctcgggccgggggtgcagaatctggtcctgaagaagatgctctgagcctcggggctgaagcctgcaacttcatgcagccagtaggggccaggagttacaagaccctgcctcacgtgacacctaagaccccccctccaatggctcccaagaccccgccccctatgactcctaagactccacccccagtggctcctaagcccccatctcgagggctccttgatgggctcgtgaatggggcagcctcttcggctggaatccctgagccaccaaggctgcagggcaggggtggggagctgtttgctaagcggcagagccgtgcggacaggtatgtggtggaaggtacacctggtcctggtcttggccctcggcctagaagtccttctcctaccccgtctctgcccccttcctggaaatattcacccaacatccgtgccccgcctcctattgcttacaacccactgctctctccctttttcccccaggcggcccgaactctccctaaggcccaatcccaggggcctcgggcaacacccaagcagggcatcaaggctctagattttatgcggcatcagccctatcaacttaaaactgccatgttctgttttgatgaggttcccccgactcctggccctatcgcctcagggtcccccaaaactgcccgagtccaggagattcgccggttttccactccggcaccccagcccactgcagaacccctggctcccactgtgcttgccccccgagcagccactacactggatgagcccatctggagaacagaactggcctcagcccctgttcctagcccagcccctcctccagaggctcccaggggccttggggcttctcccagctcctgcggtttccaggtagccaggccccgattttcagccaccagaacaggattgcaagctcatgtgtggaggcctggggcagggcaccagtgaacaggcacaggtcccaggaccaaggagaggtggaacatccagttcctaaagttgcttctcctaccctatcccatcccctgtcacgcatctggaagctaaattgcctcctgccagagatggtttccaagttgatgtccccttcccccaccttcctcctcactctctacctccctgccgctttccaaccaagtatgtctgctttggtatctttgcctctctttgtctctgcatttcctttcctggatctctgtctttatttccaggcttctccacccatattcctccacagatctctcttccttgacatttgtgcttttctccctgggcctcattttaatgttcagtgagaagtaaacagagcagaagtgaccactgggacttcaggcaagaagctcaccaccaggcacacagcaaagggactgaactgacccctgtttgcactaagccacccccaccccccactctgctttcccaagcttgactggcatatacctaggcctgtgtgtgtgtgtgtgtgtgtgtgtgtgtgtgtgtgtgtgctcttccgtctaaggcatgaataagaggggaggtcaaaataaagacccaatctgaggccgggcacggtggctcacgccggtaatcccagcactttgggaggccgaggcgggcggatcacgaggtcaggagatcgagaccatcctggctaacacggtgaaaccccatttccactaaaaatacaaaaaattagctgggcgtggtggcgagcgcctgtagtcccagctactcgggaggctgaggcaggagaatggcatgaacctggaaggcggagcttgcagtgagctgagattgcgccactgcactccagcctgggcgacggagcgagactctgtctcaaaacaaacaaacaaacaaaagacccaatctgagtcttatcgttgtactgatagaagggtcagatatccccacatggagttgagtgggagaaagagattcactagagaataactccttagagaccaatgtctgtagcaggtgtacagcatcttgtgaaagttatggagcatgaaaagactgaagggccaggacagtttgcatgggctgagttataccagctagaccaggaatagaacaaagaattctatacctcaggatttcaaaaagttagcaacttgagaggccagtgctgagcaacccagtacccaggaaatgaaaaaaagaaagaaaattccctccgagaatgaacaaatcattggcttcattgcctcatgagcttgagagaaaggagaagagagccagagtgtggcaagtgaggccaaaatcagaagcatggcagaaatgagtgtaagtgattgagccacagacagaagtgtggcgagggacaatgccatattgggagaaggtaaagttgagtaacaagaaaccaaccgtgtgtgagagggggattggaaaaaaatttgagggagaagaatgttagaatggaagggaatgatggtggaagggaggtgtgagggtgtgtgctgagtgttgaaagaacggttggtgtctgtgtgattttccttgagtctgttcttcagtgtgtcttctgcagcttgccatgactgcctgggaaagagtagggaaatacccagagccaaaacctcctttcagtcccaccccatccctcaaaaccccagctattgcttcttttcagcttcaggtcctgatctccaatcttagtatggactcccttctcaccaagaccaccaccagctacgtttgctgtgtaatctggaaagtgataatttcctttgcttgttgggtgtgagtcacaatactttggtttgtgcacaagaataaatttatgccccataccttc

SEQ ID NO: 188070 - DNA, 551 bp, Homo sapiens
  Payload ID: 17015
  Gene Symbol: SYNPO2L
  Gene Name: synaptopodin 2-like
  ENST ID: ENST00000606523
  CDS Start-End: 207-551
ctcctagttcaccactgtctgctgccacacgatgttgggaggcctgggaaagctggctgccgagggcctggcccaccgcaccgagaaggccaccgagggagccaattcgaagacggagccaggctggcagagcaggactccgagagagggaccagctcttggcaatcaatggggtctcttgcaccaacctctcccatgccagtgccatgagcctcatcgatgcctcaggaaatcagcttgtcctcactgtgcagcggttagcagacgagggtcctgtgcaatctccatctccccatgagcttcaggtgctgtcacccttatctccactaagtcctgagccccctggtgctccagttcctcagcctcttcagcctgggagccttcgttcacctcctgatagtgaggcttactacggagagactgacagtgatgctgatggccctgccacccaggagaagccccgtcgacctcgccgccgaggccccacaaggcccacccctccgggtgccccacctgatgaggtctacctgtctgacagccctgcagagcca

SEQ ID NO: 188071 - DNA, 2607 bp, Homo sapiens
  Payload ID: 17016
  Gene Symbol: SYNPR
  Gene Name: synaptoporin
  Uniprot ID: Q8TBG9
  ENST ID: ENST00000295894
  CDS Start-End: 370-1167
aaagcagtcctgcacttccagttgtgagccaagagccaagtgtgggagctcaccatggtggcagccacctccccaccaagcaggcagcgttcaccagaggggagtatcaggttcctgtactcagctgtgggttgtcactgtctaataatatgaccgttttgccatctctctgcaaatgaggctgaagctgctatctgattggtataacatctcactttccctctgcattgattttcttcttctcctcctttgcttcataaaaagagggacaagtggctggtgctgtggacagagaagctttatttttagtatgagacaacctctattttctttcaggagagggaagttggattatcaattcttttgtaaatgtgtatggtgatatttgctccgctttttgcaatctttgcatttgcaacatgcggtggctattctggaggcctgcggctgagtgtggactgcgtcaacaagacagaaagtaacctcagcatcgacatagcgtttgcctacccattcaggttgcaccaggtgacgtttgaggtgcccacctgcgagggaaaggaacggcagaagctggcattgattggtgactcctcgtcttcagcagagttcttcgtcactgttgctgtcttcgccttcctctactctttggctgccactgtcgtttacattttcttccagaacaaataccgggaaaacaaccggggcccactcattgacttcattgtcactgtagtcttttcgttcttgtggttggtgggttcatcagcttgggcaaaaggactgtctgacgtcaaagttgcaacggatcccaaggaagtattgctactaatgtcagcttgcaaacagccatccaacaaatgcatggctatccacagccctgttatgtcaagcttaaacacttctgtggtctttggattcttgaactttattctctgggctggaaacatatggtttgttttcaaggagaccggctggcattcttcgggacagagatatctttcagatccaatggagaagcactccagcagctataatcaaggtggttacaaccaagacagctatggatcaagcagtgggtacagtcagcaggcgagtttggggccaacctcagatgagtttggccaacagcctactggccccacttcctttaccaatcagatttaacagagtagcatttgcattcttctgcagtcgcctcaccatcttccatttcagtggcagaagaattttttaagggtttcaatcaattattaatgcagagagtattgaatgtaaatcagagctctctagtcttcattaaggcagcaagtcctgggttgtgaaaaatgatacttagagatgaggcgacatgaggagatatattattcatcatagatggctaattggagagtaccttgttatatatacagatactttcatggtcattttgtatgtatgttaaagtagtagaagtattttgtagcttaaagtctctagtatgtaatatgcataaagtaaatcaaatagcgttgagttttcttatgcattttgatgtgaaagatgttataataatttctagaagacaatttggtgtatcacaacatgcatgtcttatttttttttagttttaagtcctataggactatgagtctctaagttatttgtttcagaaaattattctttttttatgtgataaatcatatgatttaagtgcatgaataagcattttcccacacaatgaacatttgaactgtgtttatgaaaattttctggtttgcaccatgaatttgtcaaatggatatttataggaatatattcactactttgtatactttgcaaatttgtctctctggctttacccaagttctgaatgcattgtaattaaaatttaagtttttcttttcccccattagtaaacatttagtgctacatatgataactgcccaatatttattctatttacttagctaaatatttgcattcttgtaaccttctatggtgttttgtggctcttatcttgtggaccataaataacacggcccaataactctttgtgtttatggagtgttgttttcttagaataatggagatgcagatatagataccatagtcaaggtaccgccttgctgaagtatttatttataaagaatattctgtagaacctctactaccagctatatttttaaatcctgtttatttgtaaagctaatatgctcctcaatgtaattattaaaaattctcaagtcacagctaaacttactaattctgattttagtgtagcccctaaattaaaaatggcttccatatgccactctgtaccccaaagagagttctcatgaaatattctccagaatgtattcattatcaagaaaatgtcaatcgtcacttcctcgttttaactcagctgaaacaccaggacccaatagagagggcaagctgagcatctgtatttccagataaaagttgttattgatgtataaactcgttgcgtgattagtgatgttggaagcattttagcacaaaacagccttgtgtcttagatgatatctgtaaccagtttctgaatcccgttggataaaactgtattgtgatatctatttgatgttaataaagttattgcataca

SEQ ID NO: 188072 - DNA, 1004 bp, Homo sapiens
  Payload ID: 17016
  Gene Symbol: SYNPR
  Gene Name: synaptoporin
  ENST ID: ENST00000450542
  CDS Start-End: 217-321
gactcgcttcgcttccccgacgcgctgggttcccggagcgcagagcccagcgttagcgggtgggctccccgaggccccctgccctcgccgggctgctccagggtgtcgctcctctggctgctcccgaaggggcttctggccctgaggacggtggtgccaagcgaacttcatttttaaaaagaactggtggatgagaagagcgagcgagggcgagctatggaccctgtgagtcagctggcctctgcgggcaccttccgggtgctgaaggagccccttgccttcctgcgagccctggaattggttgcaccaggtgacgtttgaggtgcccacctgcgagggaaaggaacggcagaagctggcattgattggtgactcctcgtcttcagcagagttcttcgtcactgttgctgtcttcgccttcctctactctttggctgccactgtcgtttacattttcttccagaacaaataccgggaaaacaaccggggcccactcattgacttcattgtcactgtagtcttttcgttcttgtggttggtgggttcatcagcttgggcaaaaggactgtctgacgtcaaagttgcaacggatcccaaggaagtattgctactaatgtcagcttgcaaacagccatccaacaaatgcatggctatccacagccctgttatgtcaagcttaaacacttctgtggtctttggattcttgaactttattctctgggctggaaacatatggtttgttttcaaggagaccggctggcattcttcgggacagagatatctttcagatccaatggagaagcactccagcagctataatcaaggtggttacaaccaagacagctatggatcaagcagtgggtacagtcagcaggcgagtttggggccaacctcagatgagtttggccaacagcctactggccccacttcctttaccaatcagatttaacagagtagcatttgcattcttctgcagtcgcctcaccatcttccatttcagtggc

SEQ ID NO: 188073 - DNA, 829 bp, Homo sapiens
  Payload ID: 17016
  Gene Symbol: SYNPR
  Gene Name: synaptoporin
  ENST ID: ENST00000465156
  CDS Start-End: 110-715
aaagagggacaagtggctggtgctgtggacagagaagctttatttttagtatgagacaacctctattttctttcaggagagggaagttggattatcaattcttttgtaaatgtgtatggtgatatttgctccgctttttgcaatctttgcatttgcaacatgcggtggctattctggaggcctgcggctgagtgtggactgcgtcaacaagacagaaagtaacctcagcatcgacatagcgtttgcctacccattcaggttgcaccaggtgacgtttgaggtgcccacctgcgagggaaaggaacggcagaagctggcattgattggtgactcctcgtcttcagcagagttcttcgtcactgttgctgtcttcgccttcctctactctttggctgccactgtcgtttacattttcttccagaacaaataccgggaaaacaaccggggcccactcattgtctttggattcttgaactttattctctgggctggaaacatatggtttgttttcaaggagaccggctggcattcttcgggacagagatatctttcagatccaatggagaagcactccagcagctataatcaaggtggttacaaccaagacagctatggatcaagcagtgggtacagtcagcaggcgagtttggggccaacctcagatgagtttggccaacagcctactggccccacttcctttaccaatcagatttaacagagtagcatttgcattcttctgcagtcgcctcaccatcttccatttcagtggcagaagaattttttaagggtttcaatcaattattaatgcagagagtattgaatgtaaatc

SEQ ID NO: 188074 - DNA, 2383 bp, Homo sapiens
  Payload ID: 17016
  Gene Symbol: SYNPR
  Gene Name: synaptoporin
  ENST ID: ENST00000460711
  CDS Start-End: 114-944
ataaaaagagggacaagtggctggtgctgtggacagagaagctttatttttagtatgagacaacctctattttctttcaggagagggaagttggattatcaattcttttgtaaatgtgtatggtgatatttgctccgcataatgaagaatgcaagagtcatttccatttactttttgcaatctttgcatttgcaacatgcggtggctattctggaggcctgcggctgagtgtggactgcgtcaacaagacagaaagtaacctcagcatcgacatagcgtttgcctacccattcaggttgcaccaggtgacgtttgaggtgcccacctgcgagggaaaggaacggcagaagctggcattgattggtgactcctcgtcttcagcagagttcttcgtcactgttgctgtcttcgccttcctctactctttggctgccactgtcgtttacattttcttccagaacaaataccgggaaaacaaccggggcccactcattgacttcattgtcactgtagtcttttcgttcttgtggttggtgggttcatcagcttgggcaaaaggactgtctgacgtcaaagttgcaacggatcccaaggaagtattgctactaatgtcagcttgcaaacagccatccaacaaatgcatggctatccacagccctgttatgtcaagcttaaacacttctgtggtctttggattcttgaactttattctctgggctggaaacatatggtttgttttcaaggagaccggctggcattcttcgggacagagatatctttcagatccaatggagaagcactccagcagctataatcaaggtggttacaaccaagacagctatggatcaagcagtgggtacagtcagcaggcgagtttggggccaacctcagatgagtttggccaacagcctactggccccacttcctttaccaatcagatttaacagagtagcatttgcattcttctgcagtcgcctcaccatcttccatttcagtggcagaagaattttttaagggtttcaatcaattattaatgcagagagtattgaatgtaaatcagagctctctagtcttcattaaggcagcaagtcctgggttgtgaaaaatgatacttagagatgaggcgacatgaggagatatattattcatcatagatggctaattggagagtaccttgttatatatacagatactttcatggtcattttgtatgtatgttaaagtagtagaagtattttgtagcttaaagtctctagtatgtaatatgcataaagtaaatcaaatagcgttgagttttcttatgcattttgatgtgaaagatgttataataatttctagaagacaatttggtgtatcacaacatgcatgtcttatttttttttagttttaagtcctataggactatgagtctctaagttatttgtttcagaaaattattctttttttatgtgataaatcatatgatttaagtgcatgaataagcattttcccacacaatgaacatttgaactgtgtttatgaaaattttctggtttgcaccatgaatttgtcaaatggatatttataggaatatattcactactttgtatactttgcaaatttgtctctctggctttacccaagttctgaatgcattgtaattaaaatttaagtttttcttttcccccattagtaaacatttagtgctacatatgataactgcccaatatttattctatttacttagctaaatatttgcattcttgtaaccttctatggtgttttgtggctcttatcttgtggaccataaataacacggcccaataactctttgtgtttatggagtgttgttttcttagaataatggagatgcagatatagataccatagtcaaggtaccgccttgctgaagtatttatttataaagaatattctgtagaacctctactaccagctatatttttaaatcctgtttatttgtaaagctaatatgctcctcaatgtaattattaaaaattctcaagtcacagctaaacttactaattctgattttagtgtagcccctaaattaaaaatggcttccatatgccactctgtaccccaaagagagttctcatgaaatattctccagaatgtattcattatcaagaaaatgtcaatcgtcacttcctcgttttaactcagctgaaacaccaggacccaatagagagggcaagctgagcatctgtatttccagataaaagttgttattgatgtataaactcgttgcgtgattagtgatgttggaagcattttagcacaaaacagccttgtgtcttagatgatatctgtaaccagtttctgaatcccgttggataaaactgtattgtgatatctatttgatgttaataaagttattgcatac

SEQ ID NO: 188075 - DNA, 2436 bp, Homo sapiens
  Payload ID: 17016
  Gene Symbol: SYNPR
  Gene Name: synaptoporin
  ENST ID: ENST00000479198
  CDS Start-End: 119-727
gcttcataaaaagagggacaagtggctggtgctgtggacagagaagctttatttttagtatgagacaacctctattttctttcaggagagggaagttggattatcaattcttttgtaaatgtgtatggtgatatttgctccgctttttgcaatctttgcatttgcaacatgcggtggctattctggaggcctgcggctgagtgtggactgcgtcaacaagacagaaagtaacctcagcatcgacatagcgtttgcctacccattcaggttgcaccaggtgacgtttgaggtgcccacctgcgagggaaaggaacggcagaagctggcattgattggtgactcctcgtcttcagcagagttcttcgtcactgttgctgtcttcgccttcctctactctttggctgccactgtcgtttacattttcttccagaacaaataccgggaaaacaaccggggcccactcattgacttcattgtcactgtagtcttttcgttcttgtggttggtgggttcatcagcttgggcaaaaggactgtctgacgtcaaagttgcaacggatcccaaggaagtattgctactaatgtcagcttgcaaacagccatccaacaaatgcatggctatccacagccctgttatgtcaagcttaaacacttctgtgctttctgaaattcaatctgcgaaggcacttaagaagagagaaagggttgctactctgactggactgtgatttctgctttggtctttggattcttgaactttattctctgggctggaaacatatggtttgttttcaaggagaccggctggcattcttcgggacagagatatctttcagatccaatggagaagcactccagcagctataatcaaggtggttacaaccaagacagctatggatcaagcagtgggtacagtcagcaggcgagtttggggccaacctcagatgagtttggccaacagcctactggccccacttcctttaccaatcagatttaacagagtagcatttgcattcttctgcagtcgcctcaccatcttccatttcagtggcagaagaattttttaagggtttcaatcaattattaatgcagagagtattgaatgtaaatcagagctctctagtcttcattaaggcagcaagtcctgggttgtgaaaaatgatacttagagatgaggcgacatgaggagatatattattcatcatagatggctaattggagagtaccttgttatatatacagatactttcatggtcattttgtatgtatgttaaagtagtagaagtattttgtagcttaaagtctctagtatgtaatatgcataaagtaaatcaaatagcgttgagttttcttatgcattttgatgtgaaagatgttataataatttctagaagacaatttggtgtatcacaacatgcatgtcttatttttttttagttttaagtcctataggactatgagtctctaagttatttgtttcagaaaattattctttttttatgtgataaatcatatgatttaagtgcatgaataagcattttcccacacaatgaacatttgaactgtgtttatgaaaattttctggtttgcaccatgaatttgtcaaatggatatttataggaatatattcactactttgtatactttgcaaatttgtctctctggctttacccaagttctgaatgcattgtaattaaaatttaagtttttcttttcccccattagtaaacatttagtgctacatatgataactgcccaatatttattctatttacttagctaaatatttgcattcttgtaaccttctatggtgttttgtggctcttatcttgtggaccataaataacacggcccaataactctttgtgtttatggagtgttgttttcttagaataatggagatgcagatatagataccatagtcaaggtaccgccttgctgaagtatttatttataaagaatattctgtagaacctctactaccagctatatttttaaatcctgtttatttgtaaagctaatatgctcctcaatgtaattattaaaaattctcaagtcacagctaaacttactaattctgattttagtgtagcccctaaattaaaaatggcttccatatgccactctgtaccccaaagagagttctcatgaaatattctccagaatgtattcattatcaagaaaatgtcaatcgtcacttcctcgttttaactcagctgaaacaccaggacccaatagagagggcaagctgagcatctgtatttccagataaaagttgttattgatgtataaactcgttgcgtgattagtgatgttggaagcattttagcacaaaacagccttgtgtcttagatgatatctgtaaccagtttctgaatcccgttggataaaactgtattgtgatatctatttgatgttaataaagttattgcataca

SEQ ID NO: 188076 - DNA, 2709 bp, Homo sapiens
  Payload ID: 17016
  Gene Symbol: SYNPR
  Gene Name: synaptoporin
  Uniprot ID: Q8TBG9
  ENST ID: ENST00000478300
  CDS Start-End: 412-1269
aagtttccccggagccagagggcaccgggcgcacggctgagcctgcaccaatgtctgtgggccctgcctcgcccacctcctcgccctcccctctggagcgcggctggccaatgacagccttcccctggctccatgggtttccccctcccctgttgtatctaccctgccccagctcttccctgcccacccctcgctgactcgcttcgcttccccgacgcgctgggttcccggagcgcagagcccagcgttagcgggtgggctccccgaggccccctgccctcgccgggctgctccagggtgtcgctcctctggctgctcccgaaggggcttctggccctgaggacggtggtgccaagcgaacttcatttttaaaaagaactggtggatgagaagagcgagcgagggcgagctatggaccctgtgagtcagctggcctctgcgggcaccttccgggtgctgaaggagccccttgccttcctgcgagccctggaattgctttttgcaatctttgcatttgcaacatgcggtggctattctggaggcctgcggctgagtgtggactgcgtcaacaagacagaaagtaacctcagcatcgacatagcgtttgcctacccattcaggttgcaccaggtgacgtttgaggtgcccacctgcgagggaaaggaacggcagaagctggcattgattggtgactcctcgtcttcagcagagttcttcgtcactgttgctgtcttcgccttcctctactctttggctgccactgtcgtttacattttcttccagaacaaataccgggaaaacaaccggggcccactcattgacttcattgtcactgtagtcttttcgttcttgtggttggtgggttcatcagcttgggcaaaaggactgtctgacgtcaaagttgcaacggatcccaaggaagtattgctactaatgtcagcttgcaaacagccatccaacaaatgcatggctatccacagccctgttatgtcaagcttaaacacttctgtggtctttggattcttgaactttattctctgggctggaaacatatggtttgttttcaaggagaccggctggcattcttcgggacagagatatctttcagatccaatggagaagcactccagcagctataatcaaggtggttacaaccaagacagctatggatcaagcagtgggtacagtcagcaggcgagtttggggccaacctcagatgagtttggccaacagcctactggccccacttcctttaccaatcagatttaacagagtagcatttgcattcttctgcagtcgcctcaccatcttccatttcagtggcagaagaattttttaagggtttcaatcaattattaatgcagagagtattgaatgtaaatcagagctctctagtcttcattaaggcagcaagtcctgggttgtgaaaaatgatacttagagatgaggcgacatgaggagatatattattcatcatagatggctaattggagagtaccttgttatatatacagatactttcatggtcattttgtatgtatgttaaagtagtagaagtattttgtagcttaaagtctctagtatgtaatatgcataaagtaaatcaaatagcgttgagttttcttatgcattttgatgtgaaagatgttataataatttctagaagacaatttggtgtatcacaacatgcatgtcttatttttttttagttttaagtcctataggactatgagtctctaagttatttgtttcagaaaattattctttttttatgtgataaatcatatgatttaagtgcatgaataagcattttcccacacaatgaacatttgaactgtgtttatgaaaattttctggtttgcaccatgaatttgtcaaatggatatttataggaatatattcactactttgtatactttgcaaatttgtctctctggctttacccaagttctgaatgcattgtaattaaaatttaagtttttcttttcccccattagtaaacatttagtgctacatatgataactgcccaatatttattctatttacttagctaaatatttgcattcttgtaaccttctatggtgttttgtggctcttatcttgtggaccataaataacacggcccaataactctttgtgtttatggagtgttgttttcttagaataatggagatgcagatatagataccatagtcaaggtaccgccttgctgaagtatttatttataaagaatattctgtagaacctctactaccagctatatttttaaatcctgtttatttgtaaagctaatatgctcctcaatgtaattattaaaaattctcaagtcacagctaaacttactaattctgattttagtgtagcccctaaattaaaaatggcttccatatgccactctgtaccccaaagagagttctcatgaaatattctccagaatgtattcattatcaagaaaatgtcaatcgtcacttcctcgttttaactcagctgaaacaccaggacccaatagagagggcaagctgagcatctgtatttccagataaaagttgttattgatgtataaactcgttgcgtgattagtgatgttggaagcattttagcacaaaacagccttgtgtcttagatgatatctgtaaccagtttctgaatcccgttggataaaactgtattgtgatatctatttgatgttaataaagttattgcataca

SEQ ID NO: 188077 - DNA, 1304 bp, Homo sapiens
  Payload ID: 17016
  Gene Symbol: SYNPR
  Gene Name: synaptoporin
  ENST ID: ENST00000468110
  CDS Start-End: 207-434
gcttccccgacgcgctgggttcccggagcgcagagcccagcgttagcgggtgggctccccgaggccccctgccctcgccgggctgctccagggtgtcgctcctctggctgctcccgaaggggcttctggccctgaggacggtggtgccaagcgaacttcatttttaaaaagaactggtggatgagaagagcgagcgagggcgagctatggaccctgtgagtcagctggcctctgcgggcaccttccgggtgctgaaggagccccttgccttcctgcgagccctggaattgctttttgcaatctttgcatttgcaacatgcggtggctattctggaggcctgcggctgagtgtggactgcgtcaacaagacagaaagtaacctcagcatcgacatagcgtttgcctacccattcaggacttcattgtcactgtagtcttttcgttcttgtggttggtgggttcatcagcttgggcaaaaggactgtctgacgtcaaagttgcaacggatcccaaggaagtattgctactaatgtcagcttgcaaacagccatccaacaaatgcatggctatccacagccctgttatgtcaagcttaaacacttctgtggtctttggattcttgaactttattctctgggctggaaacatatggtttgttttcaaggagaccggctggcattcttcgggacagagatatctttcagatccaatggagaagcactccagcagctataatcaaggtggttacaaccaagacagctatggatcaagcagtgggtacagtcagcaggcgagtttggggccaacctcagatgagtttggccaacagcctactggccccacttcctttaccaatcagatttaacagagtagcatttgcattcttctgcagtcgcctcaccatcttccatttcagtggcagaagaattttttaagggtttcaatcaattattaatgcagagagtattgaatgtaaatcagagctctctagtcttcattaaggcagcaagtcctgggttgtgaaaaatgatacttagagatgaggcgacatgaggagatatattattcatcatagatggctaattggagagtaccttgttatatatacagatactttcatggtcattttgtatgtatgttaaagtagtagaagtattttgtagcttaaagtctctagtatgtaatatgcataaagtaaatcaaatagcgttgagttttcttatgcattttgatgtgaaagatgttataataatttctagaagacaatttggtgtatcacaacatgcatgtcttattttttttta

SEQ ID NO: 188078 - DNA, 1296 bp, Homo sapiens
  Payload ID: 17016
  Gene Symbol: SYNPR
  Gene Name: synaptoporin
  ENST ID: ENST00000498449
  CDS Start-End: 333-500
aagtgtgggagctcaccatggtggcagccacctccccaccaagcaggcagcgttcaccagaggggagtatcaggttcctgtactcagctgtgggttgtcactgtctaataatatgaccgttttgccatctctctgcaaatgaggctgaagctgctatctgattggtataacatctcactttccctctgcattgattttcttcttctcctcctttgcttcataaaaagagggacaagtggctggtgctgtggacagagaagctttatttttagtatgagacaacctctattttctttcaggagagggaagttggattatcaattcttttgtaaatgtgtatggtgatatttgctccgctttttgcaatctttgcatttgcaacatgcggtggctattctggaggcctgcggctgagtgtggactgcgtcaacaagacagaaagtaacctcagcatcgacatagcgtttgcctacccattcaggacttcattgtcactgtagtcttttcgttcttgtggttggtgggttcatcagcttgggcaaaaggactgtctgacgtcaaagttgcaacggatcccaaggaagtattgctactaatgtcagcttgcaaacagccatccaacaaatgcatggctatccacagccctgttatgtcaagcttaaacacttctgtggtctttggattcttgaactttattctctgggctggaaacatatggtttgttttcaaggagaccggctggcattcttcgggacagagatatctttcagatccaatggagaagcactccagcagctataatcaaggtggttacaaccaagacagctatggatcaagcagtgggtacagtcagcaggcgagtttggggccaacctcagatgagtttggccaacagcctactggccccacttcctttaccaatcagatttaacagagtagcatttgcattcttctgcagtcgcctcaccatcttccatttcagtggcagaagaattttttaagggtttcaatcaattattaatgcagagagtattgaatgtaaatcagagctctctagtcttcattaaggcagcaagtcctgggttgtgaaaaatgatacttagagatgaggcgacatgaggagatatattattcatcatagatggctaattggagagtaccttgttatatatacagatactttcatggtcattttgtatgtatgttaaagtagtagaagtattttgtagcttaaagtctctagtatgtaatatgcataaagtaaatcaaatagcgttgagttttcttatgcatttt

SEQ ID NO: 188079 - DNA, 527 bp, Homo sapiens
  Payload ID: 17016
  Gene Symbol: SYNPR
  Gene Name: synaptoporin
  ENST ID: ENST00000472899
  CDS Start-End: 137-292
ttcttcttctcctcctttgcttcataaaaagagggacaagtggctggtgctgtggacagagaagctttatttttagtatgagacaacctctattttctttcaggagagggaagttggattatcaattcttttgtaaatgtgtatggtgatatttgctccgaaagggtttctcaaacgttttttctctggatctcttcaaaaagctttttgcaatctttgcatttgcaacatgcggtggctattctggaggcctgcggctgagtgtggactgcgtcaacaagacagaaagtaacctcagcatcgacatagcgtttgcctacccattcaggttgcaccaggtgacgtttgaggtgcccacctgcgagggaaaggaacggcagaagctggcattgattggtgactcctcgtcttcagcagagttcttcgtcactgttgctgtcttcgccttcctctactctttggctgccactgtcgtttacattttcttccagaacaaataccgggaaaacaaccggggcccactcatt

SEQ ID NO: 188080 - DNA, 2480 bp, Homo sapiens
  Payload ID: 17017
  Gene Symbol: SNAP23
  Gene Name: synaptosomal-associated protein, 23kDa
  Uniprot ID: O00161
  ENST ID: ENST00000349777
  CDS Start-End: 423-899
ataatttgtttacatatctatatcttagtctagacatattgaaaggcgatgaagagcagggaaagcactgtattcgctttcttttcttcagcgttcatccagcacagtgcctggcatacggtttgccctcagtaaatgtttattgcatgaacacctcccagcttcgggcaggactgaaatctatccggttaactagtgaattcccagactctccgtctgcgtggcagggacatttaaacccccagcaccgtgattggctccagctgcaggggtgtgtctgtgtccgcggcgaacgggaagtgagcaggcgcgcgggctcggcgcgcgcaggcgcgactagggtgcagcgccaggtccggtgttggggtgtccgagttgccgccggagaggagtggcctcgcccgcttgagttttgattcatcatggataatctgtcatcagaagaaattcaacagagagctcaccagattactgatgagtctctggaaagtacgaggagaatcctgggtttagccattgagtctcaggatgcaggaatcaagaccatcactatgctggatgaacaaaaggaacaactaaaccgcatagaagaaggcttggaccaaataaataaggacatgagagagacagagaagactttaacagaactcaacaaatgctgtggcctttgtgtctgcccatgtaatagcataactaatgatgccagagaagatgaaatggaagagaacctgactcaagtgggcagtatcctgggaaatctaaaagacatggccctgaacataggcaatgagattgatgctcaaaatccacaaataaaacgaatcacagacaaggctgacaccaacagagatcgtattgatattgccaatgccagagcaaagaaactcattgacagctaaagctactgctgttcttctttatcatttattcacttccgtagctcctccttgaaagttattaccttttcagagtttaagttttcggttccacgctcttctaattgggagataatatggaagaagggccagagcagttacagccctccttcttttttgttttctgttgagggccgactgctgctctgccttccttctagtattttctttctcaattcatacgcttagattggttttcatatgtcatgtttagtgttttcatcctcctcatatacttcagcaggttcttttgctttcaagatttggaagcattgccaaagacagccatgaagaaggaagctgtagaggtgttttttgttgttgtttatttttgcttttgtggttgagggaaggacaagagataagaggttgttacctcagtaaaaaccttcaggccacaaagcaaaaagttgcatagccacaacgaagatctagttggatatagtttttgatttaagttgcagttatagccaatttaggctaatgcttggttttggagcttttatacacaacgtttttgttaggcatcacagttttgcaacctctgctccaaagagaaaaatagaatgagttttctttcttttttttttttttggagtcagagtctcgctctcttgtccaggctggagtgcaatagcgcgatctgggctcactgcaacctccgcctccctggttcaagcaattctcctgccttgcctcctgagtagctgggattacaggcgtgtgtcaccacgctcggctaatttttgtatttttagtagagacagggtttcaccatgtcaagctggtcttggactcctgacgtcgtgatccacccgccttggcctcccaaagtactgggattacaggcgtgagccactgtgcctggctgagttttcttaaagtgagcttaatttctgaactcttagtgattcatatatgtacataaatctgtgatcccatttcttattgcaccattcaggaacactttatataaatgagtggctttttatttcatattattagtagtatcatggttccattacaggcctattaacatcatacattgtcattagtctttgaagaaaaaatatgtaaatatatatgtgtaacatgagaatttctctctaaagcagggcttaaaattttttggaaaagtttgacaaagcataccacatgaattcagatttacctcaatgctaagaattatgtttagttaggaaaaaggaaagtcattttgacctcaggtagaaaaatagattgctttgagttttatgtagctttagactttaaaaagttagaatttattctgtaactaaaaattatttgaaaaaattatgcctctggtttaattattggtgattacacactctttctcttacccttgtgtattgaactatgtccataatcaagttgatgtggatcctgaaaagtgttatgaacatctgattggtatttgtcacatttattttaaaattagcatctgaacacttcaaagctgtcagtgtgtattggtttcaccaataaccactgcttgatccttacaattaaattttttaactaact

SEQ ID NO: 188081 - DNA, 2687 bp, Homo sapiens
  Payload ID: 17017
  Gene Symbol: SNAP23
  Gene Name: synaptosomal-associated protein, 23kDa
  Uniprot ID: O00161
  ENST ID: ENST00000249647
  CDS Start-End: 469-1104
aggcgcctcaaattttctatgtgctatgcactgtattctatccactataatttgtttacatatctatatcttagtctagacatattgaaaggcgatgaagagcagggaaagcactgtattcgctttcttttcttcagcgttcatccagcacagtgcctggcatacggtttgccctcagtaaatgtttattgcatgaacacctcccagcttcgggcaggactgaaatctatccggttaactagtgaattcccagactctccgtctgcgtggcagggacatttaaacccccagcaccgtgattggctccagctgcaggggtgtgtctgtgtccgcggcgaacgggaagtgagcaggcgcgcgggctcggcgcgcgcaggcgcgactagggtgcagcgccaggtccggtgttggggtgtccgagttgccgccggagaggagtggcctcgcccgcttgagttttgattcatcatggataatctgtcatcagaagaaattcaacagagagctcaccagattactgatgagtctctggaaagtacgaggagaatcctgggtttagccattgagtctcaggatgcaggaatcaagaccatcactatgctggatgaacaaaaggaacaactaaaccgcatagaagaaggcttggaccaaataaataaggacatgagagagacagagaagactttaacagaactcaacaaatgctgtggcctttgtgtctgcccatgtaatagaacaaagaactttgagtctggcaaggcttataagacaacatggggagatggtggagaaaactcaccttgcaatgtagtatctaaacagccaggcccggtgacaaatggtcagcttcagcaaccaacaacgggagcagccagtggtggatacattaaacgcataactaatgatgccagagaagatgaaatggaagagaacctgactcaagtgggcagtatcctgggaaatctaaaagacatggccctgaacataggcaatgagattgatgctcaaaatccacaaataaaacgaatcacagacaaggctgacaccaacagagatcgtattgatattgccaatgccagagcaaagaaactcattgacagctaaagctactgctgttcttctttatcatttattcacttccgtagctcctccttgaaagttattaccttttcagagtttaagttttcggttccacgctcttctaattgggagataatatggaagaagggccagagcagttacagccctccttcttttttgttttctgttgagggccgactgctgctctgccttccttctagtattttctttctcaattcatacgcttagattggttttcatatgtcatgtttagtgttttcatcctcctcatatacttcagcaggttcttttgctttcaagatttggaagcattgccaaagacagccatgaagaaggaagctgtagaggtgttttttgttgttgtttatttttgcttttgtggttgagggaaggacaagagataagaggttgttacctcagtaaaaaccttcaggccacaaagcaaaaagttgcatagccacaacgaagatctagttggatatagtttttgatttaagttgcagttatagccaatttaggctaatgcttggttttggagcttttatacacaacgtttttgttaggcatcacagttttgcaacctctgctccaaagagaaaaatagaatgagttttctttcttttttttttttttggagtcagagtctcgctctcttgtccaggctggagtgcaatagcgcgatctgggctcactgcaacctccgcctccctggttcaagcaattctcctgccttgcctcctgagtagctgggattacaggcgtgtgtcaccacgctcggctaatttttgtatttttagtagagacagggtttcaccatgtcaagctggtcttggactcctgacgtcgtgatccacccgccttggcctcccaaagtactgggattacaggcgtgagccactgtgcctggctgagttttcttaaagtgagcttaatttctgaactcttagtgattcatatatgtacataaatctgtgatcccatttcttattgcaccattcaggaacactttatataaatgagtggctttttatttcatattattagtagtatcatggttccattacaggcctattaacatcatacattgtcattagtctttgaagaaaaaatatgtaaatatatatgtgtaacatgagaatttctctctaaagcagggcttaaaattttttggaaaagtttgacaaagcataccacatgaattcagatttacctcaatgctaagaattatgtttagttaggaaaaaggaaagtcattttgacctcaggtagaaaaatagattgctttgagttttatgtagctttagactttaaaaagttagaatttattctgtaactaaaaattatttgaaaaaattatgcctctggtttaattattggtgattacacactctttctcttacccttgtgtattgaactatgtccataatcaagttgatgtggatcctgaaaagtgttatgaacatctgattggtatttgtcacatttattttaaaattagcatctgaacacttcaaagctgtcagtgtgtattggtttcaccaataaccactgcttgatccttacaattaaattttttaactaactaa

SEQ ID NO: 188082 - DNA, 477 bp, Homo sapiens
  Payload ID: 17017
  Gene Symbol: SNAP23
  Gene Name: synaptosomal-associated protein, 23kDa
  Uniprot ID: O00161
  ENST ID: ENST00000397138
  CDS Start-End: 1-477
atggataatctgtcatcagaagaaattcaacagagagctcaccagattactgatgagtctctggaaagtacgaggagaatcctgggtttagccattgagtctcaggatgcaggaatcaagaccatcactatgctggatgaacaaaaggaacaactaaaccgcatagaagaaggcttggaccaaataaataaggacatgagagagacagagaagactttaacagaactcaacaaatgctgtggcctttgtgtctgcccatgtaatagcataactaatgatgccagagaagatgaaatggaagagaacctgactcaagtgggcagtatcctgggaaatctaaaagacatggccctgaacataggcaatgagattgatgctcaaaatccacaaataaaacgaatcacagacaaggctgacaccaacagagatcgtattgatattgccaatgccagagcaaagaaactcattgacagctaa

SEQ ID NO: 188083 - DNA, 565 bp, Homo sapiens
  Payload ID: 17017
  Gene Symbol: SNAP23
  Gene Name: synaptosomal-associated protein, 23kDa
  ENST ID: ENST00000561526
  CDS Start-End: 191-565
tttttctcaaaaagaatggaggaagaacaaaggcaggcccgcttgcgggagagtcagtacgcagcgttggacgctatgaacagcctccctggcatgcaatggaggaactattttaccctataaactctgggccatcattcagggaaaagcctgtagaagaccacagtcagatattgagttttgattcatcatggataatctgtcatcagaagaaattcaacagagagctcaccagattactgatgagtctctggaaagtacgaggagaatcctgggtttagccattgagtctcaggatgcaggaatcaagaccatcactatgctggatgaacaaaaggaacaactaaaccgcatagaagaaggcttggaccaaataaataaggacatgagagagacagagaagactttaacagaactcaacaaatgctgtggcctttgtgtctgcccatgtaatagaacaaagaactttgagtctggcaaggcttataagacaacatggggagatggtggagaaaactcaccttgcaatgtagtatctaaacagccaggcccggtgacaaatggt

SEQ ID NO: 188084 - DNA, 573 bp, Homo sapiens
  Payload ID: 17017
  Gene Symbol: SNAP23
  Gene Name: synaptosomal-associated protein, 23kDa
  ENST ID: ENST00000568451
  CDS Start-End: 131-424
attctattctccttcaaaggcatgcaatggaggaactattttaccctataaactctgggccatcattcagggaaaagcctgtagaagaccacagtcagatattggtgagtgccaagagttttgattcatcatggataatctgtcatcagaagaaattcaacagagagctcaccagattactgatgagtctctggaaagtacgaggagaatcctgggtttagccattgagtctcaggatgcaggaatcaagaccatcactatgctggatgaacaaaaggaacaactaaaccgcatagaagaaggcttggaccaaataaataaggacatgagagagacagagaagactttaacagaactcaacaaatgctgtggcctttgtgtctgcccatgtaatagatttaacatcagaagccgggctcagtaactgatcaaagggaactttaagatgcagtcttgtggcgcagtttgggctgctaacctgctatctaaagaacaaagaactttgagtctggcaaggcttataagacaacatggggagatggtggagaaaactcaccttgcaatgtagtatct

SEQ ID NO: 188085 - DNA, 846 bp, Homo sapiens
  Payload ID: 17017
  Gene Symbol: SNAP23
  Gene Name: synaptosomal-associated protein, 23kDa
  ENST ID: ENST00000566035
  CDS Start-End: 51-185
gagttgccgccggagaggagtggcctcgcccgcttgagttttgattcatcatggataatctgtcatcagaagaaattcaacagagagctcaccagattactgatgagtctctggaaagtacgaggagaatcctgggtttagccattgagtattggaatatgacagggaagatgaattcactatgagtttgtgacttaattattttgggggctgctatgttaaagtgtgttagtttaagaatactagttctgtctgtagctctaatcctctgagagcttgggtttctaaattattctgtgttgctcttgtaggttttgtttctgttgtttttggtttgttttgttgtactatcagcttttccccccttgtcttagtctcaggatgcaggaatcaagaccatcactatgctggatgaacaaaaggaacaactaaaccgcatagaagaaggcttggaccaaataaataaggacatgagagagacagagaagactttaacagaactcaacaaatgctgtggcctttgtgtctgcccatgtaatagaacaaagaactttgagtctggcaaggcttataagacaacatggggagatggtggagaaaactcaccttgcaatgtagtatctaaacagccaggcccggtgacaaatggtcagcttcagcaaccaacaacgggagcagccagtggtggatacattaaacgcataactaatgatgccagagaagatgaaatggaagagaacctgactcaagtgggcagtatcctgggaaatctaaaagacatggccctgaacataggcaatgagattgatgctcaaaatccacaaataaaacgaatcacagacaagg

SEQ ID NO: 188086 - DNA, 632 bp, Homo sapiens
  Payload ID: 17017
  Gene Symbol: SNAP23
  Gene Name: synaptosomal-associated protein, 23kDa
  ENST ID: ENST00000568841
  CDS Start-End: 1-449
aacaactaaaccgcatagaagaaggcttggaccaaataaataaggacatgagagagacagagaagactttaacagaactcaacaaatgctgtggcctttgtgtctgcccatgtaatagaacaaagaactttgagtctggcaaggcttataagacaacatggggagatggtggagaaaactcaccttgcaatgtagtatctaaacagccaggcccggtgacaaatggtcagcttcagcaaccaacaacgggagcagccagtggtggatacattaaacgcataactaatgatgccagagaagatgaaatggaagagaacctgactcaagtgggcagtatcctgggaaatctaaaagacatggccctgaacataggcaatgagattgatgctcaaaatccacaaataaaacgaatcacagacaagcaagcagacagatctgggaatcactgaggatgctctggggaagcatgctgagctcaagacaattctcttccaggcgaagaattttaaggcgtggacagcaagatatcttcactgagatctgagatatctattgaaaaaccacaaaagaataacaggaaaaagcataagcactatactggttacttttagtacattaaaacaaaacaaaaa

SEQ ID NO: 188087 - DNA, 775 bp, Homo sapiens
  Payload ID: 17017
  Gene Symbol: SNAP23
  Gene Name: synaptosomal-associated protein, 23kDa
  ENST ID: ENST00000564153
  CDS Start-End: 95-478
aggcgcgactagggtgcagcgccaggtccggtgttggggtgtccgagttgccgccggagaggagtggcctcgcccgcttgagttttgattcatcatggataatctgtcatcagaagaaattcaacagagagctcaccagattactgatgagtctctggaaagtacgaggagaatcctgggtttagccattgagtctcaggatgcaggaatcaagaccatcactatgctggatgaacaaaaggaacaactaaaccgcatagaagaaggcttggaccaaataaataaggacatgagagagacagagaagactttaacagaactcaacaaatgctgtggcctttgtgtctgcccatgtaataggctgacaccaacagagatcgtattgatattgccaatgccagagcaaagaaactcattgacagctaaagctactgctgttcttctttatcatttattcacttccgtagctcctccttgaaagttattaccttttcagagtttaagttttcggttccacgctcttctaattgggagataatatggaagaagggccagagcagttacagccctccttcttttttgttttctgttgagggccgactgctgctctgccttccttctagtattttctttctcaattcatacgcttagattggttttcatatgtcatgtttagtgttttcatcctcctcatatacttcagcaggttcttttgctttcaagatttggaagcattgccaaagacagccatgaagaaggaagctgtagaggtgtt

SEQ ID NO: 188088 - DNA, 834 bp, Homo sapiens
  Payload ID: 17017
  Gene Symbol: SNAP23
  Gene Name: synaptosomal-associated protein, 23kDa
  ENST ID: ENST00000567094
  CDS Start-End: 87-380
ctagggtgcagcgccaggtccggtgttggggtgtccgagttgccgccggagaggagtggcctcgcccgcttgagttttgattcatcatggataatctgtcatcagaagaaattcaacagagagctcaccagattactgatgagtctctggaaagtacgaggagaatcctgggtttagccattgagtctcaggatgcaggaatcaagaccatcactatgctggatgaacaaaaggaacaactaaaccgcatagaagaaggcttggaccaaataaataaggacatgagagagacagagaagactttaacagaactcaacaaatgctgtggcctttgtgtctgcccatgtaatagatttaacatcagaagccgggctcagtaactgatcaaagggaactttaagatgcagtcttgtggcgcagtttgggctgctaacctgctatctaaaggtgatgcttcaaatggcttttctgtgcatgtgcatggattttgtgaatggtgaaaactgtctctaaactgtgtggtggtgtgtagtgtaaagtgaatttgttcttgatgggtgctatctcacaaaagatggacttgacaaaaggaccttaatttataataccatcctttgacaaatgtctctgataactaagtttttgctaaataacatttaagattaccaaaataacaatactcctggagtttcttaagaaatttaaaataggttgatctttgagacagctgctgcagtctagttctgataaaaggtaagggaagtcatgctaaatgcttctctgtcttcatagactttgattttagcatcctgtcttccattaagtttccctact

SEQ ID NO: 188089 - DNA, 557 bp, Homo sapiens
  Payload ID: 17017
  Gene Symbol: SNAP23
  Gene Name: synaptosomal-associated protein, 23kDa
  ENST ID: ENST00000568331
  CDS Start-End: 85-378
agggtgcagcgccaggtccggtgttggggtgtccgagttgccgccggagaggagtggcctcgcccgcttgagttttgattcatcatggataatctgtcatcagaagaaattcaacagagagctcaccagattactgatgagtctctggaaagtacgaggagaatcctgggtttagccattgagtctcaggatgcaggaatcaagaccatcactatgctggatgaacaaaaggaacaactaaaccgcatagaagaaggcttggaccaaataaataaggacatgagagagacagagaagactttaacagaactcaacaaatgctgtggcctttgtgtctgcccatgtaatagatttaacatcagaagccgggctcagtaactgatcaaagggaactttaagatgcagtcttgtggcgcagtttgggctgctaacctgctatctaaagaacaaagaactttgagtctggcaaggcttataagacaacatggggagatggtggagaaaactcaccttgcaatgtagtatctaaacagccaggcccggtgacaaatggtcag

SEQ ID NO: 188090 - DNA, 570 bp, Homo sapiens
  Payload ID: 17017
  Gene Symbol: SNAP23
  Gene Name: synaptosomal-associated protein, 23kDa
  ENST ID: ENST00000563830
  CDS Start-End: 1-464
aacaactaaaccgcatagaagaaggcttggaccaaataaataaggacatgagagagacagagaagactttaacagaactcaacaaatgctgtggcctttgtgtctgcccatgtaatagaacaaagaactttgagtctggcaaggcttataagacaacatggggagatggtggagaaaactcaccttgcaatgtagtatctaaacagccaggcccggtgacaaatggtcagcttcagcaaccaacaacgggagcagccagtggtggatacattaaacgcataactaatgatgccagagaagatgaaatggaagagaacctgactcaagtgggcagtatcctgggaaatctaaaagacatggccctgaacataggcaatgagattgatgctcaaaatccacaaataaaacgaatcacagacaaggcgaagaattttaaggcgtggacagcaagatatcttcactgagatctgagatatctattgaaaaaccacaaaagaataacaggaaaaagcataagcactatactggttacttttagtacattaaaacaaaacaaaaatctttacttga

SEQ ID NO: 188091 - DNA, 565 bp, Homo sapiens
  Payload ID: 17017
  Gene Symbol: SNAP23
  Gene Name: synaptosomal-associated protein, 23kDa
  ENST ID: ENST00000568859
  CDS Start-End: 238-565
gcttggtgagtctccaggagtgggacggagggagctggccgggatgaagtctgagactatgtcctgagaagaaagagtgtatcgtattggttgaaaagttggtggggtcgggcttaagcggaggagggggctctctggcccttactcggcagatgggcccggagagaggacgggaggtgccgggagaacatcgagggaccagtggaggaagggtagctggatgagttttgattcatcatggataatctgtcatcagaagaaattcaacagagagctcaccagattactgatgagtctctggaaagtacgaggagaatcctgggtttagccattgagtctcaggatgcaggaatcaagaccatcactatgctggatgaacaaaaggaacaactaaaccgcatagaagaaggcttggaccaaataaataaggacatgagagagacagagaagactttaacagaactcaacaaatgctgtggcctttgtgtctgcccatgtaatagaacaaagaactttgagtctggcaaggcttataagacaacatggggagatggtggagaaaact

SEQ ID NO: 188092 - DNA, 368 bp, Homo sapiens
  Payload ID: 17017
  Gene Symbol: SNAP23
  Gene Name: synaptosomal-associated protein, 23kDa
  ENST ID: ENST00000563873
  CDS Start-End: 1-271
aggaatcaagaccatcactatgctggatgaacaaaaggaacaactaaaccgcatagaagaaggcttggaccaaataaataaggacatgagagagacagagaagactttaacagaactcaacaaatgctgtggcctttgtgtctgcccatgtaatagcaagcagacagatctgggaatcactgaggatgctctggggaagcatgctgagctcaagacaattctcttccaggcgaagaattttaaggcgtggacagcaagatatcttcactgagatctgagatatctattgaaaaaccacaaaagaataacaggaaaaagcataagcactatactggttacttttagtacattaaaacaaaacaaaaatc

SEQ ID NO: 188093 - DNA, 855 bp, Homo sapiens
  Payload ID: 17017
  Gene Symbol: SNAP23
  Gene Name: synaptosomal-associated protein, 23kDa
  ENST ID: ENST00000563765
  CDS Start-End: 90-251
gaggaactattttaccctataaactctgggccatcattcagggaaaagcctgtagaagaccacagtcagatattgagttttgattcatcatggataatctgtcatcagaagaaattcaacagagagctcaccagattactgatgagtctctggaaagtacgaggagaatcctgggtttagccattgaggttttgtttctgttgtttttggtttgttttgttgtactatcagcttttccccccttgtcttagtctcaggatgcaggaatcaagaccatcactatgctggatgaacaaaaggaacaactaaaccgcatagaagaaggcttggaccaaataaataaggacatgagagagacagagaagactttaacagaactcaacaaatgctgtggcctttgtgtctgcccatgtaatagaacaaagaactttgagtctggcaaggcttataagacaacatggggagatggtggagaaaactcaccttgcaatgtagtatctaaacagccaggcccggtgacaaatggtcagcttcagcaaccaacaacgggagcagccagtggtggatacattaaacgcataactaatgatgccagagaagatgaaatggaagagaacctgactcaagtgggcagtatcctgggaaatctaaaagacatggccctgaacataggcaatgagattgatgctcaaaatccacaaataaaacgaatcacagacaaggctgacaccaacagagatcgtattgatattgccaatgccagagcaaagaaactcattgacagctaaagctactgctgttcttctttatcatttattcacttccgtagctcctccttgaaagttattacctttt

SEQ ID NO: 188094 - DNA, 568 bp, Homo sapiens
  Payload ID: 17017
  Gene Symbol: SNAP23
  Gene Name: synaptosomal-associated protein, 23kDa
  ENST ID: ENST00000566327
  CDS Start-End: 143-568
agggtgcagcgccaggtccggtgttggggtgtccgagttgccgccggagaggagtggcctcgcccgcttgtctctggaaagtacgaggagaatcctgggtttagccattgagtctcaggatgcaggaatcaagaccatcactatgctggatgaacaaaaggaacaactaaaccgcatagaagaaggcttggaccaaataaataaggacatgagagagacagagaagactttaacagaactcaacaaatgctgtggcctttgtgtctgcccatgtaatagaacaaagaactttgagtctggcaaggcttataagacaacatggggagatggtggagaaaactcaccttgcaatgtagtatctaaacagccaggcccggtgacaaatggtcagcttcagcaaccaacaacgggagcagccagtggtggatacattaaacgcataactaatgatgccagagaagatgaaatggaagagaacctgactcaagtgggcagtatcctgggaaatctaaaagacatggccctgaacataggcaatgagattgatgctcaaaatccacaaataaaa

SEQ ID NO: 188095 - DNA, 210 bp, Homo sapiens
  Payload ID: 17017
  Gene Symbol: SNAP23
  Gene Name: synaptosomal-associated protein, 23kDa
  ENST ID: ENST00000627440
  CDS Start-End: 76-210
cgccaggtccggtgttggggtgtccgagttgccgccggagaggagtggcctcgcccgcttgagttttgattcatcatggataatctgtcatcagaagaaattcaacagagagctcaccagattactgatgagtctctggaaagtacgaggagaatcctgggtttagccattgagtattggaatatgacagggaagatgaattcactatga

SEQ ID NO: 188096 - DNA, 237 bp, Homo sapiens
  Payload ID: 17017
  Gene Symbol: SNAP23
  Gene Name: synaptosomal-associated protein, 23kDa
  ENST ID: ENST00000626061
  CDS Start-End: 76-237
cgccaggtccggtgttggggtgtccgagttgccgccggagaggagtggcctcgcccgcttgagttttgattcatcatggataatctgtcatcagaagaaattcaacagagagctcaccagattactgatgagtctctggaaagtacgaggagaatcctgggtttagccattgaggttttgtttctgttgtttttggtttgttttgttgtactatcagcttttccccccttgtcttag

SEQ ID NO: 188097 - DNA, 2053 bp, Homo sapiens
  Payload ID: 17018
  Gene Symbol: SNAP25
  Gene Name: synaptosomal-associated protein, 25kDa
  Uniprot ID: P60880
  ENST ID: ENST00000254976
  CDS Start-End: 212-832
atctttgatgagggcagagctcacgttgcattgaagacgaaacctcggggaggtcaggcgctgtctttccttccctccctgctcggcggctccaccacagttgcaacctgcagaggcccggagaacacaaccctcccgagaagcccaggtccagagccaaacccgtcactgaccccccagcccaggcgcccagccactccccaccgctaccatggccgaagacgcagacatgcgcaatgagctggaggagatgcagcgaagggctgaccagttggctgatgagtcgctggaaagcacccgtcgtatgctgcaactggttgaagagagtaaagatgctggtatcaggactttggttatgttggatgaacaaggagaacaactggaacgcattgaggaagggatggaccaaatcaataaggacatgaaagaagcagaaaagaatttgacggacctaggaaaattctgcgggctttgtgtgtgtccctgtaacaagcttaaatcaagtgatgcttacaaaaaagcctggggcaataatcaggacggagtggtggccagccagcctgctcgtgtagtggacgaacgggagcagatggccatcagtggcggcttcatccgcagggtaacaaatgatgcccgagaaaatgaaatggatgaaaacctagagcaggtgagcggcatcatcgggaacctccgtcacatggccctggatatgggcaatgagatcgatacacagaatcgccagatcgacaggatcatggagaaggctgattccaacaaaaccagaattgatgaggccaaccaacgtgcaacaaagatgctgggaagtggttaagtgtgcccacccgtgttctcctccaaatgctgtcgggcaagatagctccttcatgcttttctcatggtattatctagtaggtctgcacacataacacacatcagtccacccccattgtgaatgttgtcctgtgtcatctgtcagcttcccaacaatactttgtgtcttttgttctctcttggtctctttctttccaaaggttgtacatagtggtcatttggtggctctaactccttgaggtcttgagtttcatttttcattttctctcctcggtggcatttgctgaataacaacaatttaggaatgctcaatgtgctgttgattctttcaatccacagtattgttcttgtaaaactgtgacattccacagagttactgccacggtcctttgagtgtcaggctctgaatctctcaaaatgtgccgtctttggttcctcatggctgttatctgtctttatgatttcatgattagacaatgtggaattacataacaggcattgcactaaaagtgatgtgatttatgcatttatgcatgagaactaaatagatttttagattcctacttaaacaaaaactttccatgacagtagcatactgatgagacaacacacacacacacaaaacaacagcaacaacaacagaacaacaacaaagcatgctcagtattgagacactgtcaagattaagttataccagcaaaagtgcagtagtgtcacttttttcctgtcaatatatagagacttctaaatcataatcatccttttttaaaaaaaagaattttaaaaaagatggatttgacacactcaccatttaatcatttccagcaaaatatatgtttggctgaaattatgtcaaatggatgtaatatagggtttgtttgctgcttttgatggctatgttttggagagagcaatcttgctgtgaaacagtgtggatgtaaattttataaggctgactcttactaaccaccatttcccctgtggtttgttatcagtacaattctttgttgcttaatctagagctatgcacaccaaattgctgagatgtttagtagctgataaagaaaccttttaaaaaaataatataaatgaatgaaatataaactgtgagataaatatcattatagcatgtaatattaaattcctcctgtctcctctgtcagtttgtgaagtgattgacattttgtagctagtttaaaattattaaaaattatagactcca

SEQ ID NO: 188098 - DNA, 2050 bp, Homo sapiens
  Payload ID: 17018
  Gene Symbol: SNAP25
  Gene Name: synaptosomal-associated protein, 25kDa
  Uniprot ID: P60880
  ENST ID: ENST00000304886
  CDS Start-End: 209-829
tttgatgagggcagagctcacgttgcattgaagacgaaacctcggggaggtcaggcgctgtctttccttccctccctgctcggcggctccaccacagttgcaacctgcagaggcccggagaacacaaccctcccgagaagcccaggtccagagccaaacccgtcactgaccccccagcccaggcgcccagccactccccaccgctaccatggccgaagacgcagacatgcgcaatgagctggaggagatgcagcgaagggctgaccagttggctgatgagtcgctggaaagcacccgtcgtatgctgcaactggttgaagagagtaaagatgctggtatcaggactttggttatgttggatgaacaaggagaacaactcgatcgtgtcgaagaaggcatgaaccatatcaaccaagacatgaaggaggctgagaaaaatttaaaagatttagggaaatgctgtggccttttcatatgtccttgtaacaagcttaaatcaagtgatgcttacaaaaaagcctggggcaataatcaggacggagtggtggccagccagcctgctcgtgtagtggacgaacgggagcagatggccatcagtggcggcttcatccgcagggtaacaaatgatgcccgagaaaatgaaatggatgaaaacctagagcaggtgagcggcatcatcgggaacctccgtcacatggccctggatatgggcaatgagatcgatacacagaatcgccagatcgacaggatcatggagaaggctgattccaacaaaaccagaattgatgaggccaaccaacgtgcaacaaagatgctgggaagtggttaagtgtgcccacccgtgttctcctccaaatgctgtcgggcaagatagctccttcatgcttttctcatggtattatctagtaggtctgcacacataacacacatcagtccacccccattgtgaatgttgtcctgtgtcatctgtcagcttcccaacaatactttgtgtcttttgttctctcttggtctctttctttccaaaggttgtacatagtggtcatttggtggctctaactccttgaggtcttgagtttcatttttcattttctctcctcggtggcatttgctgaataacaacaatttaggaatgctcaatgtgctgttgattctttcaatccacagtattgttcttgtaaaactgtgacattccacagagttactgccacggtcctttgagtgtcaggctctgaatctctcaaaatgtgccgtctttggttcctcatggctgttatctgtctttatgatttcatgattagacaatgtggaattacataacaggcattgcactaaaagtgatgtgatttatgcatttatgcatgagaactaaatagatttttagattcctacttaaacaaaaactttccatgacagtagcatactgatgagacaacacacacacacacaaaacaacagcaacaacaacagaacaacaacaaagcatgctcagtattgagacactgtcaagattaagttataccagcaaaagtgcagtagtgtcacttttttcctgtcaatatatagagacttctaaatcataatcatccttttttaaaaaaaagaattttaaaaaagatggatttgacacactcaccatttaatcatttccagcaaaatatatgtttggctgaaattatgtcaaatggatgtaatatagggtttgtttgctgcttttgatggctatgttttggagagagcaatcttgctgtgaaacagtgtggatgtaaattttataaggctgactcttactaaccaccatttcccctgtggtttgttatcagtacaattctttgttgcttaatctagagctatgcacaccaaattgctgagatgtttagtagctgataaagaaaccttttaaaaaaataatataaatgaatgaaatataaactgtgagataaatatcattatagcatgtaatattaaattcctcctgtctcctctgtcagtttgtgaagtgattgacattttgtagctagtttaaaattattaaaaattatagactcca

SEQ ID NO: 188099 - DNA, 492 bp, Homo sapiens
  Payload ID: 17018
  Gene Symbol: SNAP25
  Gene Name: synaptosomal-associated protein, 25kDa
  ENST ID: ENST00000430336
  CDS Start-End: 212-492
gggtaaatacaagtattggtgcacttagggtgcggtattccgtgtgtgcacgtctggtgggggctttataaagtgttttcgaggtgagctgctggggaaaagggaaacgggagccctgcaaatggagcgacggggaggaagagcgagggtccagagccaaacccgtcactgaccccccagcccaggcgcccagccactccccaccgctaccatggccgaagacgcagacatgcgcaatgagctggaggagatgcagcgaagggctgaccagttggctgatgagtcgctggaaagcacccgtcgtatgctgcaactggttgaagagagtaaagatgctggtatcaggactttggttatgttggatgaacaaggagaacaactggaacgcattgaggaagggatggaccaaatcaataaggacatgaaagaagcagaaaagaatttgacggacctaggaaaattctgcgggctttgtgtgtgtccctgtaacaa

SEQ ID NO: 188100 - DNA, 4287 bp, Homo sapiens
  Payload ID: 17019
  Gene Symbol: SNAP29
  Gene Name: synaptosomal-associated protein, 29kDa
  Uniprot ID: O95721
  ENST ID: ENST00000215730
  CDS Start-End: 129-905
acctgcgcgcgacgcgcggaaggagttcgcgcgacgaccgcggggtcggcgggcggggcgaggccctggacggcggcggcagtggggctcctccttctgtttcccagaccgagagccgcgccggcaccatgtcagcttaccctaaaagctacaatccgttcgacgacgacggggaggacgaaggcgcccggccggccccttggagggacgcccgagacctccccgacgggcccgacgcgcccgcggacaggcagcagtacttgcggcaggaggtcctccgcagggctgaggccacggccgccagcaccagcaggtccctggccctcatgtacgagtccgagaaggttggggtcgcctcttccgaggagctcgcccgtcagcgaggagtcctggagcgcacagagaagatggtggacaagatggaccaagatttgaagatcagccagaaacacatcaatagcattaagagcgtgtttggggggctggtcaattacttcaaatccaaaccagtagagaccccacctgaacagaatggcaccctcacctcccagcccaacaacagattgaaagaagctataagtacaagtaaagaacaggaagcaaagtaccaggccagccacccaaaccttagaaagctggatgatacagaccctgtccccagaggggctggttctgccatgagtactgatgcttacccaaagaacccacaccttcgagcctatcaccagaagatcgacagcaacctagatgagctgtccatgggactgggtcgtctgaaggacatagccctggggatgcagacagaaattgaggagcaagatgacattcttgaccggctgacaaccaaagtggacaagttagatgtcaacataaaaagcacagaaagaaaagttcgacaactctgaagacagacggatttccactctattgtgatgaaaagatttgaaagatctttttttgaacttccaagaaatttcatttactattttagtatgtaaattaatgtgtgtttgcaaatgttataatagagtaggtcttaagacatttttgctgttataaggaagtgtttgtcccacattttcctagggttaacacctcaccaagttcttccagcaaaatgcttattagagtttttgtctgagcacagtagcctggccctgcatatcttgggcgtttgattaccatgctggaataagaagagttgcatttctcattttaatgagcatatggaaagatgggaacagaatttcagtcttgcagccatgagcctctatttctcattcctaagccttaccatgagtcagagtgttaagggggcctgtgaaccagtcgtttggtggaggagggtccttcccacacctttgtttaggagtcatcattcacacacacacacacacacacacacacacacacacacacacacactctctgagcacattatctgtgattctttcatcctcccagaaaggatcagtgttagaatgggaaatagagtgtgccatcttgctcttttgttggcagatgtccccgcttccctccagccccccatccttggcatgtatattagtaggagggcttcacaccagcactgctcactgcgactcctggaaatgtgtggggaattgggtgagcccctcttccccacgtgctcccatctgtaactctccatctgtgatttgcaacaggtcttccactggctcgaggctgcgaggctgaccgacaggggcgcccaatagagtttgtgggaatggagtattgcacagatgcagctgcacaatggtcttcctccacccctctgggaatcaccattaggcaggcctcagtagggcaaaatgtttatttggtaccgggggtctcctgacctgtctagcattcccacccactcttctgcacttcttgcaaggtaacttgaatcatcacttatttctctgccacctggttttaggactggcactctataaatgacgctgactttgtatagaaggattttgctaagggggcaaaaagcccagataccattttaactggcccagttcattttctcctttcattttacaaaagaaatcatgcagaagcatcaattaaaactgatttatttatgttggtacatccaacaaaatagttggagccacaaggcccttgtctttttaaaaaaacaaaatattttgaagatggtgaaagtgactgattttaataatgagataggtcacttaaaataacagtgcctttgaccttaaaacatggcactggcccatgtgacctttgccatttcccagtacttccctttacagtctgcagcctataaacagtggtgtctcaaagcaaaggaaacctccacaagtgctgcaacagtgcattagtttttatgtagcaatttgtttataaaaattcccatcccataatgcatgaccttcctaaaaatatccacagcctccataggcaaggtgagctttctgtgctacccacttgttagattccagccacctcagggattctgatccatgtcattaacgaccatcccagggtgtgagggcctgattaaagcttatcgaactagacatttgtttattagatgagctcggcattattattttctcaataactggtagaagggaaattttaaacataacactcaacccaaacaaaactacttcgtgaggctttcagcaaaaaggctgcttaaaagcatgaacccgggatgcagagcagcttttgtgcacggttccacttactgtaattgtttctggttctttcctctaacaccttccatgtatgtcaactttttatcaccgtcaggcatagactcgtggagattagtcattatagctcagacctaagctaattatttaaaataaatacatgtaaaggccactgccacattctcagcagacttccacttgcctaatgagattagtgattcaactgacttgaagcacagtaacatcttattttatgcacattccctgtcttttgctggactgatgaagccagtcacccgcccttctctgttttttggttttttttttcttaaccccaggtatatggaaggggagttgccttcacttttctggaaatttgtcttcgtctgacatattagagggcctcgttttgtcctgttcttgttcagaccctctcgttctacgtcctgtgctgaggggactgtccgtaagctacaggacagcgagctggtcctttctgccacttcttccccactcccatgcccaggaaggcctggttgctgatgctactttataaatgagttgcttgcattttcacagagaatgaaggaagacgtaacatggctccagaaacttttcacatgatgattgggatcgacaaaaaaatgctaccctctagactagacacatttcatggagacaagcaaaatggtgccagggctgggctgactgtgggatgggatttggtactgcagacagattttgatttccacagttgagctggaaacaaactgtgccttcaaaaaatgacttttctaacttaaggttggttatatgttaagtgtgctactaacttaaaaaatagtggctgggcgcggtggctcatgcctgtaatcccagtgctttgggaggccaaggcggggggatcacgaggtcaggagatcgagaccatcctggctaacacggtgaaaccccatctctactaaaaacacacaaaaaattagctgggcgtggtggtgggcgcctgtagtcccagctactcaggaggctgaggcaggagaatggcatgaacctgggaggcagagcttgcagtgagccgagacagcgccattgcactccagcctgggcaacagagcaagactccgtctcaaaaaaaaaaaaaaaaaaaaaatagtgcactctctggctggtcacggtggctcacgcctgtaatctcagcactttggaaggccaaggcaggcggatcacgaggtcagaagatcgagaccatcctggctaacacagtgaaaccccgtctctactaaaaatataaaaaattagtcgggcatggtggcgggcgcctgtagtcccaactactcgggagactgaggcagaagaatggcgtgaactcaggaggcggagcttgcagtgagccaaggcgacagagcaagactctgtctcaaaaaataaaaaatagtgcactgtccttcgagaaagttttctaacatctagtaatttgtaacttagaagtggagttgccttgtggatgtcttttttgcattctgtaggaaatgaaacgtgaatttaactcgggttgcaagaaataaaaatgtcagtgcatttaaatttc

SEQ ID NO: 188101 - DNA, 681 bp, Homo sapiens
  Payload ID: 17019
  Gene Symbol: SNAP29
  Gene Name: synaptosomal-associated protein, 29kDa
  ENST ID: ENST00000439214
  CDS Start-End: 201-681
gtggtaacaatctgttaactatgtaaaggtatgtgcatctggagtacttgaagagggcagtttaccccagaaatcttccttagctattagtctgcttcgttgattttttttttcttacgcctagctcacggggaaacgccagattattttctgtccaggagctcgcccgtcagcgaggagtcctggagcgcacagagaagatggtggacaagatggaccaagatttgaagatcagccagaaacacatcaatagcattaagagcgtgtttggggggctggtcaattacttcaaatccaaaccagtagagaccccacctgaacagaatggcaccctcacctcccagcccaacaacagattgaaagaagctataagtacaagtaaagaacaggaagcaaagtaccaggccagccacccaaaccttagaaagctggatgatacagaccctgtccccagaggggctggttctgccatgagtactgatgcttacccaaagaacccacaccttcgagcctatcaccagaagatcgacagcaacctagatgagctgtccatgggactgggtcgtctgaaggacatagccctggggatgcagacagaaattgaggagcaagatgacattcttgaccggctgacaaccaaagtggacaagttagatgtcaacataaaaagcacagaaagaa

SEQ ID NO: 188102 - DNA, 2367 bp, Homo sapiens
  Payload ID: 17020
  Gene Symbol: SNAP47
  Gene Name: synaptosomal-associated protein, 47kDa
  Uniprot ID: Q5SQN1
  ENST ID: ENST00000315781
  CDS Start-End: 415-1809
gcggccgccgccccaccgtaggtccgtagcaggtggtcgaagtcgggcctccccgcgggcgtcacccagcgccgccggctgccccagccctgcgtgaaggcgctggaaaacacgcagggcaggttgggcagcaagaagccccgcacaaagtcggcgtaggagaaggcgcccggctccgagacgaaggctacccggcccggagcctggccgacgccggggacatcgacccccaggcctcggaagtggctgtcggcgagggcgcgcgtctcgcggtccatccagctcagcacgggtcgaaggaccctcctcctcacttccgccggagcggaaacggtgaggaccagcctcggaaccagaagacgcagggcgccgcgtttctgccccgccagcgcctggggctccgggcctgcacgcatgcgcgcggctcgccgcggtcttcactgcgcaggcgccgagcggccgaggcgccgcggtcggctctgggactcgtctggcgtccctcagaggcagaagaggcctggaccttggcgcacacagacccaggaacagatgagcagggatgtctgcatccacacctggccgtgcacctactacctggagcccaagaggcgatgggttactggacagctgtccttaacatcgctgtcgctcaggttcatgactgacagcactggagagattctggtcagcttccccctctccagcatagttgagatcaagaaggaggcttcacattttatcttcagctccatcaccatcctggagaagggccatgccaagcactggttcagctccctgcggccaagtcgaaatgtggtcttcagcatcatcgagcatttctggagggagctgctgctgtctcagcctggagccgtggcagacgcatctgtcccaaggacccggggcgaggagctgacgggactcatggctggatcccagaaacgcctggaggacacggcgagggtcctgcaccaccagggccagcagctggacagcgtcatgagaggcctggacaagatggagtcagacctggaggtggcggacagattgctgacagaactggaatctcctgcttggtggccctttagctccaagctttggaagacaccaccggaaacaaagcccagggaagatgtctccatgaccagttgtgaaccctttgggaaagaagggatactgataaaaattcctgctgttatttcccacagaacagagtctcacgttaaaccagggaggctcaccgtccttgtgtctgggttggaaatacatgactccagttctttgctcatgcacaggtttgaaagagaagacgtggacgacatcaaggtccactcaccttacgaaattagcatccgccagcggtttattggaaagccagacatggcctatcgtttgatatctgccaagatgccagaggttatccccattttagaagtgcagttcagcaagaagatggagctgttagaagatgcattggtgctcagaagcgcaagaacctcttcccccgcagagaagagctgctcagtctggcatgcagcatctgggctgatgggccgtaccctgcaccgtgagccacccgcaggagaccaggagggcacagcactgcacctgcagacaagcctgccagccctttctgaggcagatacccaggaactaacccagatcctgaggaggatgaaggggctggccctggaggccgagagtgagctggagagacaagacgaagccctggatggcgttgcagcagctgtggacagggcaaccttgaccatcgacaagcacaacaggcggatgaagaggctgacctaggggcagaacgtccctgcattcctgtctcaccctgcacatcccgctgagatggagggctgggcggcagtgccagggctgcagaggcctgtggccctccggagtggtcttcctctggatggggctgctactgtggggctgcttctgcaccaggggcctccccaggtgtgcaccatgcctgcctcccacttggctgtccctgctgctgggcaggacccggccacatgttctgcggatgctgcagaagtgtggaccatggcgggaccccaaggacacttggcacaggcctggaagaggccgccctcgtcttgtctcggctccctttcatggacagactggccttcttagctgtactataaatttgtgagtgaagttagagcccagctcacttagccagctcactttgagggcatcctataaacacccaactgttcttttatcgtctcggttttagccaaaagtgaaattagcatgactgcatctttcaaacaaaaatattgatttctgcttttagggccccgtttccatccagaaataaagggaaatgctggcttcagagtg

SEQ ID NO: 188103 - DNA, 2362 bp, Homo sapiens
  Payload ID: 17020
  Gene Symbol: SNAP47
  Gene Name: synaptosomal-associated protein, 47kDa
  Uniprot ID: Q5SQN1
  ENST ID: ENST00000366759
  CDS Start-End: 415-1809
gcggccgccgccccaccgtaggtccgtagcaggtggtcgaagtcgggcctccccgcgggcgtcacccagcgccgccggctgccccagccctgcgtgaaggcgctggaaaacacgcagggcaggttgggcagcaagaagccccgcacaaagtcggcgtaggagaaggcgcccggctccgagacgaaggctacccggcccggagcctggccgacgccggggacatcgacccccaggcctcggaagtggctgtcggcgagggcgcgcgtctcgcggtccatccagctcagcacgggtcgaaggaccctcctcctcacttccgccggagcggaaacggtgaggaccagcctcggaaccagaagacgcagggcgccgcgtttctgccccgccagcgcctggggctccgggcctgcacgcatgcgcgcggctcgccgcggtcttcactgcgcaggcgccgagcggccgaggcgccgcggtcggctctgggactcgtctggcgtccctcagaggcagaagaggcctggaccttggcgcacacagacccaggaacagatgagcagggatgtctgcatccacacctggccgtgcacctactacctggagcccaagaggcgatgggttactggacagctgtccttaacatcgctgtcgctcaggttcatgactgacagcactggagagattctggtcagcttccccctctccagcatagttgagatcaagaaggaggcttcacattttatcttcagctccatcaccatcctggagaagggccatgccaagcactggttcagctccctgcggccaagtcgaaatgtggtcttcagcatcatcgagcatttctggagggagctgctgctgtctcagcctggagccgtggcagacgcatctgtcccaaggacccggggcgaggagctgacgggactcatggctggatcccagaaacgcctggaggacacggcgagggtcctgcaccaccagggccagcagctggacagcgtcatgagaggcctggacaagatggagtcagacctggaggtggcggacagattgctgacagaactggaatctcctgcttggtggccctttagctccaagctttggaagacaccaccggaaacaaagcccagggaagatgtctccatgaccagttgtgaaccctttgggaaagaagggatactgataaaaattcctgctgttatttcccacagaacagagtctcacgttaaaccagggaggctcaccgtccttgtgtctgggttggaaatacatgactccagttctttgctcatgcacaggtttgaaagagaagacgtggacgacatcaaggtccactcaccttacgaaattagcatccgccagcggtttattggaaagccagacatggcctatcgtttgatatctgccaagatgccagaggttatccccattttagaagtgcagttcagcaagaagatggagctgttagaagatgcattggtgctcagaagcgcaagaacctcttcccccgcagagaagagctgctcagtctggcatgcagcatctgggctgatgggccgtaccctgcaccgtgagccacccgcaggagaccaggagggcacagcactgcacctgcagacaagcctgccagccctttctgaggcagatacccaggaactaacccagatcctgaggaggatgaaggggctggccctggaggccgagagtgagctggagagacaagacgaagccctggatggcgttgcagcagctgtggacagggcaaccttgaccatcgacaagcacaacaggcggatgaagaggctgacctaggggcagaacgtccctgcattcctgtctcaccctgcacatcccgctgagatggagggctgggcggcagtgccagggctgcagaggcctgtggccctccggagtggtcttcctctggatggggctgctactgtggggctgcttctgcaccaggggcctccccaggtgtgcaccatgcctgcctcccacttggctgtccctgctgctgggcaggacccggccacatgttctgcggatgctgcagaagtgtggaccatggcgggaccccaaggacacttggcacaggcctggaagaggccgccctcgtcttgtctcggctccctttcatggacagactggccttcttagctgtactataaatttgtgagtgaagttagagcccagctcacttagccagctcactttgagggcatcctataaacacccaactgttcttttatcgtctcggttttagccaaaagtgaaattagcatgactgcatctttcaaacaaaaatattgatttctgcttttagggccccgtttccatccagaaataaagggaaatgctggcttca

SEQ ID NO: 188104 - DNA, 1446 bp, Homo sapiens
  Payload ID: 17020
  Gene Symbol: SNAP47
  Gene Name: synaptosomal-associated protein, 47kDa
  Uniprot ID: Q5SQN1
  ENST ID: ENST00000366760
  CDS Start-End: 225-893
atgagggcaaggctccggttcctgccctcacagggtcccagaagcaagggcagtgaggacctggcccacgtccctggcacgggctgtctgattctccttcgctgtggcgggaagatggccggatttgaagattgctgacagaactggaatctcctgcttggtggccctttagctccaagctttggaagacaccaccggaaacaaagcccagggaagatgtctccatgaccagttgtgaaccctttgggaaagaagggatactgataaaaattcctgctgttatttcccacagaacagagtctcacgttaaaccagggaggctcaccgtccttgtgtctgggttggaaatacatgactccagttctttgctcatgcacaggtttgaaagagaagacgtggacgacatcaaggtccactcaccttacgaaattagcatccgccagcggtttattggaaagccagacatggcctatcgtttgatatctgccaagatgccagaggttatccccattttagaagtgcagttcagcaagaagatggagctgttagaagatgcattggtgctcagaagcgcaagaacctcttcccccgcagagaagagctgctcagtctggcatgcagcatctgggctgatgggccgtaccctgcaccgtgagccacccgcaggagaccaggagggcacagcactgcacctgcagacaagcctgccagccctttctgaggcagatacccaggaactaacccagatcctgaggaggatgaaggggctggccctggaggccgagagtgagctggagagacaagacgaagccctggatggcgttgcagcagctgtggacagggcaaccttgaccatcgacaagcacaacaggcggatgaagaggctgacctaggggcagaacgtccctgcattcctgtctcaccctgcacatcccgctgagatggagggctgggcggcagtgccagggctgcagaggcctgtggccctccggagtggtcttcctctggatggggctgctactgtggggctgcttctgcaccaggggcctccccaggtgtgcaccatgcctgcctcccacttggctgtccctgctgctgggcaggacccggccacatgttctgcggatgctgcagaagtgtggaccatggcgggaccccaaggacacttggcacaggcctggaagaggccgccctcgtcttgtctcggctccctttcatggacagactggccttcttagctgtactataaatttgtgagtgaagttagagcccagctcacttagccagctcactttgagggcatcctataaacacccaactgttcttttatcgtctcggttttagccaaaagtgaaattagcatgactgcatctttcaaacaaaaatattgatttctgcttttagggccccgtttccatccagaaataaagggaaatgctggcttca

SEQ ID NO: 188105 - DNA, 1867 bp, Homo sapiens
  Payload ID: 17020
  Gene Symbol: SNAP47
  Gene Name: synaptosomal-associated protein, 47kDa
  ENST ID: ENST00000418653
  CDS Start-End: 1-778
cttcactgcgcaggcgccgagcggccgaggcgccgcggtcggctctgggactcgtctggcgtccctcagattgctgacagaactggaatctcctgcttggtggccctttagctccaagctttggaagacaccaccggaaacaaagcccagggaagatgtctccatgaccagttgtgaaccctttgggaaagaagggatactgataaaaattcctgctgttatttcccacagaacagagtctcacgttaaaccagggaggctcaccgtccttgtgtctgggttggaaatacatgactccagttctttgctcatgcacaggtttgaaagagaagacgtggacgacatcaaggtccactcaccttacgaaattagcatccgccagcggtttattggaaagccagacatggcctatcgtttgatatctgccaagatgccagaggttatccccattttagaagtgcagttcagcaagaagatggagctgttagaagatgcattggtgctcagaagcgcaagaacctcttcccccgcagagaagagctgctcagtctggcatgcagcatctgggctgatgggccgtaccctgcaccgtgagccacccgcaggagaccaggagggcacagcactgcacctgcagacaagcctgccagccctttctgaggcagatacccaggaactaacccagggcttccggcctatgtcgctgtcaacccagacagtgttggtgatgctttgctccgagtctgcaggagctttgtggagacagagactttcctagcagggcagcaagcggaagcttttcttccagaacagcctttgctcagggcatgagggagccggccaggcccacagcgcccagggcatcctcctcacggatgtgttggaggaaagtggctttggtgctatcctgggggaccatggccataagctggcagtgtcagccacgcatcagttgcgtttctttgttcaggttgtgcctcttgctgcctgcctgagtcacccagggctgctccccttcctggctctgacgccctcagcgggtcccacaagccgctcaggaccacagagtctggccatgggtctggccaggcatccactgatgctctaagctgcagcttctcttaggaacacttctatcaggtctggctcgcaggcatgccccagggccagcctggattgtactgtccttcaagcactccttgctctatttctttgaagtttataaaagtttgtttcccccaaaacccaaagcacttttaatcaggtagtttctgtggaggtcgaactggctggaaggaaggctggttcctggatttctttactcatgtagcagggactcaaggaagtctgatttgcgcctcgcctctgactcagagcccatgaaggttcctgtgtgaggccactggctgcctcggagctgacagcatcctgcacaatggctagatggcttgtcaccccaggccgcagaggaacaactgtttctagggtttggccagacttcacattctccattctttccatccctgttatgtggaatgcacacgatgccatgtaattacttcagtcccttctcaaaggaaaaagaatctggacctgcactccaggacactagcagtttgaaggttcgctcaggaatgttctttgtctgcagacctagcagctgtacagatcgctcttgtgtttttgcactattaattaacttcaagtgcaattttggcaggcaggccaagggtctcaacaggctatttggaatgagttctcttttaaggccttcaacgtagtgagacattttcaaatcaaaaagtacagcaggagccagcctttattttgtctgtgtacacaataaaatattccgcttctataggca

SEQ ID NO: 188106 - DNA, 2403 bp, Homo sapiens
  Payload ID: 17020
  Gene Symbol: SNAP47
  Gene Name: synaptosomal-associated protein, 47kDa
  ENST ID: ENST00000426344
  CDS Start-End: 1-1315
ctgcgcaggcgccgagcggccgaggcgccgcggtcggctctgggactcgtctggcgtccctcagaggcagaagaggcctggaccttggcgcacacagacccaggaacagatgagcagggatgtctgcatccacacctggccgtgcacctactacctggagcccaagaggcgatgggttactggacagctgtccttaacatcgctgtcgctcaggttcatgactgacagcactggagagattctggtcagcttccccctctccagcatagttgagatcaagaaggaggcttcacattttatcttcagctccatcaccatcctggagaagggccatgccaagcactggttcagctccctgcggccaagtcgaaatgtggtcttcagcatcatcgagcatttctggagggagctgctgctgtctcagcctggagccgtggcagacgcatctgtcccaaggacccggggcgaggagctgacgggactcatggctggatcccagaaacgcctggaggacacggcgagggtcctgcaccaccagggccagcagctggacagcgtcatgagaggcctggacaagatggagtcagacctggaggtggcggacagattgctgacagaactggaatctcctgcttggtggccctttagctccaagctttggaagacaccaccggaaacaaagcccagggaagatgtctccatgaccagttgtgaaccctttgggaaagaagggatactgataaaaattcctgctgttatttcccacagaacagagtctcacgttaaaccagggaggctcaccgtccttgtgtctgggttggaaatacatgactccagttctttgctcatgcacaggtttgaaagagaagacgtggacgacatcaaggtccactcaccttacgaaattagcatccgccagcggtttattggaaagccagacatggcctatcgtttgatatctgccaagatgccagaggttatccccattttagaagtgcagttcagcaagaagatggagctgttagaagatgcattggtgctcagaagcgcaagaacctcttcccccgcagagaagagctgctcagtctggcatgcagcatctgggctgatgggccgtaccctgcaccgtgagccacccgcaggagaccaggagggcacagcactgcacctgcagacaagcctgccagccctttctgaggcagatacccaggaactaacccagggcttccggcctatgtcgctgtcaacccagacagtgttggtgatgctttgctccgagtctgcaggagctttgtggagacagagactttcctagcagggcagcaagcggaagcttttcttccagaacagcctttgctcagggcatgagggagccggccaggcccacagcgcccagggcatcctcctcacggatgtgttggaggaaagtggctttggtgctatcctgggggaccatggccataagctggcagtgtcagccacgcatcagttgcgtttctttgttcaggttgtgcctcttgctgcctgcctgagtcacccagggctgctccccttcctggctctgacgccctcagcgggtcccacaagccgctcaggaccacagagtctggccatgggtctggccaggcatccactgatgctctaagctgcagcttctcttaggaacacttctatcaggtctggctcgcaggcatgccccagggccagcctggattgtactgtccttcaagcactccttgctctatttctttgaagtttataaaagtttgtttcccccaaaacccaaagcacttttaatcaggtagtttctgtggaggtcgaactggctggaaggaaggctggttcctggatttctttactcatgtagcagggactcaaggaagtctgatttgcgcctcgcctctgactcagagcccatgaaggttcctgtgtgaggccactggctgcctcggagctgacagcatcctgcacaatggctagatggcttgtcaccccaggccgcagaggaacaactgtttctagggtttggccagacttcacattctccattctttccatccctgttatgtggaatgcacacgatgccatgtaattacttcagtcccttctcaaaggaaaaagaatctggacctgcactccaggacactagcagtttgaaggttcgctcaggaatgttctttgtctgcagacctagcagctgtacagatcgctcttgtgtttttgcactattaattaacttcaagtgcaattttggcaggcaggccaagggtctcaacaggctatttggaatgagttctcttttaaggccttcaacgtagtgagacattttcaaatcaaaaagtacagcaggagccagcctttattttgtctgtgtacacaataaaatattccgcttctataggc

SEQ ID NO: 188107 - DNA, 829 bp, Homo sapiens
  Payload ID: 17020
  Gene Symbol: SNAP47
  Gene Name: synaptosomal-associated protein, 47kDa
  ENST ID: ENST00000606873
  CDS Start-End: 1-667
ggcagacgcatctgtcccaaggacccggggcgaggagctgacgggactcatggctggatcccagaaacgcctggaggacacggcgagggtcctgcaccaccagggccagcagctggacagcgtcatgagaggcctggacaagatggagtcagacctggaggtggcggacagattgctgacagaactggaatctcctgcttggtggccctttagctccaagctttggaagacaccaccggaaacaaagcccagggaagatgtctccatgaccagttgtgaaccctttgggaaagaagggatactgataaaaattcctgctgttatttcccacagaacagagtctcacgttaaaccagggaggctcaccgtccttgtgtctgggttggaaatacatgactccagttctttgctcatgcacaggtttgaaagagaagacgtggacgacatcaaggtccactcaccttacgaaattagcatccgccagcggtttattggaaagccagacatggcctatcgtttgatatctgccaagatgccagaggttatccccattttagaagtgcagttcagcaagaagatggagctgttagaagatgcattggtgctcagaagcgcaagaacctcttcccccgcagagaagagctgctcagtctggcatgcaggttagtgaccgacaaggcagtgagcgcgtgcacagacttctaaaattacaggcagactcagcacgcctgtgggaaatgcctaacagatgcgtcacctagagcagctgctggcctccagcttgctagagacagctcgtttgtttatacataaaaacaattccagacca

SEQ ID NO: 188108 - DNA, 1905 bp, Homo sapiens
  Payload ID: 17020
  Gene Symbol: SNAP47
  Gene Name: synaptosomal-associated protein, 47kDa
  ENST ID: ENST00000617596
  CDS Start-End: 93-1352
ggccgaggcgccgcggtcggctctgggactcgtctggcgtccctcagaggcagaagaggcctggaccttggcgcacacagacccaggaacagatgagcagggatgtctgcatccacacctggccgtgcacctactacctggagcccaagaggcgatgggttactggacagctgtccttaacatcgctgtcgctcaggttcatgactgacagcactggagagattctggtcagcttccccctctccagcatagttgagatcaagaaggaggcttcacattttatcttcagctccatcaccatcctggagaagggccatgccaagcactggttcagctccctgcggccaagtcgaaatgtggtcttcagcatcatcgagcatttctggagggagctgctgctgtctcagcctggagccgtggcagacgcatctgtcccaaggacccggggcgaggagctgacgggactcatggctggatcccagaaacgcctggaggacacggcgagggtcctgcaccaccagggccagcagctggacagcgtcatgagaggcctggacaagatggagtcagacctggaggtggcggacagattgctgacagaactggaatctcctgcttggtggccctttagctccaagctttggaagacaccaccggaaacaaagcccagggaagatgtctccatgaccagttgtgaaccctttgggaaagaagggatactgataaaaattcctgctgttatttcccacagaacagagtctcacgttaaaccagggaggctcaccgtccttgtgtctgggttggaaatacatgactccagttctttgctcatgcacaggtttgaaagagaagacgtggacgacatcaaggtccactcaccttacgaaattagcatccgccagcggtttattggaaagccagacatggcctatcgtttgatatctgccaagatgccagaggttatccccattttagaagtgcagttcagcaagaagatggagctgttagaagatgcattggtgctcagaagcgcaagaacctcttcccccgcagagaagagctgctcagtctggcatgcagcatctgggctgatgggccgtaccctgcaccgtgagccacccgcaggagaccaggagggcacagcactgcacctgcagacaagcctgccagccctttctgaggcagatacccaggaactaacccagatcctgaggaggatgaaggggctggccctggaggccgagagtgagctggagagacaagacgaagccctggatggcgttgcagcagctgtggacagggcaaccttgaccatcgacaagcacaacaggcggatgaagaggctgacctaggggcagaacgtccctgcattcctgtctcaccctgcacatcccgctgagatggagggctgggcggcagtgccagggctgcagaggcctgtggccctccggagtggtcttcctctggatggggctgctactgtggggctgcttctgcaccaggggcctccccaggtgtgcaccatgcctgcctcccacttggctgtccctgctgctgggcaggacccggccacatgttctgcggatgctgcagaagtgtggaccatggcgggaccccaaggacacttggcacaggcctggaagaggccgccctcgtcttgtctcggctccctttcatggacagactggccttcttagctgtactataaatttgtgagtgaagttagagcccagctcacttagccagctcactttgagggcatcctataaacacccaactgttcttttatcgtctcggttttagccaaaagtgaaattagcatgactgcatctttcaaacaaaaatattgatttctgcttttagggccccgtttccatccagaaataaagggaaatgctggcttca

SEQ ID NO: 188109 - DNA, 870 bp, Homo sapiens
  Payload ID: 17020
  Gene Symbol: SNAP47
  Gene Name: synaptosomal-associated protein, 47kDa
  ENST ID: ENST00000478768
  CDS Start-End: 1-771
ctgcaccaccagggccagcagctggacagcgtcatgagaggcctggacaagatggagtcagacctggaggtggcggacagattgctgacagaactggaatctcctgcttggtggccctttagctccaagctttggaagacaccaccggaaacaaagcccagggaagatgtctccatgaccagttgtgaaccctttgggaaagaagggatactgataaaaattcctgctgttatttcccacagaacagagtctcacgttaaaccagggaggctcaccgtccttgtgtctgggttggaaatacatgactccagttctttgctcatgcacaggtttgaaagagaagacgtggacgacatcaaggtccactcaccttacgaaattagcatccgccagcggtttattggaaagccagacatggcctatcgtttgatatctgccaagatgccagaggttatccccattttagaagtgcagttcagcaagaagatggagctgttagaagatgcattggtgctcagaagcgcaagaacctcttcccccgcagagaagagctgctcagtctggcatgcagcatctgggctgatgggccgtaccctgcaccgtgagccacccgcaggagaccaggagggcacagcactgcacctgcagacaagcctgccagccctttctgaggcagatacccaggaactaacccaggaactggagaatgcattgcatcttcctcagggacccccgttcctggtctggcttccctcacttccctatccctgatgtctctaatctaaactttcctcaattaatctgtgtcctctcctagtcaggggaaaaaacatgtgtgtgtacctaatgaatgtaagataatcatattca

SEQ ID NO: 188110 - DNA, 4434 bp, Homo sapiens
  Payload ID: 17021
  Gene Symbol: SNAP91
  Gene Name: synaptosomal-associated protein, 91kDa
  ENST ID: ENST00000195649
  CDS Start-End: 315-3023
agctgaggtgggggcggggatggggacgcagctcggagcgctagagagacgcggcggcgctggcagaagaggcggcggcgggcgggtactggcttctggggccaggggccaggggcggtgggcgccgggaccgcggagctgaggagcggggcccggccagggctggagactttgcgcccgggggcaccggggctacgcgcggtcgcacacatccaccggcgcggcttccctcggcggcccgggctccgctcatcctgcggcgggcggcgccgctcaggggcgggaagaggaggcggtagacgcgaccacagaagatgtcgggccaaacgctcacggatcggatcgccgccgctcagtacagcgttacaggctctgctgtagcaagagcggtctgcaaagccactactcatgaagtaatgggccccaagaaaaagcacctggactatttgatccaggctaccaacgagaccaatgttaatattcctcagatggccgacactctctttgagcgggcaacaaacagtagctgggtggttgtgtttaaggctttagtgacaacacatcatctcatggtgcatggaaatgagagatttattcaatatttggcttctagaaatacactattcaatctcagcaattttttggacaaaagtggatcccatggttatgatatgtctaccttcataaggcgctatagtagatatttgaatgaaaaggctttttcttacagacagatggcctttgattttgccagggtgaagaaaggggccgatggtgtaatgaggacaatggctcccgaaaagctgctaaagagtatgccaatactacagggacaaattgatgcactgcttgaatttgatgtgcatccaaatgaactaacaaatggtgtcataaatgcagcatttatgcttcttttcaaagatcttatcaaactttttgcttgctacaatgatggtgttattaacttactcgaaaagttttttgaaatgaagaaaggacaatgtaaagatgctctagaaatttacaaacgatttctaactagaatgacacgagtgtctgaatttctcaaggttgcagagcaagttggtattgataaaggtgacattcctgacctcacacaggctcccagcagtcttatggagacgcttgaacagcatctaaatacattagaaggaaagaaacctggaaacaatgaaggatctggtgctccctctccattaagtaagtcttctccagccacaactgttacgtctcctaattctacaccagctaaaactattgacacatccccaccggttgatttatttgcaactgcatctgcggctgtcccagtcagcacttctaaaccatctagtgatctcctggacctccagccagacttttcctctggaggggcagcagcagccgcagcaccagcaccaccaccacctgctggaggagccactgcatggggagaccttttgggagaggattctttggctgcactttcctctgttccctctgaagcacagatttcagatccatttgcaccagaacctacccctcctactacaactgctgaaattgcaactgcctcagcttctgcctccactactacaactgttactgctgtcactgctgaagtggatctctttggagatgcctttgcagcttctcctggggaggcccctgcagcatccgaaggggccgccgcaccagctaccccaacccctgtagcagcagcacttgatgcatgttcaggaaatgacccctttgccccgtctgaaggtagtgcagaggctgcacctgagctggacctctttgcaatgaagccacctgagaccagtgttcctgtagttacccctacagctagcacagcccctccagttcccgcaactgctccttctcctgctcctgccgttgcagctgctgctgctgccactactgctgccaccgccgctgccaccaccactaccaccacctccgctgccaccgccaccactgctcctcctgctctagatatctttggtgatttatttgagtccactcctgaagttgctgcagcgcctaagccagatgctgctcctagcatagacctgtttagtacagatgctttctcctctccaccacaaggggcctctcctgtgcctgagagttctctcactgctgacctcttatctgtggatgcatttgcagcaccatctcctgcaaccactgcctcgccagcaaaggtggattcttcaggtgtcatagacctttttggggatgcatttggaagtagtgcttctgaaccccaacctgcatctcaggctgcttctagttcatcagcatcggcagacctactagctggatttgggggttctttcatggcgccttccccatctccagtgactccagctcagaataacctgctacagcccaattttgaggcagcttttgggacaacgccttcaacttccagcagcagctcctttgatccatcaggtgatcttttgatgccaaccatggcaccagctgggcagcctgcacctgtctcaatggtaccacccagtcctgcaatggcagccagcaaagcccttggaagtgatcttgattcatctcttgccagcttagtaggcaatcttggaatttctggtaccacaacaaaaaagggagatcttcagtggaatgctggagagaaaaagttgactggtggagccaactggcagcctaaagtagctccagcaacctggtcagcaggcgttccaccaagtgcacctttgcaaggagctgtacctccaaccagttcagttcctcctgttgccggggccccatcggttggacaacctggagcaggatttggaatgcctcctgctgggacaggcatgcccatgatgcctcagcagccggtcatgtttgcacagcccatgatgaggcccccctttggagctgccgctgtacctggcacgcagctttctccaagccctacacctgccagtcagagtcccaagaaacctccagcaaaggacccattagcggatcttaacatcaaggatttcttgtaaacaatttaagctgcaatatttgtgactgaataggaaaataaatgagtttggagacttcaaataagattgatgctgagtttcaaagggagccaccagtaccaaacccaatacttactcataacttctcttccaaaatgtgtaacacagccgtgaaagtgaacattaggaatatgtactaccttagctgttatccctactcttgaaattgtagtgtatttggattatttgtgtattgtacgatgtaaacaatgaatggatgttactgatgccgttagtgcttttttggacttcacctgaggacagatgatgcagctgttgtgtggcgagctatttggaaagacgtctgtgtttttgaaggtttcaatgtacatataacttttgaacaaaccccaaactcttcccataaattatcttttcttctgtatctctgttacaagcgtagtgtgataataccagataataaggaaaacactcataaatatacaaaactttttcagtgtggagtacatttttccaatcacaggaacttcaactgttgtgagaaatgtttatttttgtggcactgtatatgttaagaaattttattttaaaaaatataaaggttaacgtccataataaatacttctctttgaagctaccttatcaagaacgaaaaatcgtatgggaagaatcccctatttatcactgctatattaaaatatatatattttaattatatttgacaggttttgcatctaaattgacctatttattcattcttgattaaatgcactgaaaagtaaagggtctgtttgtgtcatgttcatgaaaatgcggttagagaggtgctattcaagtgattctgaaggcaccccaaggtatatctgtaatttaaagattactgcaaatatctttactttactgtgggtttttagtacatctgttaatttagtgtttctttgtgtgttttgtagactagtgttcttccatccttcaactgagctcaaagtaggttttgttgtaacattgtgattaggatttaaactaattcagagaattgtatcttttactgtacatactgtattctttaagttttaatttgttgtcatactgtctgtgctgatggcttggcttaagattttgatgcataaatgaggtcactgttgatcagtgttgctagtagcttggcagctcttcataaaagcatattgggttggaaaggtgtttgcctatttttcaaattatttaatagatgtatggtaccatttaaaagtggttgtatctgaatttactgtggggataacatacactgtaatggggaaaaattacctaaaaccaatttcaaaatggctttctttgtatttcagtttaaaaacccagtgcatgtacgccctctgagatgcaataaacaccttgaacaaagaaatgcaaa

SEQ ID NO: 188111 - DNA, 546 bp, Homo sapiens
  Payload ID: 17021
  Gene Symbol: SNAP91
  Gene Name: synaptosomal-associated protein, 91kDa
  ENST ID: ENST00000369690
  CDS Start-End: 100-546
atccgatgcattccccgaagcctgcgggctgctaggaggaaagtctgctgaggtgggagatgggcaccgaagaggaggcggtagacgcgaccacagaagatgtcgggccaaacgctcacggatcggatcgccgccgctcagtacagcgttacaggctctgctgtagcaagagcggtctgcaaagccactactcatgaagtaatgggccccaagaaaaagcacctggactatttgatccaggctaccaacgagaccaatgttaatattcctcagatggccgacactctctttgagcgggcaacaaacagtagctgggtggttgtgtttaaggctttagtgacaacacatcatctcatggtgcatggaaatgagagatttattcaatatttggcttctagaaatacactattcaatctcagcaattttttggacaaaagtggatcccatggttatgatatgtctaccttcataaggcgctatagtagatatttgaatgaaaaggctttttcttacagacagatggcctttgattttgccagggtgaag

SEQ ID NO: 188112 - DNA, 429 bp, Homo sapiens
  Payload ID: 17021
  Gene Symbol: SNAP91
  Gene Name: synaptosomal-associated protein, 91kDa
  ENST ID: ENST00000369691
  CDS Start-End: 1-429
cacttctaaaccatctagtgatctcctggacctccagccagacttttcctctggaggggcagcagcagccgcagcaccagcaccaccaccacctgctggaggagccactgcatggggagaccttttgggagaggattctttggctgcactttcctctgttccctctgaagcacagatttcagatccatttgcaccagaacctacccctcctactacaactgctgaaattgcaactgcctcagcttctgcctccactactacaactgttactgctgtcactgctgaagtggatctctttggaggtagtgcagaggctgcacctgagctggacctctttgcaatgaagccacctgagaccagtgttcctgtagttacccctacagctagcacagcccctccagttcccgcaactgctccttctcctgctcc

SEQ ID NO: 188113 - DNA, 4449 bp, Homo sapiens
  Payload ID: 17021
  Gene Symbol: SNAP91
  Gene Name: synaptosomal-associated protein, 91kDa
  Uniprot ID: O60641
  ENST ID: ENST00000369694
  CDS Start-End: 315-3038
agctgaggtgggggcggggatggggacgcagctcggagcgctagagagacgcggcggcgctggcagaagaggcggcggcgggcgggtactggcttctggggccaggggccaggggcggtgggcgccgggaccgcggagctgaggagcggggcccggccagggctggagactttgcgcccgggggcaccggggctacgcgcggtcgcacacatccaccggcgcggcttccctcggcggcccgggctccgctcatcctgcggcgggcggcgccgctcaggggcgggaagaggaggcggtagacgcgaccacagaagatgtcgggccaaacgctcacggatcggatcgccgccgctcagtacagcgttacaggctctgctgtagcaagagcggtctgcaaagccactactcatgaagtaatgggccccaagaaaaagcacctggactatttgatccaggctaccaacgagaccaatgttaatattcctcagatggccgacactctctttgagcgggcaacaaacagtagctgggtggttgtgtttaaggctttagtgacaacacatcatctcatggtgcatggaaatgagagatttattcaatatttggcttctagaaatacactattcaatctcagcaattttttggacaaaagtggatcccatggttatgatatgtctaccttcataaggcgctatagtagatatttgaatgaaaaggctttttcttacagacagatggcctttgattttgccagggtgaagaaaggggccgatggtgtaatgaggacaatggctcccgaaaagctgctaaagagtatgccaatactacagggacaaattgatgcactgcttgaatttgatgtgcatccaaatgaactaacaaatggtgtcataaatgcagcatttatgcttcttttcaaagatcttatcaaactttttgcttgctacaatgatggtgttattaacttactcgaaaagttttttgaaatgaagaaaggacaatgtaaagatgctctagaaatttacaaacgatttctaactagaatgacacgagtgtctgaatttctcaaggttgcagagcaagttggtattgataaaggtgacattcctgacctcacacaggctcccagcagtcttatggagacgcttgaacagcatctaaatacattagaaggaaagaaacctggaaacaatgaaggatctggtgctccctctccattaagtaagtcttctccagccacaactgttacgtctcctaattctacaccagctaaaactattgacacatccccaccggttgatttatttgcaactgcatctgcggctgtcccagtcagcacttctaaaccatctagtgatctcctggacctccagccagacttttcctctggaggggcagcagcagccgcagcaccagcaccaccaccacctgctggaggagccactgcatggggagaccttttgggagaggattctttggctgcactttcctctgttccctctgaagcacagatttcagatccatttgcaccagaacctacccctcctactacaactgctgaaattgcaactgcctcagcttctgcctccactactacaactgttactgctgtcactgctgaagtggatctctttggagatgcctttgcagcttctcctggggaggcccctgcagcatccgaaggggccgccgcaccagctaccccaacccctgtagcagcagcacttgatgcatgttcaggaaatgacccctttgccccgtctgaaggtagtgcagaggctgcacctgagctggacctctttgcaatgaagccacctgagaccagtgttcctgtagttacccctacagctagcacagcccctccagttcccgcaactgctccttctcctgctcctgccgttgcagctgctgctgctgccactactgctgccaccgccgctgccaccaccactaccaccacctccgctgccaccgccaccactgctcctcctgctctagatatctttggtgatttatttgagtccactcctgaagttgctgcagcgcctaagccagatgctgctcctagcatagacctgtttagtacagatgctttctcctctccaccacaaggggcctctcctgtgcctgagagttctctcactgctgacctcttatctgtggatgcatttgcagcaccatctcctgcaaccactgcctcgccagcaaaggtggattcttcaggtgtcatagacctttttggggatgcatttggaagtagtgcttctgaaccccaacctgcatctcaggctgcttctagttcatcagcatcggcagacctactagctggatttgggggttctttcatggcgccttccccatctccagtgactccagctcagaataacctgctacagcccaattttgaggcagcttttgggacaacgccttcaacttccagcagcagctcctttgatccatcagtgtttgatggtctaggtgatcttttgatgccaaccatggcaccagctgggcagcctgcacctgtctcaatggtaccacccagtcctgcaatggcagccagcaaagcccttggaagtgatcttgattcatctcttgccagcttagtaggcaatcttggaatttctggtaccacaacaaaaaagggagatcttcagtggaatgctggagagaaaaagttgactggtggagccaactggcagcctaaagtagctccagcaacctggtcagcaggcgttccaccaagtgcacctttgcaaggagctgtacctccaaccagttcagttcctcctgttgccggggccccatcggttggacaacctggagcaggatttggaatgcctcctgctgggacaggcatgcccatgatgcctcagcagccggtcatgtttgcacagcccatgatgaggcccccctttggagctgccgctgtacctggcacgcagctttctccaagccctacacctgccagtcagagtcccaagaaacctccagcaaaggacccattagcggatcttaacatcaaggatttcttgtaaacaatttaagctgcaatatttgtgactgaataggaaaataaatgagtttggagacttcaaataagattgatgctgagtttcaaagggagccaccagtaccaaacccaatacttactcataacttctcttccaaaatgtgtaacacagccgtgaaagtgaacattaggaatatgtactaccttagctgttatccctactcttgaaattgtagtgtatttggattatttgtgtattgtacgatgtaaacaatgaatggatgttactgatgccgttagtgcttttttggacttcacctgaggacagatgatgcagctgttgtgtggcgagctatttggaaagacgtctgtgtttttgaaggtttcaatgtacatataacttttgaacaaaccccaaactcttcccataaattatcttttcttctgtatctctgttacaagcgtagtgtgataataccagataataaggaaaacactcataaatatacaaaactttttcagtgtggagtacatttttccaatcacaggaacttcaactgttgtgagaaatgtttatttttgtggcactgtatatgttaagaaattttattttaaaaaatataaaggttaacgtccataataaatacttctctttgaagctaccttatcaagaacgaaaaatcgtatgggaagaatcccctatttatcactgctatattaaaatatatatattttaattatatttgacaggttttgcatctaaattgacctatttattcattcttgattaaatgcactgaaaagtaaagggtctgtttgtgtcatgttcatgaaaatgcggttagagaggtgctattcaagtgattctgaaggcaccccaaggtatatctgtaatttaaagattactgcaaatatctttactttactgtgggtttttagtacatctgttaatttagtgtttctttgtgtgttttgtagactagtgttcttccatccttcaactgagctcaaagtaggttttgttgtaacattgtgattaggatttaaactaattcagagaattgtatcttttactgtacatactgtattctttaagttttaatttgttgtcatactgtctgtgctgatggcttggcttaagattttgatgcataaatgaggtcactgttgatcagtgttgctagtagcttggcagctcttcataaaagcatattgggttggaaaggtgtttgcctatttttcaaattatttaatagatgtatggtaccatttaaaagtggttgtatctgaatttactgtggggataacatacactgtaatggggaaaaattacctaaaaccaatttcaaaatggctttctttgtatttcagtttaaaaacccagtgcatgtacgccctctgagatgcaataaacaccttgaacaaagaaatgcaaa

SEQ ID NO: 188114 - DNA, 4452 bp, Homo sapiens
  Payload ID: 17021
  Gene Symbol: SNAP91
  Gene Name: synaptosomal-associated protein, 91kDa
  Uniprot ID: O60641
  ENST ID: ENST00000439399
  CDS Start-End: 318-3041
gtggtgcgcgagcccagtgcgtgccgggtgcggcgccagcagcggaggggcggcccggcgcccagcggagagccgctggctgggtgggtgtcggcctccccgcctccttcttctccccgccggcttgccggggatgcttgcgcgaggcgccccctcgcctttaagctcccggccccggggggcggtgtgtgtgagtagctgggagggggccgcgaggcgctccgccgagggctcgtccgggtttgtccgccgccgtcacctgactcgtcggaggagccacagctgagaagaggaggcggtagacgcgaccacagaagatgtcgggccaaacgctcacggatcggatcgccgccgctcagtacagcgttacaggctctgctgtagcaagagcggtctgcaaagccactactcatgaagtaatgggccccaagaaaaagcacctggactatttgatccaggctaccaacgagaccaatgttaatattcctcagatggccgacactctctttgagcgggcaacaaacagtagctgggtggttgtgtttaaggctttagtgacaacacatcatctcatggtgcatggaaatgagagatttattcaatatttggcttctagaaatacactattcaatctcagcaattttttggacaaaagtggatcccatggttatgatatgtctaccttcataaggcgctatagtagatatttgaatgaaaaggctttttcttacagacagatggcctttgattttgccagggtgaagaaaggggccgatggtgtaatgaggacaatggctcccgaaaagctgctaaagagtatgccaatactacagggacaaattgatgcactgcttgaatttgatgtgcatccaaatgaactaacaaatggtgtcataaatgcagcatttatgcttcttttcaaagatcttatcaaactttttgcttgctacaatgatggtgttattaacttactcgaaaagttttttgaaatgaagaaaggacaatgtaaagatgctctagaaatttacaaacgatttctaactagaatgacacgagtgtctgaatttctcaaggttgcagagcaagttggtattgataaaggtgacattcctgacctcacacaggctcccagcagtcttatggagacgcttgaacagcatctaaatacattagaaggaaagaaacctggaaacaatgaaggatctggtgctccctctccattaagtaagtcttctccagccacaactgttacgtctcctaattctacaccagctaaaactattgacacatccccaccggttgatttatttgcaactgcatctgcggctgtcccagtcagcacttctaaaccatctagtgatctcctggacctccagccagacttttcctctggaggggcagcagcagccgcagcaccagcaccaccaccacctgctggaggagccactgcatggggagaccttttgggagaggattctttggctgcactttcctctgttccctctgaagcacagatttcagatccatttgcaccagaacctacccctcctactacaactgctgaaattgcaactgcctcagcttctgcctccactactacaactgttactgctgtcactgctgaagtggatctctttggagatgcctttgcagcttctcctggggaggcccctgcagcatccgaaggggccgccgcaccagctaccccaacccctgtagcagcagcacttgatgcatgttcaggaaatgacccctttgccccgtctgaaggtagtgcagaggctgcacctgagctggacctctttgcaatgaagccacctgagaccagtgttcctgtagttacccctacagctagcacagcccctccagttcccgcaactgctccttctcctgctcctgccgttgcagctgctgctgctgccactactgctgccaccgccgctgccaccaccactaccaccacctccgctgccaccgccaccactgctcctcctgctctagatatctttggtgatttatttgagtccactcctgaagttgctgcagcgcctaagccagatgctgctcctagcatagacctgtttagtacagatgctttctcctctccaccacaaggggcctctcctgtgcctgagagttctctcactgctgacctcttatctgtggatgcatttgcagcaccatctcctgcaaccactgcctcgccagcaaaggtggattcttcaggtgtcatagacctttttggggatgcatttggaagtagtgcttctgaaccccaacctgcatctcaggctgcttctagttcatcagcatcggcagacctactagctggatttgggggttctttcatggcgccttccccatctccagtgactccagctcagaataacctgctacagcccaattttgaggcagcttttgggacaacgccttcaacttccagcagcagctcctttgatccatcagtgtttgatggtctaggtgatcttttgatgccaaccatggcaccagctgggcagcctgcacctgtctcaatggtaccacccagtcctgcaatggcagccagcaaagcccttggaagtgatcttgattcatctcttgccagcttagtaggcaatcttggaatttctggtaccacaacaaaaaagggagatcttcagtggaatgctggagagaaaaagttgactggtggagccaactggcagcctaaagtagctccagcaacctggtcagcaggcgttccaccaagtgcacctttgcaaggagctgtacctccaaccagttcagttcctcctgttgccggggccccatcggttggacaacctggagcaggatttggaatgcctcctgctgggacaggcatgcccatgatgcctcagcagccggtcatgtttgcacagcccatgatgaggcccccctttggagctgccgctgtacctggcacgcagctttctccaagccctacacctgccagtcagagtcccaagaaacctccagcaaaggacccattagcggatcttaacatcaaggatttcttgtaaacaatttaagctgcaatatttgtgactgaataggaaaataaatgagtttggagacttcaaataagattgatgctgagtttcaaagggagccaccagtaccaaacccaatacttactcataacttctcttccaaaatgtgtaacacagccgtgaaagtgaacattaggaatatgtactaccttagctgttatccctactcttgaaattgtagtgtatttggattatttgtgtattgtacgatgtaaacaatgaatggatgttactgatgccgttagtgcttttttggacttcacctgaggacagatgatgcagctgttgtgtggcgagctatttggaaagacgtctgtgtttttgaaggtttcaatgtacatataacttttgaacaaaccccaaactcttcccataaattatcttttcttctgtatctctgttacaagcgtagtgtgataataccagataataaggaaaacactcataaatatacaaaactttttcagtgtggagtacatttttccaatcacaggaacttcaactgttgtgagaaatgtttatttttgtggcactgtatatgttaagaaattttattttaaaaaatataaaggttaacgtccataataaatacttctctttgaagctaccttatcaagaacgaaaaatcgtatgggaagaatcccctatttatcactgctatattaaaatatatatattttaattatatttgacaggttttgcatctaaattgacctatttattcattcttgattaaatgcactgaaaagtaaagggtctgtttgtgtcatgttcatgaaaatgcggttagagaggtgctattcaagtgattctgaaggcaccccaaggtatatctgtaatttaaagattactgcaaatatctttactttactgtgggtttttagtacatctgttaatttagtgtttctttgtgtgttttgtagactagtgttcttccatccttcaactgagctcaaagtaggttttgttgtaacattgtgattaggatttaaactaattcagagaattgtatcttttactgtacatactgtattctttaagttttaatttgttgtcatactgtctgtgctgatggcttggcttaagattttgatgcataaatgaggtcactgttgatcagtgttgctagtagcttggcagctcttcataaaagcatattgggttggaaaggtgtttgcctatttttcaaattatttaatagatgtatggtaccatttaaaagtggttgtatctgaatttactgtggggataacatacactgtaatggggaaaaattacctaaaaccaatttcaaaatggctttctttgtatttcagtttaaaaacccagtgcatgtacgccctctgagatgcaataaacaccttgaacaaagaaatgcaaa

SEQ ID NO: 188115 - DNA, 735 bp, Homo sapiens
  Payload ID: 17021
  Gene Symbol: SNAP91
  Gene Name: synaptosomal-associated protein, 91kDa
  ENST ID: ENST00000523484
  CDS Start-End: 387-735
gggcgggggactgggcttcgctgtcagcccggctcctctccaaagccaggaagggtgaggcgccccaagactccggcgcctccgcagagctcccgggcggcccctgcggcagggatttggaaccggggggaaggggcccgggcgatgggcctcggcgaggctttggagccggcggcgaggaaggaaggggaggcgagggcataacatggcgcaacgctaggataatctccttcgcgactgagggaggacgagccctttgctgcagcagcgcgaggaggaggagggaggcagccagggcttgggtatccgatgcattccccgaagcctgcgggctgctaggaggaaagtctgctgagaagaggaggcggtagacgcgaccacagaagatgtcgggccaaacgctcacggatcggatcgccgccgctcagtacagcgttacaggctctgctgtagcaagagcggtctgcaaagccactactcatgaagtaatgggccccaagaaaaagcacctggactatttgatccaggctaccaacgagaccaatgttaatattcctcagatggccgacactctctttgagcgggcaacaaacagtagctgggtggttgtgtttaaggctttagtgacaacacatcatctcatggtgcatggaaatgagagatttattcaatatttggcttctagaaatacactattcaatctcagcaattttttggacaaaagtggatcccatg

SEQ ID NO: 188116 - DNA, 2168 bp, Homo sapiens
  Payload ID: 17021
  Gene Symbol: SNAP91
  Gene Name: synaptosomal-associated protein, 91kDa
  Uniprot ID: O60641
  ENST ID: ENST00000520213
  CDS Start-End: 99-1901
agtgcgtgccgggtgcggcgccagcagcggaggggcggcccggcgcccagcggagagccgctggctggaagaggaggcggtagacgcgaccacagaagatgtcgggccaaacgctcacggatcggatcgccgccgctcagtacagcgttacaggctctgctgtagcaagagcggtctgcaaagccactactcatgaagtaatgggccccaagaaaaagcacctggactatttgatccaggctaccaacgagaccaatgttaatattcctcagatggccgacactctctttgagcgggcaacaaacagtagctgggtggttgtgtttaaggctttagtgacaacacatcatctcatggtgcatggaaatgagagatttattcaatatttggcttctagaaatacactattcaatctcagcaattttttggacaaaagtggatcccatggttatgatatgtctaccttcataaggcgctatagtagatatttgaatgaaaaggctttttcttacagacagatggcctttgattttgccagggtgaagaaaggggccgatggtgtaatgaggacaatggctcccgaaaagctgctaaagagtatgccaatactacagggacaaattgatgcactgcttgaatttgatgtgcatccaaatgaactaacaaatggtgtcataaatgcagcatttatgcttcttttcaaagatcttatcaaactttttgcttgctacaatgatggtgttattaacttactcgaaaagttttttgaaatgaagaaaggacaatgtaaagatgctctagaaatttacaaacgatttctaactagaatgacacgagtgtctgaatttctcaaggttgcagaggctcccagcagtcttatggagacgcttgaacagcatctaaatacattagaaggaaagaaacctggaaacaaatctggtgctccctctccattaagtaagtcttctccagccacaactgttacgtctcctaattctacaccagctaaaactattgacacatccccaccggttgatttatttgcaactgcatctgcggctgtcccagtcagcacttctaaaccatctagtgatctcctggacctccagccagacttttcctctggaggggcagcagcagccgcagcaccagcaccaccaccacctgctggaggagccactgcatggggaggatttgggggttctttcatggcgccttccccatctccagtgactccagctcagaataacctgctacagcccaattttgaggcagcttttgggacaacgccttcaacttccagcagcagctcctttgatccatcagtgtttgatggtctaggtgatcttttgatgccaaccatggcaccagctgggcagcctgcacctgtctcaatggtaccacccagtcctgcaatggcagccagcaaagcccttggaagtgatcttgattcatctcttgccagcttagtaggcaatcttggaatttctggtaccacaacaaaaaagggagatcttcagtggaatgctggagagaaaaagttgactggtggagccaactggcagcctaaagtagctccagcaacctggtcagcaggcgttccaccaagtgcacctttgcaaggagctgtacctccaaccagttcagttcctcctgttgccggggccccatcggttggacaacctggagcaggatttggaatgcctcctgctgggacaggcatgcccatgatgcctcagcagccggtcatgtttgcacagcccatgatgaggcccccctttggagctgccgctgtacctggcacgcagctttctccaagccctacacctgccagtcagagtcccaagaaacctccagcaaaggacccattagcggatcttaacatcaaggatttcttgtaaacaatttaagctgcaatatttgtgactgaataggaaaataaatgagtttggagacttcaaataagattgatgctgagtttcaaagggagccaccagtaccaaacccaatacttactcataacttctcttccaaaatgtgtaacacagccgtgaaagtgaacattaggaatatgtactaccttagctgttatccctactcttgaaattgtagtgtatttggattatttgtgtattgtacgatgtaaacaatgaatggatgttactgat

SEQ ID NO: 188117 - DNA, 2822 bp, Homo sapiens
  Payload ID: 17021
  Gene Symbol: SNAP91
  Gene Name: synaptosomal-associated protein, 91kDa
  ENST ID: ENST00000521616
  CDS Start-End: 176-307
cgccagggtctcgcggggatccgcagaggataatcccagggtgcggagaagggcagcggccgagtgacagctccgcggagcgctccagggcgggcgggggactgggcttcgctgtcagcccggctcctctccaaagccaggaaggaagaggaggcggtagacgcgaccacagaagatgtcgggccaaacgctcacggatcggatcgccgccgctcagtacagcgttacaggctctgctgtagcaagagcggtctgcaaagccactactcatgaagtaatgggccccaagaaaaagcacctggactagatttattcaatatttggcttctagaaatacactattcaatctcagcaattttttggacaaaagtggatcccatggttatgatatgtctaccttcataaggcgctatagtagatatttgaatgaaaaggctttttcttacagacagatggcctttgattttgccagggtgaagaaaggggccgatggtgtaatgaggacaatggctcccgaaaagctgctaaagagtatgccaatactacagggacaaattgatgcactgcttgaatttgatgtgcatccaaatgaactaacaaatggtgtcataaatgcagcatttatgcttcttttcaaagatcttatcaaactttttgcttgctacaatgatggtgttattaacttactcgaaaagttttttgaaatgaagaaaggacaatgtaaagatgctctagaaatttacaaacgatttctaactagaatgacacgagtgtctgaatttctcaaggttgcagagcaagttggtattgataaaggtgacattcctgacctcacacaggctcccagcagtcttatggagacgcttgaacagcatctaaatacattagaaggaaagaaacctggaaacaatgaaggatctggtgctccctctccattaagtaagtcttctccagccacaactgttacgtctcctaattctacaccagctaaaactattgacacatccccaccggttgatttatttgcaactgcatctgcggctgtcccagtcagcacttctaaaccatctagtgatctcctggacctccagccagacttttcctctggaggggcagcagcagccgcagcaccagcaccaccaccacctgctggaggagccactgcatggggagaccttttgggagaggattctttggctgcactttcctctgttccctctgaagcacagatttcagatccatttgcaccagaacctacccctcctactacaactgctgaaattgcaactgcctcagcttctgcctccactactacaactgttactgctgtcactgctgaagtggatctctttggagatgcctttgcagcttctcctggggaggcccctgcagcatccgaaggggccgccgcaccagctaccccaacccctgtagcagcagcacttgatgcatgttcaggaaatgacccctttgccccgtctgaaggtagtgcagaggctgcacctgagctggacctctttgcaatgaagccacctgagaccagtgttcctgtagttacccctacagctagcacagcccctccagttcccgcaactgctccttctcctgctcctgccgttgcagctgctgctgctgccactactgctgccaccgccgctgccaccaccactaccaccacctccgctgccaccgccaccactgctcctcctgctctagatatctttggtgatttatttgagtccactcctgaagttgctgcagcgcctaagccagatgctgctcctagcatagacctgtttagtacagatgctttctcctctccaccacaaggggcctctcctgtgcctgagagttctctcactgctgacctcttatctgtggatgcatttgcagcaccatctcctgcaaccactgcctcgccagcaaaggtggattcttcaggtgtcatagacctttttggggatgcatttggaagtagtgcttctgaaccccaacctgcatctcaggctgcttctagttcatcagcatcggcagacctactagctggatttgggggttctttcatggcgccttccccatctccagtgactccagctcagaataacctgctacagcccaattttgaggcagcttttgggacaacgccttcaacttccagcagcagctcctttgatccatcaggtgatcttttgatgccaaccatggcaccagctgggcagcctgcacctgtctcaatggtaccacccagtcctgcaatggcagccagcaaagcccttggaagtgatcttgattcatctcttgccagcttagtaggcaatcttggaatttctggtaccacaacaaaaaagggagatcttcagtggaatgctggagagaaaaagttgactggtggagccaactggcagcctaaagtagctccagcaacctggtcagcaggcgttccaccaagtgcacctttgcaaggagctgtacctccaaccagttcagttcctcctgttgccggggccccatcggttggacaacctggagcaggatttggaatgcctcctgctgggacaggcatgcccatgatgcctcagcagccggtcatgtttgcacagcccatgatgaggcccccctttggagctgccgctgtacctggcacgcagctttctccaagccctacacctgccagtcagagtcccaagaaacctccagcaaaggacccattagcggatcttaacatcaaggatttcttgtaaacaatttaagctgcaatatttgtgactgaataggaaaataaatgagtttggagacttcaaataagattgatgctgagtttc

SEQ ID NO: 188118 - DNA, 4263 bp, Homo sapiens
  Payload ID: 17021
  Gene Symbol: SNAP91
  Gene Name: synaptosomal-associated protein, 91kDa
  Uniprot ID: O60641
  ENST ID: ENST00000521743
  CDS Start-End: 135-2858
gactcgtcggaggagccacagctgaggtgggggcggggatggggacgcagctcggagcgctagagagacgcggcggcgctggcagaagaggcggcggcgggcggaagaggaggcggtagacgcgaccacagaagatgtcgggccaaacgctcacggatcggatcgccgccgctcagtacagcgttacaggctctgctgtagcaagagcggtctgcaaagccactactcatgaagtaatgggccccaagaaaaagcacctggactatttgatccaggctaccaacgagaccaatgttaatattcctcagatggccgacactctctttgagcgggcaacaaacagtagctgggtggttgtgtttaaggctttagtgacaacacatcatctcatggtgcatggaaatgagagatttattcaatatttggcttctagaaatacactattcaatctcagcaattttttggacaaaagtggatcccatggttatgatatgtctaccttcataaggcgctatagtagatatttgaatgaaaaggctttttcttacagacagatggcctttgattttgccagggtgaagaaaggggccgatggtgtaatgaggacaatggctcccgaaaagctgctaaagagtatgccaatactacagggacaaattgatgcactgcttgaatttgatgtgcatccaaatgaactaacaaatggtgtcataaatgcagcatttatgcttcttttcaaagatcttatcaaactttttgcttgctacaatgatggtgttattaacttactcgaaaagttttttgaaatgaagaaaggacaatgtaaagatgctctagaaatttacaaacgatttctaactagaatgacacgagtgtctgaatttctcaaggttgcagagcaagttggtattgataaaggtgacattcctgacctcacacaggctcccagcagtcttatggagacgcttgaacagcatctaaatacattagaaggaaagaaacctggaaacaatgaaggatctggtgctccctctccattaagtaagtcttctccagccacaactgttacgtctcctaattctacaccagctaaaactattgacacatccccaccggttgatttatttgcaactgcatctgcggctgtcccagtcagcacttctaaaccatctagtgatctcctggacctccagccagacttttcctctggaggggcagcagcagccgcagcaccagcaccaccaccacctgctggaggagccactgcatggggagaccttttgggagaggattctttggctgcactttcctctgttccctctgaagcacagatttcagatccatttgcaccagaacctacccctcctactacaactgctgaaattgcaactgcctcagcttctgcctccactactacaactgttactgctgtcactgctgaagtggatctctttggagatgcctttgcagcttctcctggggaggcccctgcagcatccgaaggggccgccgcaccagctaccccaacccctgtagcagcagcacttgatgcatgttcaggaaatgacccctttgccccgtctgaaggtagtgcagaggctgcacctgagctggacctctttgcaatgaagccacctgagaccagtgttcctgtagttacccctacagctagcacagcccctccagttcccgcaactgctccttctcctgctcctgccgttgcagctgctgctgctgccactactgctgccaccgccgctgccaccaccactaccaccacctccgctgccaccgccaccactgctcctcctgctctagatatctttggtgatttatttgagtccactcctgaagttgctgcagcgcctaagccagatgctgctcctagcatagacctgtttagtacagatgctttctcctctccaccacaaggggcctctcctgtgcctgagagttctctcactgctgacctcttatctgtggatgcatttgcagcaccatctcctgcaaccactgcctcgccagcaaaggtggattcttcaggtgtcatagacctttttggggatgcatttggaagtagtgcttctgaaccccaacctgcatctcaggctgcttctagttcatcagcatcggcagacctactagctggatttgggggttctttcatggcgccttccccatctccagtgactccagctcagaataacctgctacagcccaattttgaggcagcttttgggacaacgccttcaacttccagcagcagctcctttgatccatcagtgtttgatggtctaggtgatcttttgatgccaaccatggcaccagctgggcagcctgcacctgtctcaatggtaccacccagtcctgcaatggcagccagcaaagcccttggaagtgatcttgattcatctcttgccagcttagtaggcaatcttggaatttctggtaccacaacaaaaaagggagatcttcagtggaatgctggagagaaaaagttgactggtggagccaactggcagcctaaagtagctccagcaacctggtcagcaggcgttccaccaagtgcacctttgcaaggagctgtacctccaaccagttcagttcctcctgttgccggggccccatcggttggacaacctggagcaggatttggaatgcctcctgctgggacaggcatgcccatgatgcctcagcagccggtcatgtttgcacagcccatgatgaggcccccctttggagctgccgctgtacctggcacgcagctttctccaagccctacacctgccagtcagagtcccaagaaacctccagcaaaggacccattagcggatcttaacatcaaggatttcttgtaaacaatttaagctgcaatatttgtgactgaataggaaaataaatgagtttggagacttcaaataagattgatgctgagtttcaaagggagccaccagtaccaaacccaatacttactcataacttctcttccaaaatgtgtaacacagccgtgaaagtgaacattaggaatatgtactaccttagctgttatccctactcttgaaattgtagtgtatttggattatttgtgtattgtacgatgtaaacaatgaatggatgttactgatgccgttagtgcttttttggacttcacctgaggacagatgatgcagctgttgtgtggcgagctatttggaaagacgtctgtgtttttgaaggtttcaatgtacatataacttttgaacaaaccccaaactcttcccataaattatcttttcttctgtatctctgttacaagcgtagtgtgataataccagataataaggaaaacactcataaatatacaaaactttttcagtgtggagtacatttttccaatcacaggaacttcaactgttgtgagaaatgtttatttttgtggcactgtatatgttaagaaattttattttaaaaaatataaaggttaacgtccataataaatacttctctttgaagctaccttatcaagaacgaaaaatcgtatgggaagaatcccctatttatcactgctatattaaaatatatatattttaattatatttgacaggttttgcatctaaattgacctatttattcattcttgattaaatgcactgaaaagtaaagggtctgtttgtgtcatgttcatgaaaatgcggttagagaggtgctattcaagtgattctgaaggcaccccaaggtatatctgtaatttaaagattactgcaaatatctttactttactgtgggtttttagtacatctgttaatttagtgtttctttgtgtgttttgtagactagtgttcttccatccttcaactgagctcaaagtaggttttgttgtaacattgtgattaggatttaaactaattcagagaattgtatcttttactgtacatactgtattctttaagttttaatttgttgtcatactgtctgtgctgatggcttggcttaagattttgatgcataaatgaggtcactgttgatcagtgttgctagtagcttggcagctcttcataaaagcatattgggttggaaaggtgtttgcctatttttcaaattatttaatagatgtatggtaccatttaaaagtggttgtatctgaatttactgtggggataacatacactgtaatggggaaaaattacctaaaaccaatttcaaaatggctttctttgtatttcagtttaaaaacccagtgcatgtacgccctctgagatgcaataaacaccttgaacaaagaaa

SEQ ID NO: 188119 - DNA, 4136 bp, Homo sapiens
  Payload ID: 17021
  Gene Symbol: SNAP91
  Gene Name: synaptosomal-associated protein, 91kDa
  Uniprot ID: O60641
  ENST ID: ENST00000520302
  CDS Start-End: 98-2731
gtgcgtgccgggtgcggcgccagcagcggaggggcggcccggcgcccagcggagagccgctggctggaagaggaggcggtagacgcgaccacagaagatgtcgggccaaacgctcacggatcggatcgccgccgctcagtacagcgttacaggctctgctgtagcaagagcggtctgcaaagccactactcatgaagtaatgggccccaagaaaaagcacctggactatttgatccaggctaccaacgagaccaatgttaatattcctcagatggccgacactctctttgagcgggcaacaaacagtagctgggtggttgtgtttaaggctttagtgacaacacatcatctcatggtgcatggaaatgagagatttattcaatatttggcttctagaaatacactattcaatctcagcaattttttggacaaaagtggatcccatggttatgatatgtctaccttcataaggcgctatagtagatatttgaatgaaaaggctttttcttacagacagatggcctttgattttgccagggtgaagaaaggggccgatggtgtaatgaggacaatggctcccgaaaagctgctaaagagtatgccaatactacagggacaaattgatgcactgcttgaatttgatgtgcatccaaatgaactaacaaatggtgtcataaatgcagcatttatgcttcttttcaaagatcttatcaaactttttgcttgctacaatgatggtgttattaacttactcgaaaagttttttgaaatgaagaaaggacaatgtaaagatgctctagaaatttacaaacgatttctaactagaatgacacgagtgtctgaatttctcaaggttgcagagcaagttggtattgataaaggtgacattcctgacctcacacaggctcccagcagtcttatggagacgcttgaacagcatctaaatacattagaaggaaagaaacctggaaacaaatctggtgctccctctccattaagtaagtcttctccagccacaactgttacgtctcctaattctacaccagctaaaactattgacacatccccaccggttgatttatttgcaactgcatctgcggctgtcccagtcagcacttctaaaccatctagtgatctcctggacctccagccagacttttcctctggaggggcagcagcagccgcagcaccagcaccaccaccacctgctggaggagccactgcatggggagaccttttgggagaggattctttggctgcactttcctctgttccctctgaagcacagatttcagatccatttgcaccagaacctacccctcctactacaactgctgaaattgcaactgcctcagcttctgcctccactactacaactgttactgctgtcactgctgaagtggatctctttggagatgcctttgcagcttctcctggggaggcccctgcagcatccgaaggggccgccgcaccagctaccccaacccctgtagcagcagcacttgatgcatgttcaggaaatgacccctttgccccgtctgaaggtagtgcagaggctgcacctgagctggacctctttgcaatgaagccacctgagaccagtgttcctgtagttacccctacagctagcacagcccctccagttcccgcaactgctccttctcctgctcctgccgttgcagctgctgctgctgccactactgctgccaccgccgctgccaccaccactaccaccacctccgctgccaccgccaccactgctcctcctgctctagatatctttggtgatttatttgagtccactcctgaagttgctgcagcgcctaagccagatgctgctcctagcatagacctgtttagtacagatgctttctcctctccaccacaaggggcctctcctgtgcctgagagttctctcactgctgacctcttatctgatgcatttggaagtagtgcttctgaaccccaacctgcatctcaggctgcttctagttcatcagcatcggcagacctactagctggatttgggggttctttcatggcgccttccccatctccagtgactccagctcagaataacctgctacagcccaattttgaggcagcttttgggacaacgccttcaacttccagcagcagctcctttgatccatcagtgtttgatggtctaggtgatcttttgatgccaaccatggcaccagctgggcagcctgcacctgtctcaatggtaccacccagtcctgcaatggcagccagcaaagcccttggaagtgatcttgattcatctcttgccagcttagtaggcaatcttggaatttctggtaccacaacaaaaaagggagatcttcagtggaatgctggagagaaaaagttgactggtggagccaactggcagcctaaagtagctccagcaacctggtcagcaggcgttccaccaagtgcacctttgcaaggagctgtacctccaaccagttcagttcctcctgttgccggggccccatcggttggacaacctggagcaggatttggaatgcctcctgctgggacaggcatgcccatgatgcctcagcagccggtcatgtttgcacagcccatgatgaggcccccctttggagctgccgctgtacctggcacgcagctttctccaagccctacacctgccagtcagagtcccaagaaacctccagcaaaggacccattagcggatcttaacatcaaggatttcttgtaaacaatttaagctgcaatatttgtgactgaataggaaaataaatgagtttggagacttcaaataagattgatgctgagtttcaaagggagccaccagtaccaaacccaatacttactcataacttctcttccaaaatgtgtaacacagccgtgaaagtgaacattaggaatatgtactaccttagctgttatccctactcttgaaattgtagtgtatttggattatttgtgtattgtacgatgtaaacaatgaatggatgttactgatgccgttagtgcttttttggacttcacctgaggacagatgatgcagctgttgtgtggcgagctatttggaaagacgtctgtgtttttgaaggtttcaatgtacatataacttttgaacaaaccccaaactcttcccataaattatcttttcttctgtatctctgttacaagcgtagtgtgataataccagataataaggaaaacactcataaatatacaaaactttttcagtgtggagtacatttttccaatcacaggaacttcaactgttgtgagaaatgtttatttttgtggcactgtatatgttaagaaattttattttaaaaaatataaaggttaacgtccataataaatacttctctttgaagctaccttatcaagaacgaaaaatcgtatgggaagaatcccctatttatcactgctatattaaaatatatatattttaattatatttgacaggttttgcatctaaattgacctatttattcattcttgattaaatgcactgaaaagtaaagggtctgtttgtgtcatgttcatgaaaatgcggttagagaggtgctattcaagtgattctgaaggcaccccaaggtatatctgtaatttaaagattactgcaaatatctttactttactgtgggtttttagtacatctgttaatttagtgtttctttgtgtgttttgtagactagtgttcttccatccttcaactgagctcaaagtaggttttgttgtaacattgtgattaggatttaaactaattcagagaattgtatcttttactgtacatactgtattctttaagttttaatttgttgtcatactgtctgtgctgatggcttggcttaagattttgatgcataaatgaggtcactgttgatcagtgttgctagtagcttggcagctcttcataaaagcatattgggttggaaaggtgtttgcctatttttcaaattatttaatagatgtatggtaccatttaaaagtggttgtatctgaatttactgtggggataacatacactgtaatggggaaaaattacctaaaaccaatttcaaaatggctttctttgtatttcagtttaaaaacccagtgcatgtacgccctctgagatgcaataaacaccttgaacaaagaaa

SEQ ID NO: 188120 - DNA, 482 bp, Homo sapiens
  Payload ID: 17021
  Gene Symbol: SNAP91
  Gene Name: synaptosomal-associated protein, 91kDa
  ENST ID: ENST00000523199
  CDS Start-End: 75-251
gggctccgctcatcctgcggcgggcggcgccgctcaggggcgggaagaggaggcggtagacgcgaccacagaagatgtcgggccaaacgctcacggatcggatcgccgccgctcagtacagcgttacaggctctgctgtagcaagagcggtctgcaaagccactactcatgaagtaatgggccccaagaaaaagcacctggactacctacaaaccttctttcaacaagtgcttcctaattttgagatctgaaagtatgttccagcatcttttgagtcatacaaccaaagtatgaggagatcacaagtcttttaaaaagttgtgctaaaggagaaatacttcagaaatatgttacatttgttttggatcacagtattatttatttctcaagaagagatttgttcatcatagtagtattaattatggaatgaagggagcaccatcatactgaatttgaattaatttttactaggctttatagaa

SEQ ID NO: 188121 - DNA, 842 bp, Homo sapiens
  Payload ID: 17021
  Gene Symbol: SNAP91
  Gene Name: synaptosomal-associated protein, 91kDa
  ENST ID: ENST00000519779
  CDS Start-End: 386-842
caggggcggtgggcgccgggaccgcggagctgaggagcggggcccggccagggctggagactttgcgcccgggggcaccggggctacgcgcggtcgcacacatccaccggcgcggcttccctcggcggcccgggctccgctcatcctgcggcgggcggcgccgctcaggggcggggtgagtacccgcggccgtactcggccccctccccgcgccagggtctcgcggggatccgcagaggataatcccagggtgcggagaagggcagcggccgagtgacagctccgcggagcgctccagggcgggcgggggactgggcttcgctgtcagcccggctcctctccaaagccaggaaggaagaggaggcggtagacgcgaccacagaagatgtcgggccaaacgctcacggatcggatcgccgccgctcagtacagcgttacaggctctgctgtagcaagagcggtctgcaaagccactactcatgaagtaatgggccccaagaaaaagcacctggactatttgatccaggctaccaacgagaccaatgttaatattcctcagatggccgacactctctttgagcgggcaacaaacagtagctgggtggttgtgtttaaggctttagtgacaacacatcatctcatggtgcatggaaatgagagatttattcaatatttggcttctagaaatacactattcaatctcagcaattttttggacaaaagtggatcccatggttatgatatgtctaccttcataaggcgctatagtagatatttgaatgaaaaggctttttcttacagacagatggcctttgattttgccagggtgaagaaaggggccg

SEQ ID NO: 188122 - DNA, 542 bp, Homo sapiens
  Payload ID: 17021
  Gene Symbol: SNAP91
  Gene Name: synaptosomal-associated protein, 91kDa
  ENST ID: ENST00000522248
  CDS Start-End: 66-428
tcatcctgcggcgggcggcgccgctcaggggcgggaagaggaggcggtagacgcgaccacagaagatgtcgggccaaacgctcacggatcggatcgccgccgctcagtacagcgttacaggctctgctgtagcaagagcggtctgcaaagccactactcatgaagtaatgggccccaagaaaaagcacctggactatttgatccaggctaccaacgagaccaatgttaatattcctcagatggccgacactctctttgagcgggcaacaaacagtagctgggtggttgtgtttaaggctttagtgacaacacatcatctcatggtgcatggaaatgagagatttattcaatatttggcttctagaaatacactattcaatctcagcaattttttggacaaaagtggatcccatgggccgatggtgtaatgaggacaatggctcccgaaaagctgctaaagagtatgccaatactacagggacaaattgatgcactgcttgaatttgatgtgcatccaaatgaactaacaaatggtgtcataa

SEQ ID NO: 188123 - DNA, 4521 bp, Homo sapiens
  Payload ID: 17021
  Gene Symbol: SNAP91
  Gene Name: synaptosomal-associated protein, 91kDa
  ENST ID: ENST00000521485
  CDS Start-End: 397-3105
gagacaagcggaggagcctgaggagctgaagacgcacaggtgacggtcgcggatggccggcaggatctgacatttaaaatcgccctgctcatctgggcctcggagcctttgacaggcgggcgtgtcagcgacagtgtggggaaggggctgggctccgccaggcagcgcgcgacgacgcccttgccttggccttcacagagtagaacccgagaagcccactcgcccgtcttggccaacgcccccaacgcccagggctccccccgcagtcggcgggcaggtgtgcgtggtgcgcgagcccagtgcgtgccgggtgcggcgccagcagcggaggggcggcccggcgcccagcggagagccgctggctggaagaggaggcggtagacgcgaccacagaagatgtcgggccaaacgctcacggatcggatcgccgccgctcagtacagcgttacaggctctgctgtagcaagagcggtctgcaaagccactactcatgaagtaatgggccccaagaaaaagcacctggactatttgatccaggctaccaacgagaccaatgttaatattcctcagatggccgacactctctttgagcgggcaacaaacagtagctgggtggttgtgtttaaggctttagtgacaacacatcatctcatggtgcatggaaatgagagatttattcaatatttggcttctagaaatacactattcaatctcagcaattttttggacaaaagtggatcccatggttatgatatgtctaccttcataaggcgctatagtagatatttgaatgaaaaggctttttcttacagacagatggcctttgattttgccagggtgaagaaaggggccgatggtgtaatgaggacaatggctcccgaaaagctgctaaagagtatgccaatactacagggacaaattgatgcactgcttgaatttgatgtgcatccaaatgaactaacaaatggtgtcataaatgcagcatttatgcttcttttcaaagatcttatcaaactttttgcttgctacaatgatggtgttattaacttactcgaaaagttttttgaaatgaagaaaggacaatgtaaagatgctctagaaatttacaaacgatttctaactagaatgacacgagtgtctgaatttctcaaggttgcagagcaagttggtattgataaaggtgacattcctgacctcacacaggctcccagcagtcttatggagacgcttgaacagcatctaaatacattagaaggaaagaaacctggaaacaatgaaggatctggtgctccctctccattaagtaagtcttctccagccacaactgttacgtctcctaattctacaccagctaaaactattgacacatccccaccggttgatttatttgcaactgcatctgcggctgtcccagtcagcacttctaaaccatctagtgatctcctggacctccagccagacttttcctctggaggggcagcagcagccgcagcaccagcaccaccaccacctgctggaggagccactgcatggggagaccttttgggagaggattctttggctgcactttcctctgttccctctgaagcacagatttcagatccatttgcaccagaacctacccctcctactacaactgctgaaattgcaactgcctcagcttctgcctccactactacaactgttactgctgtcactgctgaagtggatctctttggagatgcctttgcagcttctcctggggaggcccctgcagcatccgaaggggccgccgcaccagctaccccaacccctgtagcagcagcacttgatgcatgttcaggaaatgacccctttgccccgtctgaaggtagtgcagaggctgcacctgagctggacctctttgcaatgaagccacctgagaccagtgttcctgtagttacccctacagctagcacagcccctccagttcccgcaactgctccttctcctgctcctgccgttgcagctgctgctgctgccactactgctgccaccgccgctgccaccaccactaccaccacctccgctgccaccgccaccactgctcctcctgctctagatatctttggtgatttatttgagtccactcctgaagttgctgcagcgcctaagccagatgctgctcctagcatagacctgtttagtacagatgctttctcctctccaccacaaggggcctctcctgtgcctgagagttctctcactgctgacctcttatctgtggatgcatttgcagcaccatctcctgcaaccactgcctcgccagcaaaggtggattcttcaggtgtcatagacctttttggggatgcatttggaagtagtgcttctgaaccccaacctgcatctcaggctgcttctagttcatcagcatcggcagacctactagctggatttgggggttctttcatggcgccttccccatctccagtgactccagctcagaataacctgctacagcccaattttgaggcagcttttgggacaacgccttcaacttccagcagcagctcctttgatccatcaggtgatcttttgatgccaaccatggcaccagctgggcagcctgcacctgtctcaatggtaccacccagtcctgcaatggcagccagcaaagcccttggaagtgatcttgattcatctcttgccagcttagtaggcaatcttggaatttctggtaccacaacaaaaaagggagatcttcagtggaatgctggagagaaaaagttgactggtggagccaactggcagcctaaagtagctccagcaacctggtcagcaggcgttccaccaagtgcacctttgcaaggagctgtacctccaaccagttcagttcctcctgttgccggggccccatcggttggacaacctggagcaggatttggaatgcctcctgctgggacaggcatgcccatgatgcctcagcagccggtcatgtttgcacagcccatgatgaggcccccctttggagctgccgctgtacctggcacgcagctttctccaagccctacacctgccagtcagagtcccaagaaacctccagcaaaggacccattagcggatcttaacatcaaggatttcttgtaaacaatttaagctgcaatatttgtgactgaataggaaaataaatgagtttggagacttcaaataagattgatgctgagtttcaaagggagccaccagtaccaaacccaatacttactcataacttctcttccaaaatgtgtaacacagccgtgaaagtgaacattaggaatatgtactaccttagctgttatccctactcttgaaattgtagtgtatttggattatttgtgtattgtacgatgtaaacaatgaatggatgttactgatgccgttagtgcttttttggacttcacctgaggacagatgatgcagctgttgtgtggcgagctatttggaaagacgtctgtgtttttgaaggtttcaatgtacatataacttttgaacaaaccccaaactcttcccataaattatcttttcttctgtatctctgttacaagcgtagtgtgataataccagataataaggaaaacactcataaatatacaaaactttttcagtgtggagtacatttttccaatcacaggaacttcaactgttgtgagaaatgtttatttttgtggcactgtatatgttaagaaattttattttaaaaaatataaaggttaacgtccataataaatacttctctttgaagctaccttatcaagaacgaaaaatcgtatgggaagaatcccctatttatcactgctatattaaaatatatatattttaattatatttgacaggttttgcatctaaattgacctatttattcattcttgattaaatgcactgaaaagtaaagggtctgtttgtgtcatgttcatgaaaatgcggttagagaggtgctattcaagtgattctgaaggcaccccaaggtatatctgtaatttaaagattactgcaaatatctttactttactgtgggtttttagtacatctgttaatttagtgtttctttgtgtgttttgtagactagtgttcttccatccttcaactgagctcaaagtaggttttgttgtaacattgtgattaggatttaaactaattcagagaattgtatcttttactgtacatactgtattctttaagttttaatttgttgtcatactgtctgtgctgatggcttggcttaagattttgatgcataaatgaggtcactgttgatcagtgttgctagtagcttggcagctcttcataaaagcatattgggttggaaaggtgtttgcctatttttcaaattatttaatagatgtatggtaccatttaaaagtggttgtatctgaatttactgtggggataacatacactgtaatggggaaaaattacctaaaaccaatttcaaaatggctttctttgtatttcagtttaaaaacccagtgcatgtacgccctctgagatgcaataaacaccttgaacaaagaaatgcaaacataa

SEQ ID NO: 188124 - DNA, 4493 bp, Homo sapiens
  Payload ID: 17021
  Gene Symbol: SNAP91
  Gene Name: synaptosomal-associated protein, 91kDa
  ENST ID: ENST00000518312
  CDS Start-End: 101-277
ccagtgcgtgccgggtgcggcgccagcagcggaggggcggcccggcgcccagcggagagccgctggctggaagaggaggcggtagacgcgaccacagaagatgtcgggccaaacgctcacggatcggatcgccgccgctcagtacagcgttacaggctctgctgtagcaagagcggtctgcaaagccactactcatgaagtaatgggccccaagaaaaagcacctggactacctacaaaccttctttcaacaagtgcttcctaattttgagatctgaaagtatgttccagcatcttttgagtcatacaaccaaagtatgaggagatcacaagtcttttaaaaagttgtgctaaaggagaaatacttcagaaatatgttacatttgttttggatcacagtattatttatttctcaagaagagatttgttcatcatagtagtattagcccggtgcaggaagaactcaagtaaaagacaagaaaaaacaaaaaacagtgttgattgtgggatattaaggaaggctagaatttaagcaactgagtaaagtaaaatgatgtactgagaactaaagttgtattccttggtacttccgagagaaaacagacttggatttttattggatgattcctcctaggaagtaagatgagggcgttcaagaataataacaatttgatccaggctaccaacgagaccaatgttaatattcctcagatggccgacactctctttgagcgggcaacaaacagtagctgggtggttgtgtttaaggctttagtgacaacacatcatctcatggtgcatggaaatgagagatttattcaatatttggcttctagaaatacactattcaatctcagcaattttttggacaaaagtggatcccatggttatgatatgtctaccttcataaggcgctatagtagatatttgaatgaaaaggctttttcttacagacagatggcctttgattttgccagggtgaagaaaggggccgatggtgtaatgaggacaatggctcccgaaaagctgctaaagagtatgccaatactacagggacaaattgatgcactgcttgaatttgatgtgcatccaaatgaactaacaaatggtgtcataaatgcagcatttatgcttcttttcaaagatcttatcaaactttttgcttgctacaatgatggtgttattaacttactcgaaaagttttttgaaatgaagaaaggacaatgtaaagatgctctagaaatttacaaacgatttctaactagaatgacacgagtgtctgaatttctcaaggttgcagagcaagttggtattgataaaggtgacattcctgacctcacacaggctcccagcagtcttatggagacgcttgaacagcatctaaatacattagaaggaaagaaacctggaaacaaatctggtgctccctctccattaagtaagtcttctccagccacaactgttacgtctcctaattctacaccagctaaaactattgacacatccccaccggttgatttatttgcaactgcatctgcggctgtcccagtcagcacttctaaaccatctagtgatctcctggacctccagccagacttttcctctggaggggcagcagcagccgcagcaccagcaccaccaccacctgctggaggagccactgcatggggagaccttttgggagaggattctttggctgcactttcctctgttccctctgaagcacagatttcagatccatttgcaccagaacctacccctcctactacaactgctgaaattgcaactgcctcagcttctgcctccactactacaactgttactgctgtcactgctgaagtggatctctttggagatgcctttgcagcttctcctggggaggcccctgcagcatccgaaggggccgccgcaccagctaccccaacccctgtagcagcagcacttgatgcatgttcaggaaatgacccctttgccccgtctgaaggtagtgcagaggctgcacctgagctggacctctttgcaatgaagccacctgagaccagtgttcctgtagttacccctacagctagcacagcccctccagttcccgcaactgctccttctcctgctcctgccgttgcagctgctgctgctgccactactgctgccaccgccgctgccaccaccactaccaccacctccgctgccaccgccaccactgctcctcctgctctagatatctttggtgatgctttctcctctccaccacaaggggcctctcctgtgcctgagagttctctcactgctgacctcttatctgatgcatttggaagtagtgcttctgaaccccaacctgcatctcaggctgcttctagttcatcagcatcggcagacctactagctggatttgggggttctttcatggcgccttccccatctccagtgactccagctcagaataacctgctacagcccaattttgaggcagcttttgggacaacgccttcaacttccagcagcagctcctttgatccatcagtgtttgatggtctaggtgatcttttgatgccaaccatggcaccagctgggcagcctgcacctgtctcaatggtaccacccagtcctgcaatggcagccagcaaagcccttggaagtgatcttgattcatctcttgccagcttagtaggcaatcttggaatttctggtaccacaacaaaaaagggagatcttcagtggaatgctggagagaaaaagttgactggtggagccaactggcagcctaaagtagctccagcaacctggtcagcaggcgttccaccaagtgcacctttgcaaggagctgtacctccaaccagttcagttcctcctgttgccggggccccatcggttggacaacctggagcaggatttggaatgcctcctgctgggacaggcatgcccatgatgcctcagcagccggtcatgtttgcacagcccatgatgaggcccccctttggagctgccgctgtacctggcacgcagctttctccaagccctacacctgccagtcagagtcccaagaaacctccagcaaaggacccattagcggatcttaacatcaaggatttcttgtaaacaatttaagctgcaatatttgtgactgaataggaaaataaatgagtttggagacttcaaataagattgatgctgagtttcaaagggagccaccagtaccaaacccaatacttactcataacttctcttccaaaatgtgtaacacagccgtgaaagtgaacattaggaatatgtactaccttagctgttatccctactcttgaaattgtagtgtatttggattatttgtgtattgtacgatgtaaacaatgaatggatgttactgatgccgttagtgcttttttggacttcacctgaggacagatgatgcagctgttgtgtggcgagctatttggaaagacgtctgtgtttttgaaggtttcaatgtacatataacttttgaacaaaccccaaactcttcccataaattatcttttcttctgtatctctgttacaagcgtagtgtgataataccagataataaggaaaacactcataaatatacaaaactttttcagtgtggagtacatttttccaatcacaggaacttcaactgttgtgagaaatgtttatttttgtggcactgtatatgttaagaaattttattttaaaaaatataaaggttaacgtccataataaatacttctctttgaagctaccttatcaagaacgaaaaatcgtatgggaagaatcccctatttatcactgctatattaaaatatatatattttaattatatttgacaggttttgcatctaaattgacctatttattcattcttgattaaatgcactgaaaagtaaagggtctgtttgtgtcatgttcatgaaaatgcggttagagaggtgctattcaagtgattctgaaggcaccccaaggtatatctgtaatttaaagattactgcaaatatctttactttactgtgggtttttagtacatctgttaatttagtgtttctttgtgtgttttgtagactagtgttcttccatccttcaactgagctcaaagtaggttttgttgtaacattgtgattaggatttaaactaattcagagaattgtatcttttactgtacatactgtattctttaagttttaatttgttgtcatactgtctgtgctgatggcttggcttaagattttgatgcataaatgaggtcactgttgatcagtgttgctagtagcttggcagctcttcataaaagcatattgggttggaaaggtgtttgcctatttttcaaattatttaatagatgtatggtaccatttaaaagtggttgtatctgaatttactgtggggataacatacactgtaatggggaaaaattacctaaaaccaatttcaaaatggctttctttgtatttcagtttaaaaacccagtgcatgtacgccctctgagatgcaataaacaccttgaacaaa

SEQ ID NO: 188125 - DNA, 564 bp, Homo sapiens
  Payload ID: 17021
  Gene Symbol: SNAP91
  Gene Name: synaptosomal-associated protein, 91kDa
  ENST ID: ENST00000523585
  CDS Start-End: 87-263
gtgcggcgccagcagcggaggggcggcccggcgcccagcggagagccgctggctggaagaggaggcggtagacgcgaccacagaagatgtcgggccaaacgctcacggatcggatcgccgccgctcagtacagcgttacaggctctgctgtagcaagagcggtctgcaaagccactactcatgaagtaatgggccccaagaaaaagcacctggactacctacaaaccttctttcaacaagtgcttcctaattttgagatctgaaagtatgttccagcatcttttgagtcatacaaccaaagtatgaggagatcacaagtcttttaaaaagttgtgctaaaggagaaatacttcagaaatatgttacatttgttttggatcacagtattatttatttctcaagaagagatttgttcatcatagtagtattagcccggtgcaggaagaactcaagtaaaagacaagaaaaaacaaaaaacagtgttgattgtgggatattaaggaaggctagaatttaagcaactgaggtaaaagcagagtatgttccaggttcacaacaaacatt

SEQ ID NO: 188126 - DNA, 1745 bp, Homo sapiens
  Payload ID: 17021
  Gene Symbol: SNAP91
  Gene Name: synaptosomal-associated protein, 91kDa
  ENST ID: ENST00000521931
  CDS Start-End: 1-1745
atgtcgggccaaacgctcacggatcggatcgccgccgctcagtacagcgttacaggctctgctgtagcaagagcggtctgcaaagccactactcatgaagtaatgggccccaagaaaaagcacctggactatttgatccaggctaccaacgagaccaatgttaatattcctcagatggccgacactctctttgagcgggcaacaaacagtagctgggtggttgtgtttaaggctttagtgacaacacatcatctcatggtgcatggaaatgagagatttattcaatatttggcttctagaaatacactattcaatctcagcaattttttggacaaaagtggatcccatggttatgatatgtctaccttcataaggcgctatagtagatatttgaatgaaaaggctttttcttacagacagatggcctttgattttgccagggtgaagaaaggggccgatggtgtaatgaggacaatggctcccgaaaagctgctaaagagtatgccaatactacagggacaaattgatgcactgcttgaatttgatgtgcatccaaatgaactaacaaatggtgtcataaatgcagcatttatgcttcttttcaaagatcttatcaaactttttgcttgctacaatgatggtgttattaacttactcgaaaagttttttgaaatgaagaaaggacaatgtaaagatgctctagaaatttacaaacgatttctaactagaatgacacgagtgtctgaatttctcaaggttgcagagcaagttggtattgataaaggtgacattcctgacctcacacaggctcccagcagtcttatggagacgcttgaacagcatctaaatacattagaaggaaagaaacctggaaacaaatctggtgctccctctccattaagtaagtcttctccagccacaactgttacgtctcctaattctacaccagctaaaactattgacacatccccaccggttgatttatttgcaactgcatctgcggctgtcccagtcagcacttctaaaccatctagtgatctcctggacctccagccagacttttcctctggaggggcagcagcagccgcagcaccagcaccaccaccacctgctggaggagccactgcatggggagatttatttgagtccactcctgaagttgctgcagcgcctaagccagatgctgctcctagcatagacctgtttagtacagatgctttctcctctccaccacaaggggcctctcctgtgcctgagagttctctcactgctgacctcttatctgtggatgcatttgcagcaccatctcctgcaaccactgcctcgccagcaaaggtggattcttcaggtgtcatagacctttttggggatgcatttggaagtagtgcttctgaaccccaacctgcatctcaggctgcttctagttcatcagcatcggcagacctactagctggatttgggggttctttcatggcgccttccccatctccagtgactccagctcagaataacctgctacagcccaattttgaggcagcttttgggacaacgccttcaacttccagcagcagctcctttgatccatcagtgtttgatggtctaggtgatcttttgatgccaaccatggcaccagctgggcagcctgcacctgtctcaatggtaccacccagtcctgcaatggcagccagcaaagcccttggaagtgatcttgattcatctcttgccagcttagtaggcaatcttgg

SEQ ID NO: 188127 - DNA, 889 bp, Homo sapiens
  Payload ID: 17021
  Gene Symbol: SNAP91
  Gene Name: synaptosomal-associated protein, 91kDa
  ENST ID: ENST00000523448
  CDS Start-End: 1-669
gtgcctgagagttctctcactgctgacctcttatctggatttgggggttctttcatggcgccttccccatctccagtgactccagctcagaataacctgctacagcccaattttgaggcagcttttgggacaacgccttcaacttccagcagcagctcctttgatccatcagtgtttgatggtctaggtgatcttttgatgccaaccatggcaccagctgggcagcctgcacctgtctcaatggtaccacccagtcctgcaatggcagccagcaaagcccttggaagtgatcttgattcatctcttgccagcttagtaggcaatcttggaatttctggtaccacaacaaaaaagggagatcttcagtggaatgctggagagaaaaagttgactggtggagccaactggcagcctaaagtagctccagcaacctggtcagcaggcgttccaccaagtgcacctttgcaaggagctgtacctccaaccagttcagttcctcctgttgccggggccccatcggttggacaacctggagcaggatttggaatgcctcctgctgggacaggcatgcccatgatgcctcagcagccggtcatgtttgcacagcccatgatgaggcccccctttggagctgccgctgtacctggcacgcagctgcaatatttgtgactgaataggaaaataaatgagtttggagacttcaaataagattgatgctgagtttcaaagggagccaccagtaccaaacccaatacttactcataacttctcttccaaaatgtgtaacacagccgtgaaagtgaacattaggaatatgtactaccttagctgttatccctactcttgaaattgtagtgtatttggattatttgtgtattgtacgatgtaa

SEQ ID NO: 188128 - DNA, 591 bp, Homo sapiens
  Payload ID: 17021
  Gene Symbol: SNAP91
  Gene Name: synaptosomal-associated protein, 91kDa
  ENST ID: ENST00000518309
  CDS Start-End: 140-591
atgctgcgactggagcccacgctggggttccgtgacggccctactcacggccaagactccctggaccgcatcgcaggagcggggcttggcgcgttgctggctccgagagaagaggaggcggtagacgcgaccacagaagatgtcgggccaaacgctcacggatcggatcgccgccgctcagtacagcgttacaggctctgctgtagcaagagcggtctgcaaagccactactcatgaagtaatgggccccaagaaaaagcacctggactatttgatccaggctaccaacgagaccaatgttaatattcctcagatggccgacactctctttgagcgggcaacaaacagtagctgggtggttgtgtttaaggctttagtgacaacacatcatctcatggtgcatggaaatgagagatttattcaatatttggcttctagaaatacactattcaatctcagcaattttttggacaaaagtggatcccatggttatgatatgtctaccttcataaggcgctatagtagatatttgaatgaaaaggctttttcttacagacagatggcctttgattttgccagggtgaagaaagg

SEQ ID NO: 188129 - DNA, 525 bp, Homo sapiens
  Payload ID: 17021
  Gene Symbol: SNAP91
  Gene Name: synaptosomal-associated protein, 91kDa
  ENST ID: ENST00000519825
  CDS Start-End: 328-525
ggggactgggcttcgctgtcagcccggctcctctccaaagccaggaagggtgaggcgccccaagactccggcgcctccgcagagctcccgggcggcccctgcggcagggatttggaaccggggggaaggggcccgggcgatgggcctcggcgaggctttggagccggcggcgaggaaggaaggggaggcgagggcataacatggcgcaacgctaggataatctccttcgcgactgagggaggacgagccctttgctgcagcagcgcgaggaggaggagggaggcagccagggcttggaagaggaggcggtagacgcgaccacagaagatgtcgggccaaacgctcacggatcggatcgccgccgctcagtacagcgttacaggctctgctgtagcaagagcggtctgcaaagccactactcatgaagtaatgggccccaagaaaaagcacctggactatttgatccaggctaccaacgagaccaatgttaatattcctcagatggccgacactctctttgagcgg

SEQ ID NO: 188130 - DNA, 6449 bp, Homo sapiens
  Payload ID: 17022
  Gene Symbol: SYNCRIP
  Gene Name: synaptotagmin binding, cytoplasmic RNA interacting protein
  Uniprot ID: O60506
  ENST ID: ENST00000355238
  CDS Start-End: 208-1896
cgcgggggcgcgcgcgcgcaccgggagcgcgctcggaggcgagtggaactggatcgggtttgctgccagcggcgtgagcttcggccgccattttacaacagctccactcgcgccggacacagggagcagcgagcacgcgtttcccgcaacccgataccatcggacaggatttctccgcctcagcccaacggggagatctctggaaacatggctacagaacatgttaatggaaatggtactgaagagcccatggatactacttctgcagttatccattcagaaaattttcagacattgcttgatgctggtttaccacagaaagttgctgaaaaactagatgaaatttacgttgcagggctagttgcacatagtgatttagatgaaagagctattgaagctttaaaagaattcaatgaagacggtgcattggcagttcttcaacagtttaaagacagtgatctctctcatgttcagaacaaaagtgcctttttatgtggagtcatgaagacttacaggcagagagaaaaacaagggaccaaagtagcagattctagtaaaggaccagatgaggcaaaaattaaggcactcttggaaagaacaggctacacacttgatgtgaccactggacagaggaagtatggaggaccacctccagattccgtttattcaggtcagcagccttctgttggcactgagatatttgtgggaaagatcccaagagatctatttgaggatgaacttgttccattatttgagaaagctggacctatatgggatcttcgtctaatgatggatccactcactggtctcaatagaggttatgcgtttgtcactttttgtacaaaagaagcagctcaggaggctgttaaactgtataataatcatgaaattcgttctggaaaacatattggtgtctgcatctcagttgccaacaataggctttttgtgggctctattcctaagagtaaaaccaaggaacagattcttgaagaatttagcaaagtaacagagggtcttacagacgtcattttataccaccaaccggatgacaagaaaaaaaacagaggcttttgctttcttgaatatgaagatcacaaaacagctgcccaggcaaggcgtaggttaatgagtggtaaagtcaaggtctgggggaatgttggaactgttgaatgggctgatcctatagaagatcctgatcctgaggttatggcaaaggtaaaagtgctgtttgtacgcaaccttgccaatactgtaacagaagagattttagaaaaggcatttagtcagtttgggaaactggaacgagtgaagaagttaaaagattatgcgttcattcattttgatgagcgagatggtgctgtcaaggctatggaagaaatgaatggcaaagacttggagggagaaaatattgaaattgtttttgccaagccaccagatcagaaaaggaaagaaagaaaagctcagaggcaagcagcaaaaaatcaaatgtatgacgattactactattatggtccacctcatatgccccctccaacaagaggtcgagggcgtggaggtagaggtggttatggatatcctccagattattatggatatgaagattattatgattattatggttatgattaccataactatcgtggtggatatgaagatccatactatggttatgaagattttcaagttggagctagaggaaggggtggtagaggagcaaggggtgctgctccatccagaggtcgtggggctgctcctccccgcggtagagccggttattcacagagaggaggtcctggatcagcaagaggcgttcgaggtgcgagaggaggtgcccaacaacaaagaggccgcgggcagggaaaaggggtcgaggccggtcctgacctgttacaatgaagactgacttgctatgtgggattacaccagaagcttgcagtggagtaatggtaaggaaatcaagcaaccttaaatatgtcggctgtataggagcatattctattgcagaagaccttcctatgaagatcatggaatcaaatacgggacattgaactaatacttggactttgatatgaatttctttaacaattttctctgcagtgcaagttattaaactaaagctactctattttcaaaatgtgttccaacagaaatccttcataactcctagcatggtatcttaataaagaataaagttcttttaaaaatctgctctaagtagatttttccccttttttaaattaaggatcccaacagtggtattttgaaatattctcttgaatttgtgcatttaaattttattgcagtggtatagatgaatgccactgatggtatccttaaattttatttctgctcaccaaggttaatcatgattgtctatatcttttttatagtgatcacttttgaattgtgttcagatatgcagtttcaggtgtaatcatcagagctggttagtcaggcattccagatagtggttcttttcagaacctttttaaaagggttggttaactacctcagtagcagaggattgaactataccctgtctgtactgtacatagaaaatctttgtagataaaagcaaggcttgttaaatatgatatgagggtaagattttaatataccaaatgtaacattcttagttgcctttagtttcagaggcttgtaagacttcctcatgaccatcataacaggccttgcttttgtcgtattttgtggctgaaaaagcagccttgcttcttcagatattgtagttatttggatgtataatagtttagcaagatgttacttttgtaagacatcagatgttcaaaaaagtgcatccgaacttgtactaaatactgcagtgtccctttataaaaagtcagactaaaactgacaattgtacagcgaagcctgacatttggatattttgaagttttttcataaatcatagaaattagtatatggctgtagtttagctttttaggtaaaaggtatgtttcattagtgcatttcttcctgctgatcactgtaaacatgtgaatcagctttccatttcttatgcaggtcatgataacttgtagagtagagtacaatcatttgtgctatgtttttaattttctaaagcaccttgatgacagtgagtgtccagtggtgaagcatcctctattgaaccaccctcaaaaatttttttgccaagtcctaagttgatagcttaaagtaaaaagtgaaaattatagtttcattaggacttggtgtaaagaaatcccctccccccttccccaaagggatactgcagttatatcacatacccaataggcaccacgatgaagatcagagcttatacttaattaaggttttatacacaccagttccccagtaaatgcaaatttaacaagaaaatcagacatgtcatatgttcaaaatgctcatggcaaacaatcattttgcattcctgcaaataaaattgttttatactgtaagctggaggcgagtgtaacttatttttgtaataaagtttttattttttttatgtgtcattaatataaatgtgtgttagtgtagaaatcttctggtttaaaaacttagaattgcacacatttcagtatgtttatttgtacttacataattttagaatagtggttgccaatagcctgtatgtttcacattaattggttttttgttatctaaataaatcattttagtatgttgtatgtcagttactgggatagctgggacatagagtgtaatttaaaatttgtcaataagtattcattggaatatatgtaaatgtgccttgccggttattgaaacttatctacaaaatgagtatggggtgacaaaaattagttcctggtgcttaatgaaactttctgccactgattttatatattaccccgtgcttttttaaagtacatctctctcaaaacttagtgtaagtttgagggctacacaaaacatttacatttcattctaacataatgaatataataggttgtggaaagtgggtaaactaaatgtagccttcagtaaaattgaatctcagtgtaatccttggtgctggcatttctcagttccgaggagttaaatgatcccatctaagaggtcattgccatgcctattggcactttactgtcatagcatttttaagggacactgtcaaggtgtttaagttctcagaattacttgttgggattttaggacaggtttgtttacttaaagtaagaactgcattgtcaaagttgaaagaggaacacttttgtgagttcacaaatgtgttcttaagaaaacattaaaatatggagctctgggttttcaagactatttggcattcttaatttggggacttgggagggaaactgataaaaagaaattgaagaattgatggttatacttaaagaagggtaatgtaaacagtggtgatgaaatatatacacatcaagtgaaattacttgacagtgttcatttgaatgactttgaattcaagccattataattacttttaaaattaaatatcatttgcactgttctgataatgggtgcagtttttgagcaatataatcagagctaaatatgcatgtagtgattagtgatgtgaacaattaacgttctgagaagaaatactaactgtggtattttcaaacttaaatttctgtagtaaaatcagtatcaaagtcttatcagatcaaggaaaaacaggcaatgcatataaacatacttttgaatgttgtgtggcctataaagcaataatgcaatttatatggaatgtcatgggatatgagaaatggaaatgcaaaaataactaatcctttagtaaaaatgtcaacatgttaaagggggaatgttaactaatgtaggttattgctatttgtgatttgtttatgggttcttggctttgacagcttcaaagaatggacagtgataagttaaaagaaattttgtatattgtcaaggaaagggtcttaaatccgagtcaagtcccttccttggggtaaaaaatgtattcttaaagcattctgatgttaaaaagaaaacttaagttatctaaccaaaacagacgcaagattttgtttctgcagactacttggcaatcaaaagtgatcataaatttaggttatcagttttcagaaagttgctttgtgagaaaattttgttagatatattctcccaagcatgctttttgtggaaggttttcagccattgccactgaatcagatgttaaaaatgaagggaaaattgagtgtgcacacacacaactgttgtacactcatgattgcagtttttagcttaagaaacttttctaccagttactgtgaatctgacttaaaatgtaaagtttcctcatgataaaataggaacaacatagaaatggattgatggggtgatctgagttattgtatataaaagtttttaaagaatagaatgaacatcaagctagataggcaaaaattgacacattcagaacagcttttttgactgcgaagccaaaagttgtcagaaacagcaaaagatcccttattattacagagtattttacgtagtctctattttaaggagagaaattaaatagaagggcttcatgcatttaggggagggtgctaaaacttctcaagttcgtcaaacttacaggaatacccaccatgatcattttctctctaattatgtataccacaaaattttcatctggccataggaattcactggtgggtgtaaaattaatgactaaagaaattaagtgacaaatacataaaagaaacagacttgtggggatattgttttaaggtgtattaattactcagtgatgataccactcaatagggcatgccactacttttcttaagatgctaattatgaagcagtgctcacaggcattttttaactagcaaattagtagatggacttttggggtctgtcactttttaaaagtatttaagacttaaattctattagcaccacagtctgccttcagtaatacacctaaaatatttttcaggaccagaagcattcagtttgaaaatttgcagatgcaaaccagtattattactaacgctctgggtcaaagattaggtttttaatattaacagtagtctggtaaatatttagaagtctggcattgagaaacaaaagcttgtacctgactagtatttttatttaaaaaaattagttctgttagcttatttaaattgtgttttatttatccgtagaatttatatttatttcattcctttcatctcactgaaaactgtctgcaggccctttgatttggattagatgtgtgaagtactgtcttttgccaaaaacctcaaattacctgttcttttcaacgtagtgggtttgtgcttgtttggagatcagttcaaaaactatctgtactatctgtactgcctctgatgttaagattttatgtatagcataaggaagctagctctgactatattttcctaagaataaagacctatttttgtagcatgtct

SEQ ID NO: 188131 - DNA, 3023 bp, Homo sapiens
  Payload ID: 17022
  Gene Symbol: SYNCRIP
  Gene Name: synaptotagmin binding, cytoplasmic RNA interacting protein
  Uniprot ID: O60506
  ENST ID: ENST00000369622
  CDS Start-End: 502-2373
ctgggggaccgggccgagagtgcgagcgagcgagggagggagtgagggagcgtgcgagccagaaggggaaaggcggccactcgtgcctgagcgaccgcagaggggagtgggagcagtggggtaaaggagcggggggcgggaataagaaaggccgagagaaggcggacagaggctagtggtggtggtggtggtagggggagaaggaggagctggaggagggcaggggctgagggagtgagtgaagcggacgcgcgagggaggggagggaagggaagggaagggaagggggggtcacgcgggggcgcgcgcgcgcaccgggagcgcgctcggaggcgagtggaactggatcgggtttgctgccagcggcgtgagcttcggccgccattttacaacagctccactcgcgccggacacagggagcagcgagcacgcgtttcccgcaacccgataccatcggacaggatttctccgcctcagcccaacggggagatctctggaaacatggctacagaacatgttaatggaaatggtactgaagagcccatggatactacttctgcagttatccattcagaaaattttcagacattgcttgatgctggtttaccacagaaagttgctgaaaaactagatgaaatttacgttgcagggctagttgcacatagtgatttagatgaaagagctattgaagctttaaaagaattcaatgaagacggtgcattggcagttcttcaacagtttaaagacagtgatctctctcatgttcagaacaaaagtgcctttttatgtggagtcatgaagacttacaggcagagagaaaaacaagggaccaaagtagcagattctagtaaaggaccagatgaggcaaaaattaaggcactcttggaaagaacaggctacacacttgatgtgaccactggacagaggaagtatggaggaccacctccagattccgtttattcaggtcagcagccttctgttggcactgagatatttgtgggaaagatcccaagagatctatttgaggatgaacttgttccattatttgagaaagctggacctatatgggatcttcgtctaatgatggatccactcactggtctcaatagaggttatgcgtttgtcactttttgtacaaaagaagcagctcaggaggctgttaaactgtataataatcatgaaattcgttctggaaaacatattggtgtctgcatctcagttgccaacaataggctttttgtgggctctattcctaagagtaaaaccaaggaacagattcttgaagaatttagcaaagtaacagagggtcttacagacgtcattttataccaccaaccggatgacaagaaaaaaaacagaggcttttgctttcttgaatatgaagatcacaaaacagctgcccaggcaaggcgtaggttaatgagtggtaaagtcaaggtctgggggaatgttggaactgttgaatgggctgatcctatagaagatcctgatcctgaggttatggcaaaggtaaaagtgctgtttgtacgcaaccttgccaatactgtaacagaagagattttagaaaaggcatttagtcagtttgggaaactggaacgagtgaagaagttaaaagattatgcgttcattcattttgatgagcgagatggtgctgtcaaggctatggaagaaatgaatggcaaagacttggagggagaaaatattgaaattgtttttgccaagccaccagatcagaaaaggaaagaaagaaaagctcagaggcaagcagcaaaaaatcaaatgtatgacgattactactattatggtccacctcatatgccccctccaacaagaggtcgagggcgtggaggtagaggtggttatggatatcctccagattattatggatatgaagattattatgattattatggttatgattaccataactatcgtggtggatatgaagatccatactatggttatgaagattttcaagttggagctagaggaaggggtggtagaggagcaaggggtgctgctccatccagaggtcgtggggctgctcctccccgcggtagagccggttattcacagagaggaggtcctggatcagcaagaggcgttcgaggtgcgagaggaggtgcccaacaacaaagaggccgcggggtacgtggtgcgaggggtggccgcggtggaaatgtaggaggaaagcgcaaagctgatgggtacaaccagccagattccaagcggcgccagaccaataatcagaactggggctcccaacccattgctcagcaaccgctccaaggtggtgatcattctggtaactatggttacaaatctgaaaaccaggagttttatcaggatacttttgggcaacagtggaagtagaaacagtagggcctctgtaaaattggagactgataggttgatcagaaactcaccctaaatctgaacgggtgccgctataatttgtgacatctggcaagatttccctttatgtatatattttaacaatccgcttggacacgaacaaagccacacttctaactgcttctggcgaactgattttatttttaatttttttcaataaagatattcttagatactgaaagaaatagttaatgagtttgcatttgtgcttgagaaaatttggctcaagtccatttggctgtagtgtcaacgatgtttccagtagtgtttagatttggtgtcttcaaaggtagttgattaaaaccaagtgtgtctttaatatcttgtatcagaataactttgtatgttaccaacttaaattgctagaataaggtaaattgatacacaactgctatttttaatttagaactttgacctaatttgggttttcaaaaccattttggctacttgtattctttatgctgttgtttatttcaataaaaaattcacacctaaatgtatacttactaaaattgtgtttacaattcgtttttcacaaaatttcctgcaaatttggttcaaattgtatagcatgtcaaggccaattaaagggttttgtgccttgttaa

SEQ ID NO: 188132 - DNA, 610 bp, Homo sapiens
  Payload ID: 17022
  Gene Symbol: SYNCRIP
  Gene Name: synaptotagmin binding, cytoplasmic RNA interacting protein
  ENST ID: ENST00000444272
  CDS Start-End: 56-610
gcggccgcggagccgggggcgggggccgggcgcgcacagaccgatctctggaaacatggctacagaacatgttaatggaaatggtactgaagagcccatggatactacttctgcagttatccattcagaaaattttcagacattgcttgatgctggtttaccacagaaagttgctgaaaaactagatgaaatttacgttgcagggctagttgcacatagtgatttagatgaaagagctattgaagctttaaaagaattcaatgaagacggtgcattggcagttcttcaacagtttaaagacagtgatctctctcatgttcagaacaaaagtgcctttttatgtggagtcatgaagacttacaggcagagagaaaaacaagggaccaaagtagcagattctagtaaaggaccagatgaggcaaaaattaaggcactcttggaaagaacaggctacacacttgatgtgaccactggacagaggaagtatggaggaccacctccagattccgtttattcaggtcagcagccttctgttggcactgagatatttgtgggaaagatcccaagagatctatttgaggatgaacttgttccattatttgagaaagct

SEQ ID NO: 188133 - DNA, 6764 bp, Homo sapiens
  Payload ID: 17022
  Gene Symbol: SYNCRIP
  Gene Name: synaptotagmin binding, cytoplasmic RNA interacting protein
  ENST ID: ENST00000616122
  CDS Start-End: 273-1667
cggcgtgagcttcggccgccattttacaacagctccactcgcgccggacacagggagcagcgagcacgcgtttcccgcaacccgataccatcggacaggatttctccgcctcagcccaacggggagggctagttgcacatagtgatttagatgaaagagctattgaagctttaaaagaattcaatgaagacggtgcattggcagttcttcaacagtttaaagacagtgatctctctcatgttcagaacaaaagtgcctttttatgtggagtcatgaagacttacaggcagagagaaaaacaagggaccaaagtagcagattctagtaaaggaccagatgaggcaaaaattaaggcactcttggaaagaacaggctacacacttgatgtgaccactggacagaggaagtatggaggaccacctccagattccgtttattcaggtcagcagccttctgttggcactgagatatttgtgggaaagatcccaagagatctatttgaggatgaacttgttccattatttgagaaagctggacctatatgggatcttcgtctaatgatggatccactcactggtctcaatagaggttatgcgtttgtcactttttgtacaaaagaagcagctcaggaggctgttaaactgtataataatcatgaaattcgttctggaaaacatattggtgtctgcatctcagttgccaacaataggctttttgtgggctctattcctaagagtaaaaccaaggaacagattcttgaagaatttagcaaagtaacagagggtcttacagacgtcattttataccaccaaccggatgacaagaaaaaaaacagaggcttttgctttcttgaatatgaagatcacaaaacagctgcccaggcaaggcgtaggttaatgagtggtaaagtcaaggtctgggggaatgttggaactgttgaatgggctgatcctatagaagatcctgatcctgaggttatggcaaaggtaaaagtgctgtttgtacgcaaccttgccaatactgtaacagaagagattttagaaaaggcatttagtcagtttgggaaactggaacgagtgaagaagttaaaagattatgcgttcattcattttgatgagcgagatggtgctgtcaaggctatggaagaaatgaatggcaaagacttggagggagaaaatattgaaattgtttttgccaagccaccagatcagaaaaggaaagaaagaaaagctcagaggcaagcagcaaaaaatcaaatgtatgacgattactactattatggtccacctcatatgccccctccaacaagaggtcgagggcgtggaggtagaggtggttatggatatcctccagattattatggatatgaagattattatgattattatggttatgattaccataactatcgtggtggatatgaagatccatactatggttatgaagattttcaagttggagctagaggaaggggtggtagaggagcaaggggtgctgctccatccagaggtcgtggggctgctcctccccgcggtagagccggttattcacagagaggaggtcctggatcagcaagaggcgttcgaggtgcgagaggaggtgcccaacaacaaagaggccgcgggcagggaaaaggggtcgaggccggtcctgacctgttacaatgaagactgacttgctatgtgggattacaccagaagcttgcagtggagtaatggtaaggaaatcaagcaaccttaaatatgtcggctgtataggagcatattctattgcagaagaccttcctatgaagatcatggaatcaaatacgggacattgaactaatacttggactttgatatgaatttctttaacaattttctctgcagtgcaagttattaaactaaagctactctattttcaaaatgtgttccaacagaaatccttcataactcctagcatggtatcttaataaagaataaagttcttttaaaaatctgctctaagtagatttttccccttttttaaattaaggatcccaacagtggtattttgaaatattctcttgaatttgtgcatttaaattttattgcagtggtatagatgaatgccactgatggtatccttaaattttatttctgctcaccaaggttaatcatgattgtctatatcttttttatagtgatcacttttgaattgtgttcagatatgcagtttcaggtgtaatcatcagagctggttagtcaggcattccagatagtggttcttttcagaacctttttaaaagggttggttaactacctcagtagcagaggattgaactataccctgtctgtactgtacatagaaaatctttgtagataaaagcaaggcttgttaaatatgatatgagggtaagattttaatataccaaatgtaacattcttagttgcctttagtttcagaggcttgtaagacttcctcatgaccatcataacaggccttgcttttgtcgtattttgtggctgaaaaagcagccttgcttcttcagatattgtagttatttggatgtataatagtttagcaagatgttacttttgtaagacatcagatgttcaaaaaagtgcatccgaacttgtactaaatactgcagtgtccctttataaaaagtcagactaaaactgacaattgtacagcgaagcctgacatttggatattttgaagttttttcataaatcatagaaattagtatatggctgtagtttagctttttaggtaaaaggtatgtttcattagtgcatttcttcctgctgatcactgtaaacatgtgaatcagctttccatttcttatgcaggtcatgataacttgtagagtagagtacaatcatttgtgctatgtttttaattttctaaagcaccttgatgacagtgagtgtccagtggtgaagcatcctctattgaaccaccctcaaaaatttttttgccaagtcctaagttgatagcttaaagtaaaaagtgaaaattatagtttcattaggacttggtgtaaagaaatcccctccccccttccccaaagggatactgcagttatatcacatacccaataggcaccacgatgaagatcagagcttatacttaattaaggttttatacacaccagttccccagtaaatgcaaatttaacaagaaaatcagacatgtcatatgttcaaaatgctcatggcaaacaatcattttgcattcctgcaaataaaattgttttatactgtaagctggaggcgagtgtaacttatttttgtaataaagtttttattttttttatgtgtcattaatataaatgtgtgttagtgtagaaatcttctggtttaaaaacttagaattgcacacatttcagtatgtttatttgtacttacataattttagaatagtggttgccaatagcctgtatgtttcacattaattggttttttgttatctaaataaatcattttagtatgttgtatgtcagttactgggatagctgggacatagagtgtaatttaaaatttgtcaataagtattcattggaatatatgtaaatgtgccttgccggttattgaaacttatctacaaaatgagtatggggtgacaaaaattagttcctggtgcttaatgaaactttctgccactgattttatatattaccccgtgcttttttaaagtacatctctctcaaaacttagtgtaagtttgagggctacacaaaacatttacatttcattctaacataatgaatataataggttgtggaaagtgggtaaactaaatgtagccttcagtaaaattgaatctcagtgtaatccttggtgctggcatttctcagttccgaggagttaaatgatcccatctaagaggtcattgccatgcctattggcactttactgtcatagcatttttaagggacactgtcaaggtgtttaagttctcagaattacttgttgggattttaggacaggtttgtttacttaaagtaagaactgcattgtcaaagttgaaagaggaacacttttgtgagttcacaaatgtgttcttaagaaaacattaaaatatggagctctgggttttcaagactatttggcattcttaatttggggacttgggagggaaactgataaaaagaaattgaagaattgatggttatacttaaagaagggtaatgtaaacagtggtgatgaaatatatacacatcaagtgaaattacttgacagtgttcatttgaatgactttgaattcaagccattataattacttttaaaattaaatatcatttgcactgttctgataatgggtgcagtttttgagcaatataatcagagctaaatatgcatgtagtgattagtgatgtgaacaattaacgttctgagaagaaatactaactgtggtattttcaaacttaaatttctgtagtaaaatcagtatcaaagtcttatcagatcaaggaaaaacaggcaatgcatataaacatacttttgaatgttgtgtggcctataaagcaataatgcaatttatatggaatgtcatgggatatgagaaatggaaatgcaaaaataactaatcctttagtaaaaatgtcaacatgttaaagggggaatgttaactaatgtaggttattgctatttgtgatttgtttatgggttcttggctttgacagcttcaaagaatggacagtgataagttaaaagaaattttgtatattgtcaaggaaagggtcttaaatccgagtcaagtcccttccttggggtaaaaaatgtattcttaaagcattctgatgttaaaaagaaaacttaagttatctaaccaaaacagacgcaagattttgtttctgcagactacttggcaatcaaaagtgatcataaatttaggttatcagttttcagaaagttgctttgtgagaaaattttgttagatatattctcccaagcatgctttttgtggaaggttttcagccattgccactgaatcagatgttaaaaatgaagggaaaattgagtgtgcacacacacaactgttgtacactcatgattgcagtttttagcttaagaaacttttctaccagttactgtgaatctgacttaaaatgtaaagtttcctcatgataaaataggaacaacatagaaatggattgatggggtgatctgagttattgtatataaaagtttttaaagaatagaatgaacatcaagctagataggcaaaaattgacacattcagaacagcttttttgactgcgaagccaaaagttgtcagaaacagcaaaagatcccttattattacagagtattttacgtagtctctattttaaggagagaaattaaatagaagggcttcatgcatttaggggagggtgctaaaacttctcaagttcgtcaaacttacaggaatacccaccatgatcattttctctctaattatgtataccacaaaattttcatctggccataggaattcactggtgggtgtaaaattaatgactaaagaaattaagtgacaaatacataaaagaaacagacttgtggggatattgttttaaggtgtattaattactcagtgatgataccactcaatagggcatgccactacttttcttaagatgctaattatgaagcagtgctcacaggcattttttaactagcaaattagtagatggacttttggggtctgtcactttttaaaagtatttaagacttaaattctattagcaccacagtctgccttcagtaatacacctaaaatatttttcaggaccagaagcattcagtttgaaaatttgcagatgcaaaccagtattattactaacgctctgggtcaaagattaggtttttaatattaacagtagtctggtaaatatttagaagtctggcattgagaaacaaaagcttgtacctgactagtatttttatttaaaaaaattagttctgttagcttatttaaattgtgttttatttatccgtagaatttatatttatttcattcctttcatctcactgaaaactgtctgcaggccctttgatttggattagatgtgtgaagtactgtcttttgccaaaaacctcaaattacctgttcttttcaacgtagtgggtttgtgcttgtttggagatcagttcaaaaactatctgtactatctgtactgcctctgatgttaagattttatgtatagcataaggaagctagctctgactatattttcctaagaataaagacctatttttgtagcatgtcttaggatctccaggagtccaagaattattgtgggtgtcctccaattcatcactcttcacttaacagcttttaagtagacacttggaatctttagaggtctgtcgccctttgattatccatacattcgaagtaactagccaatggtgaaaaattcctcaagatatcctcagttgcaatcacattactggaagatgaatagaataaatgtattaggctggtcttaatttttgatggaaatattctgttgtcccgtacttgccattggatttgataaagttagtggtaatttggaaagaatcggggacttgccaatatatttgtgggttttagcttatacccctaggatttcttggttgcgggacgagcagttttggccacttccatcaggacaagactttttaggtcacttagtgcaggttttagtttctattttggattaacaacatttatattgattatcgaaaagaagctttcatcatttcagaacagtcctggaagtttgactttgagtgtgggagaagtcctaataaaccattttggaaatt

SEQ ID NO: 188134 - DNA, 4808 bp, Homo sapiens
  Payload ID: 17023
  Gene Symbol: SYT1
  Gene Name: synaptotagmin I
  Uniprot ID: P21579
  ENST ID: ENST00000261205
  CDS Start-End: 658-1926
caatcaggatgctggggctcggagatgatgggcggccgcctcctcactggagggattcctggagaagctgcagtgtggggatgctctagaccgagtactgcccccagtgtctttccacctcctcctgcagcagcggcagcggcagcagcagttagcagcggcaacttgaggctgcaccccgggcaagtccccagggtggtgctcagccgagaggggggcttggcgccccgaaggggtgtgtgtagggtgggggcgaccacgtgggaccagctggtggccctggaaaacctcccacacacccacacccacacaccccttttgtgttgcaggctgcccctccaagagcggaggcagcgagagtacgcgtgtgcctcgcgccggtccacgcggggagagcactggggaccgagacccggcaccacctcccggtccgccctccagggaaaacgggaaaactagcaagagctagcaagaactagcaagagcttgaacaaacgcctggactcagattggaagactgctcatttgtctactgcctcattcctggaaattgcactggaactgtctgattaagaaaaacagaataattctgaaagaaagaaaacaaagaaaaacatactccagaattcctaatagaacacttcacctgaacctaaaatggtgagcgagagtcaccatgaggccctggcagccccgcctgtcaccactgtcgcgactgttctgccaagcaacgccacagagccagccagtcctggagaaggaaaggaagatgcattttctaagctgaaggagaagtttatgaatgagttgcataaaattccattgccaccgtgggccttaattgcaatagccatagtcgcagtccttttagtcctgacctgctgcttttgtatctgtaagaaatgtttgttcaaaaagaaaaacaagaagaagggaaaggaaaaaggagggaagaatgccattaacatgaaagatgtaaaagacttagggaagacgatgaaagatcaggccctcaaggatgatgatgctgaaactggattgacagatggagaagaaaaagaagaacccaaagaagaggagaaactgggaaaacttcagtattcactggattatgatttccaaaataaccagctgctggtagggatcattcaggctgccgaactgcccgccttggacatggggggcacatctgatccttacgtgaaagtgtttctgctacctgataagaagaagaaatttgagacaaaagtccaccgaaaaacccttaatcctgtcttcaatgagcaatttactttcaaggtaccatactcggaattgggtggcaaaaccctagtgatggctgtatatgattttgatcgtttctctaagcatgacatcattggagaatttaaagtccctatgaacacagtggattttggccatgtaactgaggaatggcgtgacctgcaaagtgctgagaaggaagagcaagagaaattgggtgatatctgcttctcccttcgctacgtacctactgctggtaagctgactgttgtcattctggaggcaaagaacctgaagaagatggatgtgggtggcttatccgatccttatgtgaagattcatctgatgcagaatggtaagaggctgaagaagaaaaagacaacaattaaaaagaacacacttaacccctactacaatgagtcattcagctttgaagtaccttttgaacaaatccagaaagtgcaggtggtggtaactgttttggactatgacaagattggcaagaacgatgccatcggcaaagtctttgtgggctacaacagcaccggcgcggagctgcgacactggtcagacatgctggccaaccccaggcgacctattgcccagtggcacaccctgcaggtagaggaggaagttgatgccatgctggccgtcaagaagtaaaggaaagaagaagcctttctgcatttgcccatatagtgctctttagccagtatctgtaaatacctcagtaatatgggtcctttcatttttccagccatgcattcctaacacaattcagtggtacttggaatcctgttttaatttgcacaaatttaaatgtagagagcccctaagtccttcatcataccactgccctccaaatctactcttcttttaagcaatatgatgtgtagatagagcatgaatgaaattatttattgtatcacactgttgtatataccagtatgctaaagatttatttctagtttgtgtatttgtatgttgtaagcgtttcctaatctgtgtatatctagatgtttttaataagatgttctattttaaactatgtaaattgactgagatataggagagctgataatatattatacggtaaatatagtatcgtctgcattccagcaaaaatatcaactcgtaaggcactagtacagttaaactgacatcttaaaggacaacttaaacctgagctttctattgaatcatttgagtaccaagataaacttacaccacatacttggtgggtgaatccaattttgtagaattcctacacaggcaaaatagcatgatctgagcagcagcatccaggctgacctcaaggaagcatagccacaaaacagaatagcacctgtctgtacatatttacaaagctaaaataatggcttcactcttatatttgaggaagcaactgaacaggagtcaatgatttcatattactgcatatagaataacaacaaggtgttccgtgtgtgtgtgtgtgtgtgtgtgtgtgtgtgtgtgcacatttgtttggggatgggggagaagaagctaaggggagaagtcaacatttatgaaatattgcctgactatttaaaaagaaaaaagtagctctccattatcacctttatacaaaatgtacatcctgtgaattctgttccagatttcacacctacaataattccaaaaggtttgcacattagagtttgtaacaaaatattttattatataaaaccaggttagaaggaatgcaggatatttttaacacaacaatctgtgcttattacacaaaattactttgtggtaaacagacagtattgtaatcccatcaaaagatgaaagaaaaacaaaaacaaaaaccaacaacaattagccatagttctgaatgcacttcaattaagccaaaacagacagctagtgatctttttatatgctctttttacttaagttttaatttgtcctttaaaaaaaggtgaaacaaaccaagaacaagttctagaaaactgaagcaacctcttatgtatactagatgcttgatttaggaggagtttttaaacgttttcaatgttattatgtagtaaatgacactattatgaagctactagtcattccataagagtcttaaaggactgctctgtgtaacactgtgactgccgtgtgtgcttagacccgtagtttcctcagtggatagcactcaatttattccgtagtgatattgtaacaatactgccattcccttctactgcactgcccaaggtgtgtgtagcacaaacagttctcattacaaaggaccaattcagaactgaaaagctatgcataggacaaggaagatacatagaatggggtggaacacagcattttgtcaagcactgtgcaatattccatatttttccccactatggtagacaaccatttcgtggaagggcagcctattatcccacactgcatctagccttttgtcccattcacttctgtgatccattttaatttccaggccacaagacagtagtgatgctctgaaatgaaagtttgtcttcacaaatatcaaaacaaaatggaggaaaactaagcattggcctcatgttcagtcttcaggatatcacaccacgtcttttcaaaaactaaagagaattcaaaaagggctgatggtaggctttgaacatggggttggctgtttcccagtaaaactggaattcctgtcgttactgtttccttatcaaagaaggggcaagctcttttgccttttaggccagacatagcaaacgctttataattggcatagacataaaggataaaaggaaaataaccgtctgccgatggtccgtacttcttaaaaaacataggtaatagaaaatatacacaagtcagaatgtgaaattaaataatggtttgaacagaaaattcaaacaagactctttccaatttaaagggccaaaccctaccaaagagagggagttgactggcttttaaaaagtatttaaataccacaaatgacatttaatttcactgtattcagctttaagttgttcacaatgaaaccacactttcaaacaagcaggttcaagctgctgaatagacattatttcttgcattaaaataccactaatgcattctcttgcaacactgccagacatgggattgtcaccatagaattagttggtactatgccatctttcactctttcacaagtcagtgatggaacctgctttatgaccaagattcatcctcaaataagccacatgtacccttctgacaaagctgtgtaaagtattagaatctgatgctctagaaagatcctagttgcctttgtgtatatttactgcctgcttgagtgtttctatgtgtgggttttccctgtatcttgtagaaatgttggggtgttttcctctgccatatggctcgtggcctgcgagccaactatttcagctgtattttaccttcatttttgatgaggtgatttaaattttgtttcactttgtgtagtgaattccacagtagttttctgattgttgttaaaaatgacttaacatattacacagatattcaataaaaatgttttatttcctgtt

SEQ ID NO: 188135 - DNA, 3095 bp, Homo sapiens
  Payload ID: 17023
  Gene Symbol: SYT1
  Gene Name: synaptotagmin I
  Uniprot ID: P21579
  ENST ID: ENST00000393240
  CDS Start-End: 672-1940
atctcggctccaccgcacccttcgcgggaagtccccaggcttccagcaaagctcagcttatcccgcccccgcttccaacccggaaccccagaagaacagcatgatgagcctccggcagccaggtgggccacctccccgcggctcagtttgaggacacttgtgcggaaccctttcacatccccaccctacccagctttcacaactccgccgggttaaatggccaaagacaaacttctacctctcctgtccccggtcccagcttttcaaaaacccacagctggcgaacccacacacatcgaaactcctaggtcgctgttgcagtctgggcatgctcagtatcagggctgcccctccaagagcggaggcagcgagagtacgcgtgtgcctcgcgccggtccacgcggggagagcactggggaccgagacccggcaccacctcccggtccgccctccagggaaaacgggaaaactagcaagagctagcaagaactagcaagagcttgaacaaacgcctggactcagattggaagactgctcatttgtctactgcctcattcctggaaattgcactggaactgtctgattaagaaaaacagaataattctgaaagaaagaaaacaaagaaaaacatactccagaattcctaatagaacacttcacctgaacctaaaatggtgagcgagagtcaccatgaggccctggcagccccgcctgtcaccactgtcgcgactgttctgccaagcaacgccacagagccagccagtcctggagaaggaaaggaagatgcattttctaagctgaaggagaagtttatgaatgagttgcataaaattccattgccaccgtgggccttaattgcaatagccatagtcgcagtccttttagtcctgacctgctgcttttgtatctgtaagaaatgtttgttcaaaaagaaaaacaagaagaagggaaaggaaaaaggagggaagaatgccattaacatgaaagatgtaaaagacttagggaagacgatgaaagatcaggccctcaaggatgatgatgctgaaactggattgacagatggagaagaaaaagaagaacccaaagaagaggagaaactgggaaaacttcagtattcactggattatgatttccaaaataaccagctgctggtagggatcattcaggctgccgaactgcccgccttggacatggggggcacatctgatccttacgtgaaagtgtttctgctacctgataagaagaagaaatttgagacaaaagtccaccgaaaaacccttaatcctgtcttcaatgagcaatttactttcaaggtaccatactcggaattgggtggcaaaaccctagtgatggctgtatatgattttgatcgtttctctaagcatgacatcattggagaatttaaagtccctatgaacacagtggattttggccatgtaactgaggaatggcgtgacctgcaaagtgctgagaaggaagagcaagagaaattgggtgatatctgcttctcccttcgctacgtacctactgctggtaagctgactgttgtcattctggaggcaaagaacctgaagaagatggatgtgggtggcttatccgatccttatgtgaagattcatctgatgcagaatggtaagaggctgaagaagaaaaagacaacaattaaaaagaacacacttaacccctactacaatgagtcattcagctttgaagtaccttttgaacaaatccagaaagtgcaggtggtggtaactgttttggactatgacaagattggcaagaacgatgccatcggcaaagtctttgtgggctacaacagcaccggcgcggagctgcgacactggtcagacatgctggccaaccccaggcgacctattgcccagtggcacaccctgcaggtagaggaggaagttgatgccatgctggccgtcaagaagtaaaggaaagaagaagcctttctgcatttgcccatatagtgctctttagccagtatctgtaaatacctcagtaatatgggtcctttcatttttccagccatgcattcctaacacaattcagtggtacttggaatcctgttttaatttgcacaaatttaaatgtagagagcccctaagtccttcatcataccactgccctccaaatctactcttcttttaagcaatatgatgtgtagatagagcatgaatgaaattatttattgtatcacactgttgtatataccagtatgctaaagatttatttctagtttgtgtatttgtatgttgtaagcgtttcctaatctgtgtatatctagatgtttttaataagatgttctattttaaactatgtaaattgactgagatataggagagctgataatatattatacggtaaatatagtatcgtctgcattccagcaaaaatatcaactcgtaaggcactagtacagttaaactgacatcttaaaggacaacttaaacctgagctttctattgaatcatttgagtaccaagataaacttacaccacatacttggtgggtgaatccaattttgtagaattcctacacaggcaaaatagcatgatctgagcagcagcatccaggctgacctcaaggaagcatagccacaaaacagaatagcacctgtctgtacatatttacaaagctaaaataatggcttcactcttatatttgaggaagcaactgaacaggagtcaatgatttcatattactgcatatagaataacaacaaggtgttccgtgtgtgtgtgtgtgtgtgtgtgtgtgtgtgtgtgcacatttgtttggggatgggggagaagaagctaaggggagaagtcaacatttatgaaatattgcctgactatttaaaaagaaaaaagtagctctccattatcacctttatacaaaatgtacatcctgtgaattctgttccagatttcacacctacaataattccaaaaggtttgcacattagagtttgtaacaaaatattttattatataaaaccaggttagaaggaatgcaggatatttttaacacaacaatctgtgcttattacacaaaattactttgtggtaaacagacagtattgtaatcccatcaaaagatgaaag

SEQ ID NO: 188136 - DNA, 4592 bp, Homo sapiens
  Payload ID: 17023
  Gene Symbol: SYT1
  Gene Name: synaptotagmin I
  ENST ID: ENST00000457153
  CDS Start-End: 449-1708
agcagcagttagcagcggcaacttgaggctgcaccccgggcaagtccccagggtggtgctcagccgagaggggggcttggcgccccgaaggggtgtgtgtagggtgggggcgaccacgtgggaccagctggtggccctggaaaacctcccacacacccacacccacacaccccttttgtgttgcaggctgcccctccaagagcggaggcagcgagagtacgcgtgtgcctcgcgccggtccacgcggggagagcactggggaccgagacccggcaccacctcccggtccgccctccagggaaaacgggaaaactagcaagagctagcaagaactagcaagagcttgaacaaacgcctggactcagattggaagactgctcatttgtctactgcctcattcctggaaattgcactggaactgtctgattaagcttcacctgaacctaaaatggtgagcgagagtcaccatgaggccctggcagccccgcctgtcaccactgtcgcgactgttctgccaagcaacgccacagagccagccagtcctggagaaggaaaggaagatgcattttctaagctgaaggagaagtttatgaatgagttgcataaaattccattgccaccgtgggccttaattgcaatagccatagtcgcagtccttttagtcctgacctgctgcttttgtatctgtaagaaatgtttgttcaaaaagaaaaacaagaagaagggaaaggaaaaaggagggaagaatgccattaacatgaaagatgtaaaagacttagggaagacgatgaaagatcaggatgatgatgctgaaactggattgacagatggagaagaaaaagaagaacccaaagaagaggagaaactgggaaaacttcagtattcactggattatgatttccaaaataaccagctgctggtagggatcattcaggctgccgaactgcccgccttggacatggggggcacatctgatccttacgtgaaagtgtttctgctacctgataagaagaagaaatttgagacaaaagtccaccgaaaaacccttaatcctgtcttcaatgagcaatttactttcaaggtaccatactcggaattgggtggcaaaaccctagtgatggctgtatatgattttgatcgtttctctaagcatgacatcattggagaatttaaagtccctatgaacacagtggattttggccatgtaactgaggaatggcgtgacctgcaaagtgctgagaaggaagagcaagagaaattgggtgatatctgcttctcccttcgctacgtacctactgctggtaagctgactgttgtcattctggaggcaaagaacctgaagaagatggatgtgggtggcttatccgatccttatgtgaagattcatctgatgcagaatggtaagaggctgaagaagaaaaagacaacaattaaaaagaacacacttaacccctactacaatgagtcattcagctttgaagtaccttttgaacaaatccagaaagtgcaggtggtggtaactgttttggactatgacaagattggcaagaacgatgccatcggcaaagtctttgtgggctacaacagcaccggcgcggagctgcgacactggtcagacatgctggccaaccccaggcgacctattgcccagtggcacaccctgcaggtagaggaggaagttgatgccatgctggccgtcaagaagtaaaggaaagaagaagcctttctgcatttgcccatatagtgctctttagccagtatctgtaaatacctcagtaatatgggtcctttcatttttccagccatgcattcctaacacaattcagtggtacttggaatcctgttttaatttgcacaaatttaaatgtagagagcccctaagtccttcatcataccactgccctccaaatctactcttcttttaagcaatatgatgtgtagatagagcatgaatgaaattatttattgtatcacactgttgtatataccagtatgctaaagatttatttctagtttgtgtatttgtatgttgtaagcgtttcctaatctgtgtatatctagatgtttttaataagatgttctattttaaactatgtaaattgactgagatataggagagctgataatatattatacggtaaatatagtatcgtctgcattccagcaaaaatatcaactcgtaaggcactagtacagttaaactgacatcttaaaggacaacttaaacctgagctttctattgaatcatttgagtaccaagataaacttacaccacatacttggtgggtgaatccaattttgtagaattcctacacaggcaaaatagcatgatctgagcagcagcatccaggctgacctcaaggaagcatagccacaaaacagaatagcacctgtctgtacatatttacaaagctaaaataatggcttcactcttatatttgaggaagcaactgaacaggagtcaatgatttcatattactgcatatagaataacaacaaggtgttccgtgtgtgtgtgtgtgtgtgtgtgtgtgtgtgtgtgcacatttgtttggggatgggggagaagaagctaaggggagaagtcaacatttatgaaatattgcctgactatttaaaaagaaaaaagtagctctccattatcacctttatacaaaatgtacatcctgtgaattctgttccagatttcacacctacaataattccaaaaggtttgcacattagagtttgtaacaaaatattttattatataaaaccaggttagaaggaatgcaggatatttttaacacaacaatctgtgcttattacacaaaattactttgtggtaaacagacagtattgtaatcccatcaaaagatgaaagaaaaacaaaaacaaaaaccaacaacaattagccatagttctgaatgcacttcaattaagccaaaacagacagctagtgatctttttatatgctctttttacttaagttttaatttgtcctttaaaaaaaggtgaaacaaaccaagaacaagttctagaaaactgaagcaacctcttatgtatactagatgcttgatttaggaggagtttttaaacgttttcaatgttattatgtagtaaatgacactattatgaagctactagtcattccataagagtcttaaaggactgctctgtgtaacactgtgactgccgtgtgtgcttagacccgtagtttcctcagtggatagcactcaatttattccgtagtgatattgtaacaatactgccattcccttctactgcactgcccaaggtgtgtgtagcacaaacagttctcattacaaaggaccaattcagaactgaaaagctatgcataggacaaggaagatacatagaatggggtggaacacagcattttgtcaagcactgtgcaatattccatatttttccccactatggtagacaaccatttcgtggaagggcagcctattatcccacactgcatctagccttttgtcccattcacttctgtgatccattttaatttccaggccacaagacagtagtgatgctctgaaatgaaagtttgtcttcacaaatatcaaaacaaaatggaggaaaactaagcattggcctcatgttcagtcttcaggatatcacaccacgtcttttcaaaaactaaagagaattcaaaaagggctgatggtaggctttgaacatggggttggctgtttcccagtaaaactggaattcctgtcgttactgtttccttatcaaagaaggggcaagctcttttgccttttaggccagacatagcaaacgctttataattggcatagacataaaggataaaaggaaaataaccgtctgccgatggtccgtacttcttaaaaaacataggtaatagaaaatatacacaagtcagaatgtgaaattaaataatggtttgaacagaaaattcaaacaagactctttccaatttaaagggccaaaccctaccaaagagagggagttgactggcttttaaaaagtatttaaataccacaaatgacatttaatttcactgtattcagctttaagttgttcacaatgaaaccacactttcaaacaagcaggttcaagctgctgaatagacattatttcttgcattaaaataccactaatgcattctcttgcaacactgccagacatgggattgtcaccatagaattagttggtactatgccatctttcactctttcacaagtcagtgatggaacctgctttatgaccaagattcatcctcaaataagccacatgtacccttctgacaaagctgtgtaaagtattagaatctgatgctctagaaagatcctagttgcctttgtgtatatttactgcctgcttgagtgtttctatgtgtgggttttccctgtatcttgtagaaatgttggggtgttttcctctgccatatggctcgtggcctgcgagccaactatttcagctgtattttaccttcatttttgatgaggtgatttaaattttgtttcactttgtgtagtgaattccacagtagttttctgattgttgttaaaaatgacttaacatattacacagatattcaataaaaatgttttatttcctgttga

SEQ ID NO: 188137 - DNA, 762 bp, Homo sapiens
  Payload ID: 17023
  Gene Symbol: SYT1
  Gene Name: synaptotagmin I
  ENST ID: ENST00000446242
  CDS Start-End: 218-762
agatgccatgagaactcttaaaaacagagtaacatacttattataagacctattttaaatatttcattctttcctcattttcatgatacctaaattttttgaagactgaaaatgatgagaacttatataaaaagaaaaacagaataattctgaaagaaagaaaacaaagaaaaacatactccagaattcctaatagaacacttcacctgaacctaaaatggtgagcgagagtcaccatgaggccctggcagccccgcctgtcaccactgtcgcgactgttctgccaagcaacgccacagagccagccagtcctggagaaggaaaggaagatgcattttctaagctgaaggagaagtttatgaatgagttgcataaaattccattgccaccgtgggccttaattgcaatagccatagtcgcagtccttttagtcctgacctgctgcttttgtatctgtaagaaatgtttgttcaaaaagaaaaacaagaagaagggaaaggaaaaaggagggaagaatgccattaacatgaaagatgtaaaagacttagggaagacgatgaaagatcaggccctcaaggatgatgatgctgaaactggattgacagatggagaagaaaaagaagaacccaaagaagaggagaaactgggaaaacttcagtattcactggattatgatttccaaaataaccagctgctggtagggatcattcaggctgccgaactgcccgccttggacatggggggcacatctgatccttacgt

SEQ ID NO: 188138 - DNA, 702 bp, Homo sapiens
  Payload ID: 17023
  Gene Symbol: SYT1
  Gene Name: synaptotagmin I
  ENST ID: ENST00000552074
  CDS Start-End: 419-702
tttaaagaaagatgacggtgtcttaggaatgcttttaagggttctttggttgaaagtctgggaatactcagagataatattaatgagagcctagagtttttttcttttaaaatggggttccatggctttgggcagaaatgatttttatatgtatcatgattgaaaaaactctcagtacaagatgatgcacttctttatacagggaaaacgggaaaactagcaagagctagcaagaactagcaagagcttgaacaaacgcctggactcagattggaagactgctcatttgtctactgcctcattcctggaaattgcactggaactgtctgattaagaaaaacagaataattctgaaagaaagaaaacaaagaaaaacatactccagaattcctaatagaacacttcacctgaacctaaaatggtgagcgagagtcaccatgaggccctggcagccccgcctgtcaccactgtcgcgactgttctgccaagcaacgccacagagccagccagtcctggagaaggaaaggaagatgcattttctaagctgaaggagaagtttatgaatgagttgcataaaattccattgccaccgtgggccttaattgcaatagccatagtcgcagtccttttagtcctgacctgctgcttttgtatctgtaagaaatgtttgttcaaaaagaaaaacaagaagaagggaaagga

SEQ ID NO: 188139 - DNA, 2718 bp, Homo sapiens
  Payload ID: 17023
  Gene Symbol: SYT1
  Gene Name: synaptotagmin I
  Uniprot ID: P21579
  ENST ID: ENST00000552744
  CDS Start-End: 280-1548
atcttggctcctccctgattctaccaccaagaataaaatagttgtttgtcccctacagtagaacaagtttgcccattcatccttgtgatagatatgcatgcaaaaccaaaatgaaatcaaatccccacagatggctcgtaagtcaaaaacactgtttaattctttcactgcatccctttgggaagcctggcccttgaaaaacagaataattctgaaagaaagaaaacaaagaaaaacatactccagaattcctaatagaacacttcacctgaacctaaaatggtgagcgagagtcaccatgaggccctggcagccccgcctgtcaccactgtcgcgactgttctgccaagcaacgccacagagccagccagtcctggagaaggaaaggaagatgcattttctaagctgaaggagaagtttatgaatgagttgcataaaattccattgccaccgtgggccttaattgcaatagccatagtcgcagtccttttagtcctgacctgctgcttttgtatctgtaagaaatgtttgttcaaaaagaaaaacaagaagaagggaaaggaaaaaggagggaagaatgccattaacatgaaagatgtaaaagacttagggaagacgatgaaagatcaggccctcaaggatgatgatgctgaaactggattgacagatggagaagaaaaagaagaacccaaagaagaggagaaactgggaaaacttcagtattcactggattatgatttccaaaataaccagctgctggtagggatcattcaggctgccgaactgcccgccttggacatggggggcacatctgatccttacgtgaaagtgtttctgctacctgataagaagaagaaatttgagacaaaagtccaccgaaaaacccttaatcctgtcttcaatgagcaatttactttcaaggtaccatactcggaattgggtggcaaaaccctagtgatggctgtatatgattttgatcgtttctctaagcatgacatcattggagaatttaaagtccctatgaacacagtggattttggccatgtaactgaggaatggcgtgacctgcaaagtgctgagaaggaagagcaagagaaattgggtgatatctgcttctcccttcgctacgtacctactgctggtaagctgactgttgtcattctggaggcaaagaacctgaagaagatggatgtgggtggcttatccgatccttatgtgaagattcatctgatgcagaatggtaagaggctgaagaagaaaaagacaacaattaaaaagaacacacttaacccctactacaatgagtcattcagctttgaagtaccttttgaacaaatccagaaagtgcaggtggtggtaactgttttggactatgacaagattggcaagaacgatgccatcggcaaagtctttgtgggctacaacagcaccggcgcggagctgcgacactggtcagacatgctggccaaccccaggcgacctattgcccagtggcacaccctgcaggtagaggaggaagttgatgccatgctggccgtcaagaagtaaaggaaagaagaagcctttctgcatttgcccatatagtgctctttagccagtatctgtaaatacctcagtaatatgggtcctttcatttttccagccatgcattcctaacacaattcagtggtacttggaatcctgttttaatttgcacaaatttaaatgtagagagcccctaagtccttcatcataccactgccctccaaatctactcttcttttaagcaatatgatgtgtagatagagcatgaatgaaattatttattgtatcacactgttgtatataccagtatgctaaagatttatttctagtttgtgtatttgtatgttgtaagcgtttcctaatctgtgtatatctagatgtttttaataagatgttctattttaaactatgtaaattgactgagatataggagagctgataatatattatacggtaaatatagtatcgtctgcattccagcaaaaatatcaactcgtaaggcactagtacagttaaactgacatcttaaaggacaacttaaacctgagctttctattgaatcatttgagtaccaagataaacttacaccacatacttggtgggtgaatccaattttgtagaattcctacacaggcaaaatagcatgatctgagcagcagcatccaggctgacctcaaggaagcatagccacaaaacagaatagcacctgtctgtacatatttacaaagctaaaataatggcttcactcttatatttgaggaagcaactgaacaggagtcaatgatttcatattactgcatatagaataacaacaaggtgttccgtgtgtgtgtgtgtgtgtgtgtgtgtgtgtgtgtgcacatttgtttggggatgggggagaagaagctaaggggagaagtcaacatttatgaaatattgcctgactatttaaaaagaaaaaagtagctctccattatcacctttatacaaaatgtacatcctgtgaattctgttccagatttcacacctacaataattccaaaaggtttgcacattagagtttgtaacaaaatattttattatataaaaccaggttagaaggaatgcaggatatttttaacacaacaatctgtgcttattacacaaaattactttgtggtaaacagacagtattgtaatcccatcaaaagatgaaagaaaaacaaaaacaaa

SEQ ID NO: 188140 - DNA, 579 bp, Homo sapiens
  Payload ID: 17023
  Gene Symbol: SYT1
  Gene Name: synaptotagmin I
  ENST ID: ENST00000551304
  CDS Start-End: 362-579
ctctctctctcaagggaaaacgggaaaactagcaagagctagcaagaactagcaagagcttgaacaaacgcctggactcagattggaagactgctcatttgtctactgcctcattcctggaaattgcactggaactgtctgattaagcctcctttcactccgtgcccaattcctgcagttgttgctgaggtttaccagatggattaaaagaaaaaataagaagtggctccaaacataaaaacagaataattctgaaagaaagaaaacaaagaaaaacatactccagaattcctaatagaacaatacagaaactgaggtacacagagccatttaccccaggtcaacttcacctgaacctaaaatggtgagcgagagtcaccatgaggccctggcagccccgcctgtcaccactgtcgcgactgttctgccaagcaacgccacagagccagccagtcctggagaaggaaaggaagatgcattttctaagctgaaggagaagtttatgaatgagttgcataaaattccattgccaccgtgggccttaattgcaatagccatagtcgcagtccttttagtcct

SEQ ID NO: 188141 - DNA, 726 bp, Homo sapiens
  Payload ID: 17023
  Gene Symbol: SYT1
  Gene Name: synaptotagmin I
  ENST ID: ENST00000552624
  CDS Start-End: 206-726
attcatccttgtgatagatatgcatgcaaaaccaaaatgaaatcaaatccccacagatggctcgtaagtcaaaaacactgtttaattctttcactgcatccctttgggaagcctggcccttgaaaaacagaataattctgaaagaaagaaaacaaagaaaaacatactccagaattcctaatagaacacttcacctgaacctaaaatggtgagcgagagtcaccatgaggccctggcagccccgcctgtcaccactgtcgcgactgttctgccaagcaacgccacagagccagccagtcctggagaaggaaaggaagatgcattttctaagctgaaggagaagtttatgaatgagttgcataaaattccattgccaccgtgggccttaattgcaatagccatagtcgcagtccttttagtcctgacctgctgcttttgtatctgtaagaaatgtttgttcaaaaagaaaaacaagaagaagggaaaggaaaaaggagggaagaatgccattaacatgaaagatgtaaaagacttagggaagacgatgaaagatcaggatgatgatgctgaaactggattgacagatggagaagaaaaagaagaacccaaagaagaggagaaactgggaaaacttcagtattcactggattatgatttccaaaataaccagctgctggtagggatcattcaggctgccgaactgcccgccttggacatggggggcac

SEQ ID NO: 188142 - DNA, 506 bp, Homo sapiens
  Payload ID: 17023
  Gene Symbol: SYT1
  Gene Name: synaptotagmin I
  ENST ID: ENST00000547046
  CDS Start-End: 333-506
attttggaggaatctttggcattctgaatcatcctcctataacactttcccatccaggccccacccaactaatttttaatcataatttagatctcaacacaaaggctggcacaaagggaaaacgggaaaactagcaagagctagcaagaactagcaagagcttgaacaaacgcctggactcagattggaagactgctcatttgtctactgcctcattcctggaaattgcactggaactgtctgattaagaaaaacagaataattctgaaagaaagaaaacaaagaaaaacatactccagaattcctaatagaacacttcacctgaacctaaaatggtgagcgagagtcaccatgaggccctggcagccccgcctgtcaccactgtcgcgactgttctgccaagcaacgccacagagccagccagtcctggagaaggaaaggaagatgcattttctaagctgaaggagaagtttatgaatgagttgcataaaattccattgccaccg

SEQ ID NO: 188143 - DNA, 710 bp, Homo sapiens
  Payload ID: 17023
  Gene Symbol: SYT1
  Gene Name: synaptotagmin I
  ENST ID: ENST00000549671
  CDS Start-End: 494-710
aacagaagatgtcagaatgatatgaaaaagttgctcttttgaaatgtttgttcttctagatttttttaaaatgtcagcatgattcatacctattggttcttagcctggagcacccagcacaaccaggaattgaggaagctagagcaggatgtgaataacgaatgggctgcataagcagaagtctatacccagtcaataagcagaagtctatacccagtcagtgtgcagagttgcaggctagcattttcacagattctattattctctctctctcaagggaaaacgggaaaactagcaagagctagcaagaactagcaagagcttgaacaaacgcctggactcagattggaagactgctcatttgtctactgcctcattcctggaaattgcactggaactgtctgattaagaaaaacagaataattctgaaagaaagaaaacaaagaaaaacatactccagaattcctaatagaacacttcacctgaacctaaaatggtgagcgagagtcaccatgaggccctggcagccccgcctgtcaccactgtcgcgactgttctgccaagcaacgccacagagccagccagtcctggagaaggaaaggaagatgcattttctaagctgaaggagaagtttatgaatgagttgcataaaattccattgccaccgtgggccttaattgcaatagccatagtcgcagtccttttagtcc

SEQ ID NO: 188144 - DNA, 7614 bp, Homo sapiens
  Payload ID: 17024
  Gene Symbol: SYT2
  Gene Name: synaptotagmin II
  Uniprot ID: Q8N9I0
  ENST ID: ENST00000367267
  CDS Start-End: 194-1453
atagagagagggagagactcgagagcgagcgagcgcgggagcgagggccgcagcggcagggccggcggggaagtgggaagagggacctggacttcgggaccccagctgtccccgcccccgcccccgcccccgccctctccaccagctcaggctgaacgcgcccggaacgtcccaggctgtttcctctgccaccatgaggaacattttcaagaggaaccaggagcctattgtggctcctgccaccaccaccgccacgatgcccattggacccgtggacaactccactgagagtgggggtgctggggagagccaggaggacatgtttgccaaactgaaggagaagttattcaatgagataaacaagattcccttaccaccctgggcactgatcgccattgctgtggttgctgggctcctgcttctcacctgctgcttctgcatctgcaagaaatgctgctgcaagaagaagaagaacaagaaggagaagggcaaaggcatgaagaatgccatgaacatgaaggacatgaaagggggtcaggatgacgacgacgcagagacaggcctgactgagggggaaggtgaaggggaggaggagaaagagccagagaacctgggcaaactgcagttttccctggactatgattttcaggctaatcagcttactgtgggcgttctgcaggctgctgaactgcctgccctggacatgggaggcacctcagacccttatgtcaaggtcttcctccttcctgacaagaagaagaaatatgagaccaaagtccatcggaagacactgaaccctgccttcaatgaaaccttcaccttcaaggtgccataccaggagcttgggggcaaaactctggtgatggccatctatgactttgaccgcttctccaaacatgacatcattggagaggtaaaggtgcctatgaacacagtggacctcggccagcccattgaggagtggagagacctgcaaggcggggaaaaggaggagccggagaagctgggcgacatctgcacctccctgcgctatgtgcccacggccgggaagctcactgtctgcatcctggaggctaagaacctcaagaagatggacgtgggcggcctttcagacccgtacgtgaagatccacctgatgcagaatggcaagaggctcaagaagaagaagacaaccgtgaagaagaagaccctgaacccatacttcaacgagtccttcagctttgagatccccttcgagcagattcagaaagtccaggtagtggtcaccgtgctggactatgacaagctgggcaagaacgaagccataggcaagatcttcgtgggcagcaatgccacgggcacagagctgcggcactggtccgacatgctggccaacccccggaggcccatcgcccagtggcactcgctcaagcctgaggaggaggtggatgcactcctgggcaagaacaagtagacagcagcggctgggaccccacacctttcacggacactgacaagatccagagctatcaatacctcagttatgcaaccttagaggttttcttttttctttcatttgttgggtggttgtgtccttgtttttccttgtttttctctttttaaagaccaacttccctttgatggctgtgtgaggagagtcccctaagaggtgaaagagaagcctggctctgttcacggtcccaggagctgtccttgctgcatgccctgtcacagttccctcgactctttcaaagcttcacatctgcctcaccccaagcgaggctctctactggcacaaacttgcagcagttcctgttttttgagccttctggaccaacaaaatggcagcacatcctgcttcctgacagggaaggcatcacagtggccaatgatcgtgtgtgtgtgtgtgtgtgtgtgtgtgtatgtgtgtgtgtgtgtgtgtgtgtgtgtgtgtgtgtgtgtctttgagcatttctcttcattcctggaatgtgtgtgtgtgtgtgtctctttgagcatctctcttcattcctggaatgagccatggacagtaaagttgtgtgggaaaagaaggctctttggggaccctgacatgaagaagtccactaagtgggagatcttctctcatctatggcaaagtctcaggatcctgttcagatatcggggctttcatactcctgttggtggctatttgggaggcagcaagatgtgaagactggatgtgttcagaactaggaccaaacgatgccatcaaatacttcctcctgccagtcatggtttccccagaagtgtagttcctgggacattcatggatatgagctattcactagttgggtcagactaacagggactctcagtcccaaaatctcactcttattgacaataaatatcaaactatgaagaaacagaagtcccattaccagaaagaccaaaattaaactcctggatcttcaccccatccagtgggaaacacagatgctttctccctttccagaatataagcagccaagttcatttgcatttattccccattgtgcttttgcttctgtttctcttttaagtggagcaacactgtctgaagacacgttatctgtgcagagccagagaactttaaaaggaaagtttaaatgttcttagttctcctgaggtccaggtaagaagggggtggtaagaagaggatgggggacagatggctgagatcccttgggaggagatataggggagcactggaattcccccgactcccactccttgctcccttggccctctgccctccatgctggagagctgataggtagctggagtggcccagggagacctatgggaaggacccgtcctaccattagggggcttctctctatgaatgctaagaaacaaagggcatccattccaaatgagtagcagaggtgaccttctagggtttctacccatgctcagttgtatcccattccctgttcaccttttgtccccagcactgatataaaagccatatatatgttagtcaggtttgcactgagtcttcttccaatccttcagcctggacaacagagtgaggtccccttgtggccagaggccagccctccttgcctgccttcctttgacctctcttttccatccatgaagccctcaggcccttgccattttttcaccacagaaaactcatggcttctccagaagcctgagtatctctctttcccagcacaaatggcagcatctctatcctgccccatctgggccacttcagcttcctgtagacacccaagacagatggacagtgttggagggaatcaggctttgaggatccagtgtgaagaagttgcagagtgtctttttattttattttaaaaagggggaaggggcttttggttttgctttgttttttggatgaaggagtgagggaaatgagggaatacccccaccagaaacagactggaaagcctgcctgtctcttggagatccttctttgtcttgttagtggtacatgggaagttatgtttttactggtgtgtgtgtgtgtgtgtgtgtgtgtacttaatgatgggaaggtaagactctgatcaggattatgaactgcggtccttgggaccaaaggtgtggtcatggtagagagttgtaggacaatagggtgttttcagaatctgggtggccacagagtgggatttcctggtatggacatcagaagtcactggactcttctcccaaccccagagttatgggattttggtgctttctcagggtctctccccagactcactcttctcacccatatcccacagactcactcatggagacccccttgtcaatatcccctctacctttactcctttgccctttcccaattcatcttctaccacctggattcttttccattcatgaacttcattcagcccttccaaagcccaagatttgcattcccttgacagggaggaaaggcaatggtaggaacctctggtggtctgggtgtctatgtgcctggtgaccagggctggatttttattactctgagcccactgctagtgaggagccttgaggggtggggacaggttgctgagtgattttgaacgttgacaccagtgtggagccagtgtgggtgtggggagcagtgccttcctcaggtcccagctggtcctgatatgccacgtagtggatggcatctgtcttggtccatgggcttggtgggaacatgcttctgcttgtgtgttttccatacctgagggctgacgtagcttaaaccacagggcatcatgccaaacactcactgctgggcaggtttatttctggggatgtcagggtactggggtgtaggcactaagcaggatagagttagggtgtctggctagtaaggggttctggacgcctctggggctgtgagttttcatctcaaagtctgttccagagaaaggaaagtagtatagaggtgatttttagagaagctgagaccatgaaaacaagcctaatcccatccagaaactggggtaaagtctgaaagttcgttttcttcttcctccctgaataattgttccagaagggatgctaactctgccagagctacaggcagatttttgggctttggaagtggaagctgaggcctggggaaggctgggtaaggaatgctggggcaatctcagacagtaggcaggtgcttggcatgaatgagaagtgactttcctggagtccctcagtagaggatgagatagcagggattaggccacagtctcagatcctgatcttttttcttcctaggaaagcatacataacttgtgtctgcagaatcagtgtgggatgattttgctggcccaaggcttcagcgagagggagaagagaggtcactacagccctcctgtgggtaaaagcagctctcttataaacctgcctccatgcagtggggtgggggtaagggtgggtgacagcaaagaggttgaggaacctccctgggtttggggagtgagagcttccatgttcccttaatgtcctaggttaattcataaggcatctgagtcctgggtctcacccagcctcacagagagaaaaactgtccctgagggtgtcccctcccactcaaaggtagaaagagattgagccaggaactgccctcatatcctctgctctgccccttcccttccctttcctctgcccctcccacctaaagctgtttggggccctttctcagagccctgggtggtggcaggcagggaggagtcccaagatcctggtggccctgagccccatgctatggttgccagatttggcaaataaaaatacaggatgtccagttacatttgaatttcagttcaacaacaaacaattattaagtgtaaatatgtcctaggcaaatagttgggacatatactaaaaaataatttgttgtttatctgaaattcaaatgtaactggtcatcctgcattgtgtctgggaaccctaccctatgacttttccccctctccctttggtcccaaggggccaggaaccccaaggatttgacttaaccagttttttgaactgcaatattgagaaggggacactgtgacttgaagacacatgaattactttattttttaagcaacaacaaaataagaaccttctgaagccatttgagcctcatctgcccccatccgtgtatatttaattatatataaaagaagataattacctagaaacatatgaacagaatcttgtttaatcaagatgcatgtctataactttctgtaaatagccgcatggcaatgctgagagtccccttgatccccaacctcaaacccattttacagaactggttgaggctgctcctttgattttatgtcgtgtaaagtctttgttccccagccccacccctgcctcctcccatcgggaaaccccccatgggagtcatcagtgggcgggagtcggtgcctgctccagtccagccctgccttgggagatgctggaggaccctgtcgccctgaaggcctgtttgctgcacatctgcctgcagagccaaacctcagggcccggtgcagtgtccagcctggtatctggcatcccagtagcttccatgttctgtgtatgtgtgtggtgtgccccttcctcccactgtttgaattcactgaaaagccataaagggggcctcctgctggagatttggcctcccttggctcctcccaggagcccccatgtctctccaactggctccccacagaccacttctgaagggctcacctgttgtcactccctcctgctccctcagtcccgtgtcatgagaatggacggtgtccagggcttccggtggggtctcaggagatgcccatgctggccctgcccgagctggctttctcggcctgggttcacagttcagctccatctctacgctgggcgaggagcagacagcagtgggactccatggttctggatacctttcctggggtccctgtggaggcaaccaggattttcaggagcagccagtcagcagctcagccagggatgacagaaccatccctgcttactcacctctgtagtgtgagggtctgtgggtggtgatggaggagggactcagggagaggccggtgaatacaggggctgacgctcttccctcgtgcatcctcctgcagtctgacagaaagcagcccaatagcggggcaacctcagggctaccagcgatcccctgagagtggggtgggcaggttcagctgtgagagaggctcaggcagagcaggtgtggactaagtcccctgaccttcacacctgctccccagagaagccccagccagttgcaccaagtagcagaggtgagtagaggggcctgggggcttccaaggccccaggtcatcctgttgaactgagagggacaggtagcccccctgcctgcggcccctggccccatgggcacctgagggcagtactgcatgggaagagcccaggatgcctcaggcctggcaactgtgacaagtatgaggaaggagagagaacgggaagggaatcaggcagggcgcattcgaggaggccagaggtggcgaggcaggcttgccctgcacaaaccacaacagaagttgcacacagaagtcccagggacctttgtgctgggaactgaaagagtggggaaggtggaggggaccatttcagagcaggctggaatcaggtgcttggaccagtgaagacatgtcttgcttcctccagctctctctggggccctcccactctccacacccacagcagagacaaattgaggcaagagttgagagagcatctgtctggtgaggtgatgggagcagtgtgcatggggcaccaggagttcctccatcccacctgccttagcgatcaggactttaggggggcctcttcaaagatagtgacccttctgccctgactcctgcccatctaaggacttgatttgctgctttctgaaaaccctggggctgaaaacttcaaaatcagggcctggcagagcctagcttcgccaaggtcagcccaccaggagccctgccttcgtctccataggaaggacacatgtacagcccttgcccccggccctctcattcccacttctgcttggcaatgctctccatctcccttatgtggactcttgttcttgtctgatctcttgtcaaattgttattttgtaatgaactgcgtctccttattaaagaaatgagctgaaagaaa

SEQ ID NO: 188145 - DNA, 7598 bp, Homo sapiens
  Payload ID: 17024
  Gene Symbol: SYT2
  Gene Name: synaptotagmin II
  Uniprot ID: Q8N9I0
  ENST ID: ENST00000367268
  CDS Start-End: 178-1437
acttcggagccgagttggggcagcggtggagcggggacttcgcgcccccaggggaacgggcgcccctgcgaaaccgtcgccagccacgcgtccttgccgtccgacgccccctcacattggagaccccggatctctcccgcctccttcgggtcgctctccgctgtttcctctgccaccatgaggaacattttcaagaggaaccaggagcctattgtggctcctgccaccaccaccgccacgatgcccattggacccgtggacaactccactgagagtgggggtgctggggagagccaggaggacatgtttgccaaactgaaggagaagttattcaatgagataaacaagattcccttaccaccctgggcactgatcgccattgctgtggttgctgggctcctgcttctcacctgctgcttctgcatctgcaagaaatgctgctgcaagaagaagaagaacaagaaggagaagggcaaaggcatgaagaatgccatgaacatgaaggacatgaaagggggtcaggatgacgacgacgcagagacaggcctgactgagggggaaggtgaaggggaggaggagaaagagccagagaacctgggcaaactgcagttttccctggactatgattttcaggctaatcagcttactgtgggcgttctgcaggctgctgaactgcctgccctggacatgggaggcacctcagacccttatgtcaaggtcttcctccttcctgacaagaagaagaaatatgagaccaaagtccatcggaagacactgaaccctgccttcaatgaaaccttcaccttcaaggtgccataccaggagcttgggggcaaaactctggtgatggccatctatgactttgaccgcttctccaaacatgacatcattggagaggtaaaggtgcctatgaacacagtggacctcggccagcccattgaggagtggagagacctgcaaggcggggaaaaggaggagccggagaagctgggcgacatctgcacctccctgcgctatgtgcccacggccgggaagctcactgtctgcatcctggaggctaagaacctcaagaagatggacgtgggcggcctttcagacccgtacgtgaagatccacctgatgcagaatggcaagaggctcaagaagaagaagacaaccgtgaagaagaagaccctgaacccatacttcaacgagtccttcagctttgagatccccttcgagcagattcagaaagtccaggtagtggtcaccgtgctggactatgacaagctgggcaagaacgaagccataggcaagatcttcgtgggcagcaatgccacgggcacagagctgcggcactggtccgacatgctggccaacccccggaggcccatcgcccagtggcactcgctcaagcctgaggaggaggtggatgcactcctgggcaagaacaagtagacagcagcggctgggaccccacacctttcacggacactgacaagatccagagctatcaatacctcagttatgcaaccttagaggttttcttttttctttcatttgttgggtggttgtgtccttgtttttccttgtttttctctttttaaagaccaacttccctttgatggctgtgtgaggagagtcccctaagaggtgaaagagaagcctggctctgttcacggtcccaggagctgtccttgctgcatgccctgtcacagttccctcgactctttcaaagcttcacatctgcctcaccccaagcgaggctctctactggcacaaacttgcagcagttcctgttttttgagccttctggaccaacaaaatggcagcacatcctgcttcctgacagggaaggcatcacagtggccaatgatcgtgtgtgtgtgtgtgtgtgtgtgtgtgtatgtgtgtgtgtgtgtgtgtgtgtgtgtgtgtgtgtgtgtctttgagcatttctcttcattcctggaatgtgtgtgtgtgtgtgtctctttgagcatctctcttcattcctggaatgagccatggacagtaaagttgtgtgggaaaagaaggctctttggggaccctgacatgaagaagtccactaagtgggagatcttctctcatctatggcaaagtctcaggatcctgttcagatatcggggctttcatactcctgttggtggctatttgggaggcagcaagatgtgaagactggatgtgttcagaactaggaccaaacgatgccatcaaatacttcctcctgccagtcatggtttccccagaagtgtagttcctgggacattcatggatatgagctattcactagttgggtcagactaacagggactctcagtcccaaaatctcactcttattgacaataaatatcaaactatgaagaaacagaagtcccattaccagaaagaccaaaattaaactcctggatcttcaccccatccagtgggaaacacagatgctttctccctttccagaatataagcagccaagttcatttgcatttattccccattgtgcttttgcttctgtttctcttttaagtggagcaacactgtctgaagacacgttatctgtgcagagccagagaactttaaaaggaaagtttaaatgttcttagttctcctgaggtccaggtaagaagggggtggtaagaagaggatgggggacagatggctgagatcccttgggaggagatataggggagcactggaattcccccgactcccactccttgctcccttggccctctgccctccatgctggagagctgataggtagctggagtggcccagggagacctatgggaaggacccgtcctaccattagggggcttctctctatgaatgctaagaaacaaagggcatccattccaaatgagtagcagaggtgaccttctagggtttctacccatgctcagttgtatcccattccctgttcaccttttgtccccagcactgatataaaagccatatatatgttagtcaggtttgcactgagtcttcttccaatccttcagcctggacaacagagtgaggtccccttgtggccagaggccagccctccttgcctgccttcctttgacctctcttttccatccatgaagccctcaggcccttgccattttttcaccacagaaaactcatggcttctccagaagcctgagtatctctctttcccagcacaaatggcagcatctctatcctgccccatctgggccacttcagcttcctgtagacacccaagacagatggacagtgttggagggaatcaggctttgaggatccagtgtgaagaagttgcagagtgtctttttattttattttaaaaagggggaaggggcttttggttttgctttgttttttggatgaaggagtgagggaaatgagggaatacccccaccagaaacagactggaaagcctgcctgtctcttggagatccttctttgtcttgttagtggtacatgggaagttatgtttttactggtgtgtgtgtgtgtgtgtgtgtgtgtacttaatgatgggaaggtaagactctgatcaggattatgaactgcggtccttgggaccaaaggtgtggtcatggtagagagttgtaggacaatagggtgttttcagaatctgggtggccacagagtgggatttcctggtatggacatcagaagtcactggactcttctcccaaccccagagttatgggattttggtgctttctcagggtctctccccagactcactcttctcacccatatcccacagactcactcatggagacccccttgtcaatatcccctctacctttactcctttgccctttcccaattcatcttctaccacctggattcttttccattcatgaacttcattcagcccttccaaagcccaagatttgcattcccttgacagggaggaaaggcaatggtaggaacctctggtggtctgggtgtctatgtgcctggtgaccagggctggatttttattactctgagcccactgctagtgaggagccttgaggggtggggacaggttgctgagtgattttgaacgttgacaccagtgtggagccagtgtgggtgtggggagcagtgccttcctcaggtcccagctggtcctgatatgccacgtagtggatggcatctgtcttggtccatgggcttggtgggaacatgcttctgcttgtgtgttttccatacctgagggctgacgtagcttaaaccacagggcatcatgccaaacactcactgctgggcaggtttatttctggggatgtcagggtactggggtgtaggcactaagcaggatagagttagggtgtctggctagtaaggggttctggacgcctctggggctgtgagttttcatctcaaagtctgttccagagaaaggaaagtagtatagaggtgatttttagagaagctgagaccatgaaaacaagcctaatcccatccagaaactggggtaaagtctgaaagttcgttttcttcttcctccctgaataattgttccagaagggatgctaactctgccagagctacaggcagatttttgggctttggaagtggaagctgaggcctggggaaggctgggtaaggaatgctggggcaatctcagacagtaggcaggtgcttggcatgaatgagaagtgactttcctggagtccctcagtagaggatgagatagcagggattaggccacagtctcagatcctgatcttttttcttcctaggaaagcatacataacttgtgtctgcagaatcagtgtgggatgattttgctggcccaaggcttcagcgagagggagaagagaggtcactacagccctcctgtgggtaaaagcagctctcttataaacctgcctccatgcagtggggtgggggtaagggtgggtgacagcaaagaggttgaggaacctccctgggtttggggagtgagagcttccatgttcccttaatgtcctaggttaattcataaggcatctgagtcctgggtctcacccagcctcacagagagaaaaactgtccctgagggtgtcccctcccactcaaaggtagaaagagattgagccaggaactgccctcatatcctctgctctgccccttcccttccctttcctctgcccctcccacctaaagctgtttggggccctttctcagagccctgggtggtggcaggcagggaggagtcccaagatcctggtggccctgagccccatgctatggttgccagatttggcaaataaaaatacaggatgtccagttacatttgaatttcagttcaacaacaaacaattattaagtgtaaatatgtcctaggcaaatagttgggacatatactaaaaaataatttgttgtttatctgaaattcaaatgtaactggtcatcctgcattgtgtctgggaaccctaccctatgacttttccccctctccctttggtcccaaggggccaggaaccccaaggatttgacttaaccagttttttgaactgcaatattgagaaggggacactgtgacttgaagacacatgaattactttattttttaagcaacaacaaaataagaaccttctgaagccatttgagcctcatctgcccccatccgtgtatatttaattatatataaaagaagataattacctagaaacatatgaacagaatcttgtttaatcaagatgcatgtctataactttctgtaaatagccgcatggcaatgctgagagtccccttgatccccaacctcaaacccattttacagaactggttgaggctgctcctttgattttatgtcgtgtaaagtctttgttccccagccccacccctgcctcctcccatcgggaaaccccccatgggagtcatcagtgggcgggagtcggtgcctgctccagtccagccctgccttgggagatgctggaggaccctgtcgccctgaaggcctgtttgctgcacatctgcctgcagagccaaacctcagggcccggtgcagtgtccagcctggtatctggcatcccagtagcttccatgttctgtgtatgtgtgtggtgtgccccttcctcccactgtttgaattcactgaaaagccataaagggggcctcctgctggagatttggcctcccttggctcctcccaggagcccccatgtctctccaactggctccccacagaccacttctgaagggctcacctgttgtcactccctcctgctccctcagtcccgtgtcatgagaatggacggtgtccagggcttccggtggggtctcaggagatgcccatgctggccctgcccgagctggctttctcggcctgggttcacagttcagctccatctctacgctgggcgaggagcagacagcagtgggactccatggttctggatacctttcctggggtccctgtggaggcaaccaggattttcaggagcagccagtcagcagctcagccagggatgacagaaccatccctgcttactcacctctgtagtgtgagggtctgtgggtggtgatggaggagggactcagggagaggccggtgaatacaggggctgacgctcttccctcgtgcatcctcctgcagtctgacagaaagcagcccaatagcggggcaacctcagggctaccagcgatcccctgagagtggggtgggcaggttcagctgtgagagaggctcaggcagagcaggtgtggactaagtcccctgaccttcacacctgctccccagagaagccccagccagttgcaccaagtagcagaggtgagtagaggggcctgggggcttccaaggccccaggtcatcctgttgaactgagagggacaggtagcccccctgcctgcggcccctggccccatgggcacctgagggcagtactgcatgggaagagcccaggatgcctcaggcctggcaactgtgacaagtatgaggaaggagagagaacgggaagggaatcaggcagggcgcattcgaggaggccagaggtggcgaggcaggcttgccctgcacaaaccacaacagaagttgcacacagaagtcccagggacctttgtgctgggaactgaaagagtggggaaggtggaggggaccatttcagagcaggctggaatcaggtgcttggaccagtgaagacatgtcttgcttcctccagctctctctggggccctcccactctccacacccacagcagagacaaattgaggcaagagttgagagagcatctgtctggtgaggtgatgggagcagtgtgcatggggcaccaggagttcctccatcccacctgccttagcgatcaggactttaggggggcctcttcaaagatagtgacccttctgccctgactcctgcccatctaaggacttgatttgctgctttctgaaaaccctggggctgaaaacttcaaaatcagggcctggcagagcctagcttcgccaaggtcagcccaccaggagccctgccttcgtctccataggaaggacacatgtacagcccttgcccccggccctctcattcccacttctgcttggcaatgctctccatctcccttatgtggactcttgttcttgtctgatctcttgtcaaattgttattttgtaatgaactgcgtctccttattaaagaaatgagctgaaagaaa

SEQ ID NO: 188146 - DNA, 2915 bp, Homo sapiens
  Payload ID: 17025
  Gene Symbol: SYT3
  Gene Name: synaptotagmin III
  Uniprot ID: Q9BQG1
  ENST ID: ENST00000338916
  CDS Start-End: 635-2407
actctatgtctcctctcgttggattgtgacaccgggaggtcagggaactccaggaccttgttctctgctggattcgcagcaaccagcacagcacgtagggcgtagttggtgctggatggatgtttgttgaatgaatgaatgatgaatggctggcaccttgtctgctcatccctaactcctgttccttcatctgtgcagccctaatctttgtttcctcatctgtccatccctttatttgtgcatcctcattcttagccccttcactgcccttctccatctcttcctccttgttcatttgtccctgttctctgtcctctactccactcatgcccatctctgtccccttgacttacccagtccctgctactatctccatccctaatttctgccctcttgtctgtctactcctaattccttttccttgtccatccctaatacctgtcaccttgtccttcttcctcgaatctccatccctaatccatctgcccctaatctctgtcccctttgcccatccttccttttctcggtgtctctttccacccttatctccacacctgcccaccctgcactcccattctgtttcccatctgcacccttgccccatccctcccacacacaggaccagacggccaccatgtcaggagactacgaggatgacctctgccggcgggcactcatcctggtctcggacctctgtgcgcgggtccgagatgctgacaccaacgacaggtgccaggagttcaatgaccgaatccgaggctatccccggggtccagatgcagacatctccgtgagcctgctgtcggtcatcgtgacattctgtggcattgtccttctgggtgtctctctcttcgtgtcctggaagttgtgctgggtgccctggcgggacaagggaggctcggcagtgggcggtggccccctgcgcaaagacctaggccctggtgtcgggctggcaggcctggtaggcggaggcgggcaccacctggcggctggcctgggtggccatcctctgctgggcggcccacaccaccatgcccatgccgcccaccatccaccctttgctgagctgctggagccaggcagcctggggggttctgacacccctgagccctcctacttggacatggactcgtatccagaggctgcagcagcagcagtggccgctggggtcaaaccgagccaaacatcccctgagctgccctctgaggggggagcaggctctgggttgctcctgctgccccccagtggtgggggcttgcccagtgcccagtcacatcagcaggtcacaagcctggcacccactaccaggtacccagccctgccccgacccctcacccagcagactctgacctcccagccggaccccagcagtgaggagcggccacctgccctgcccttacccctgcctggaggcgaggaaaaagccaaactcattgggcagattaagccagagctgtaccaggggactggccctggtggccggcggagcggtgggggcccaggctctggagaggcaggcacaggggcaccctgtggccgtatcagcttcgccctgcggtacctctatggctcggaccagctggtggtgaggatcctgcaggccctggacctccctgccaaggactccaacggcttctcagacccctacgtcaagatctacctgctgcctgaccgcaagaaaaagtttcagaccaaggtgcacaggaagaccctgaaccccgtcttcaatgagacgtttcaattctcggtgcccctggccgagctggcccaacgcaaactgcacttcagcgtctatgactttgaccgcttctcgcggcacgacctcatcggccaggtggtgctggacaacctcctggagctggccgagcagccccctgaccgcccgctctggagggacatcgtggagggcggctcggaaaaagcagatcttggggagctcaacttctcactctgctacctccccacggccgggcgcctcaccgtgaccatcatcaaagcctctaacctcaaagcgatggacctcactggcttctcagacccctacgtgaaggcctccctgatcagcgaggggcggcgtctgaagaagcggaaaacctccatcaagaagaacacgctgaaccccacctataatgaggcgctggtgttcgacgtggcccccgagagcgtggagaacgtggggctcagcatcgccgtggtagactacgactgcatcgggcacaacgaggtgatcggcgtgtgccgtgtgggccccgacgctgccgacccgcacggccgcgagcactgggcagagatgctggccaatccccgcaagcccgtggagcactggcatcagctagtggaggaaaagactgtgaccagcttcacaaaaggcagcaaaggactatcagagaaagagaactccgagtgaggggtctggcctaggcccgggatcggaccaggctccctcaggaccccatcctttcctgcccggaccgtgaattcatctccttgaagccataacgtccgagctgctggtgcggggcagccctggccctaggcttcctaaccctggaagcgagaggatgagaggaggccggcccagctccttctttcagggtgggggtcattcagcctccactgtgtctgtcttttcttccctggggctccccctcgaggcgaggggccatgcatgtctgggggacccctgccccccaaaaccctctgtctgtctctgtctctttgctgtttgtccaagactcagtgtcccgacccttgttctcgccgtgaatgtcaatgggccaatcctctctgtcctttcagacacacacacacctgtgtccaccccttctgttcgccacacccctgcgtctggccggtccccccactgctgctgctatcaacgccagaataaacacactctgtgggtctcactccaa

SEQ ID NO: 188147 - DNA, 2838 bp, Homo sapiens
  Payload ID: 17025
  Gene Symbol: SYT3
  Gene Name: synaptotagmin III
  Uniprot ID: Q9BQG1
  ENST ID: ENST00000544769
  CDS Start-End: 560-2332
gaggcggcggcggcggcggctcctcgcccagccccgccccggcccctagatcagacattctctctcattacccggcgcgtgggaacgggtccacagccccttgtccgccctagaacccccatgggctgccgcccgccgccgcctcggctgccacccaggacacggcagagataagcgcagccccttcactgcccttctccatctcttcctccttgttcatttgtccctgttctctgtcctctactccactcatgcccatctctgtccccttgacttacccagtccctgctactatctccatccctaatttctgccctcttgtctgtctactcctaattccttttccttgtccatccctaatacctgtcaccttgtccttcttcctcgaatctccatccctaatccatctgcccctaatctctgtcccctttgcccatccttccttttctcggtgtctctttccacccttatctccacacctgcccaccctgcactcccattctgtttcccatctgcacccttgccccatccctcccacacacaggaccagacggccaccatgtcaggagactacgaggatgacctctgccggcgggcactcatcctggtctcggacctctgtgcgcgggtccgagatgctgacaccaacgacaggtgccaggagttcaatgaccgaatccgaggctatccccggggtccagatgcagacatctccgtgagcctgctgtcggtcatcgtgacattctgtggcattgtccttctgggtgtctctctcttcgtgtcctggaagttgtgctgggtgccctggcgggacaagggaggctcggcagtgggcggtggccccctgcgcaaagacctaggccctggtgtcgggctggcaggcctggtaggcggaggcgggcaccacctggcggctggcctgggtggccatcctctgctgggcggcccacaccaccatgcccatgccgcccaccatccaccctttgctgagctgctggagccaggcagcctggggggttctgacacccctgagccctcctacttggacatggactcgtatccagaggctgcagcagcagcagtggccgctggggtcaaaccgagccaaacatcccctgagctgccctctgaggggggagcaggctctgggttgctcctgctgccccccagtggtgggggcttgcccagtgcccagtcacatcagcaggtcacaagcctggcacccactaccaggtacccagccctgccccgacccctcacccagcagactctgacctcccagccggaccccagcagtgaggagcggccacctgccctgcccttacccctgcctggaggcgaggaaaaagccaaactcattgggcagattaagccagagctgtaccaggggactggccctggtggccggcggagcggtgggggcccaggctctggagaggcaggcacaggggcaccctgtggccgtatcagcttcgccctgcggtacctctatggctcggaccagctggtggtgaggatcctgcaggccctggacctccctgccaaggactccaacggcttctcagacccctacgtcaagatctacctgctgcctgaccgcaagaaaaagtttcagaccaaggtgcacaggaagaccctgaaccccgtcttcaatgagacgtttcaattctcggtgcccctggccgagctggcccaacgcaaactgcacttcagcgtctatgactttgaccgcttctcgcggcacgacctcatcggccaggtggtgctggacaacctcctggagctggccgagcagccccctgaccgcccgctctggagggacatcgtggagggcggctcggaaaaagcagatcttggggagctcaacttctcactctgctacctccccacggccgggcgcctcaccgtgaccatcatcaaagcctctaacctcaaagcgatggacctcactggcttctcagacccctacgtgaaggcctccctgatcagcgaggggcggcgtctgaagaagcggaaaacctccatcaagaagaacacgctgaaccccacctataatgaggcgctggtgttcgacgtggcccccgagagcgtggagaacgtggggctcagcatcgccgtggtagactacgactgcatcgggcacaacgaggtgatcggcgtgtgccgtgtgggccccgacgctgccgacccgcacggccgcgagcactgggcagagatgctggccaatccccgcaagcccgtggagcactggcatcagctagtggaggaaaagactgtgaccagcttcacaaaaggcagcaaaggactatcagagaaagagaactccgagtgaggggtctggcctaggcccgggatcggaccaggctccctcaggaccccatcctttcctgcccggaccgtgaattcatctccttgaagccataacgtccgagctgctggtgcggggcagccctggccctaggcttcctaaccctggaagcgagaggatgagaggaggccggcccagctccttctttcagggtgggggtcattcagcctccactgtgtctgtcttttcttccctggggctccccctcgaggcgaggggccatgcatgtctgggggacccctgccccccaaaaccctctgtctgtctctgtctctttgctgtttgtccaagactcagtgtcccgacccttgttctcgccgtgaatgtcaatgggccaatcctctctgtcctttcagacacacacacacctgtgtccaccccttctgttcgccacacccctgcgtctggccggtccccccactgctgctgctatcaacgccagaataaacacactctgtgggtctcactcc

SEQ ID NO: 188148 - DNA, 2836 bp, Homo sapiens
  Payload ID: 17025
  Gene Symbol: SYT3
  Gene Name: synaptotagmin III
  Uniprot ID: Q9BQG1
  ENST ID: ENST00000593901
  CDS Start-End: 556-2328
ggcggcggcggcggcagcggcggcagcggcggctccggcccctagatcagacattctctctcattacccggcgcgtgggaacgggtccacagccccttgtccgccctagaacccccatgggctgccgcccgccgccgcctcggctgccacccaggacacggcagagataagcgcagccccttcactgcccttctccatctcttcctccttgttcatttgtccctgttctctgtcctctactccactcatgcccatctctgtccccttgacttacccagtccctgctactatctccatccctaatttctgccctcttgtctgtctactcctaattccttttccttgtccatccctaatacctgtcaccttgtccttcttcctcgaatctccatccctaatccatctgcccctaatctctgtcccctttgcccatccttccttttctcggtgtctctttccacccttatctccacacctgcccaccctgcactcccattctgtttcccatctgcacccttgccccatccctcccacacacaggaccagacggccaccatgtcaggagactacgaggatgacctctgccggcgggcactcatcctggtctcggacctctgtgcgcgggtccgagatgctgacaccaacgacaggtgccaggagttcaatgaccgaatccgaggctatccccggggtccagatgcagacatctccgtgagcctgctgtcggtcatcgtgacattctgtggcattgtccttctgggtgtctctctcttcgtgtcctggaagttgtgctgggtgccctggcgggacaagggaggctcggcagtgggcggtggccccctgcgcaaagacctaggccctggtgtcgggctggcaggcctggtaggcggaggcgggcaccacctggcggctggcctgggtggccatcctctgctgggcggcccacaccaccatgcccatgccgcccaccatccaccctttgctgagctgctggagccaggcagcctggggggttctgacacccctgagccctcctacttggacatggactcgtatccagaggctgcagcagcagcagtggccgctggggtcaaaccgagccaaacatcccctgagctgccctctgaggggggagcaggctctgggttgctcctgctgccccccagtggtgggggcttgcccagtgcccagtcacatcagcaggtcacaagcctggcacccactaccaggtacccagccctgccccgacccctcacccagcagactctgacctcccagccggaccccagcagtgaggagcggccacctgccctgcccttacccctgcctggaggcgaggaaaaagccaaactcattgggcagattaagccagagctgtaccaggggactggccctggtggccggcggagcggtgggggcccaggctctggagaggcaggcacaggggcaccctgtggccgtatcagcttcgccctgcggtacctctatggctcggaccagctggtggtgaggatcctgcaggccctggacctccctgccaaggactccaacggcttctcagacccctacgtcaagatctacctgctgcctgaccgcaagaaaaagtttcagaccaaggtgcacaggaagaccctgaaccccgtcttcaatgagacgtttcaattctcggtgcccctggccgagctggcccaacgcaaactgcacttcagcgtctatgactttgaccgcttctcgcggcacgacctcatcggccaggtggtgctggacaacctcctggagctggccgagcagccccctgaccgcccgctctggagggacatcgtggagggcggctcggaaaaagcagatcttggggagctcaacttctcactctgctacctccccacggccgggcgcctcaccgtgaccatcatcaaagcctctaacctcaaagcgatggacctcactggcttctcagacccctacgtgaaggcctccctgatcagcgaggggcggcgtctgaagaagcggaaaacctccatcaagaagaacacgctgaaccccacctataatgaggcgctggtgttcgacgtggcccccgagagcgtggagaacgtggggctcagcatcgccgtggtagactacgactgcatcgggcacaacgaggtgatcggcgtgtgccgtgtgggccccgacgctgccgacccgcacggccgcgagcactgggcagagatgctggccaatccccgcaagcccgtggagcactggcatcagctagtggaggaaaagactgtgaccagcttcacaaaaggcagcaaaggactatcagagaaagagaactccgagtgaggggtctggcctaggcccgggatcggaccaggctccctcaggaccccatcctttcctgcccggaccgtgaattcatctccttgaagccataacgtccgagctgctggtgcggggcagccctggccctaggcttcctaaccctggaagcgagaggatgagaggaggccggcccagctccttctttcagggtgggggtcattcagcctccactgtgtctgtcttttcttccctggggctccccctcgaggcgaggggccatgcatgtctgggggacccctgccccccaaaaccctctgtctgtctctgtctctttgctgtttgtccaagactcagtgtcccgacccttgttctcgccgtgaatgtcaatgggccaatcctctctgtcctttcagacacacacacacctgtgtccaccccttctgttcgccacacccctgcgtctggccggtccccccactgctgctgctatcaacgccagaataaacacactctgtgggtctcactccaa

SEQ ID NO: 188149 - DNA, 2463 bp, Homo sapiens
  Payload ID: 17025
  Gene Symbol: SYT3
  Gene Name: synaptotagmin III
  Uniprot ID: Q9BQG1
  ENST ID: ENST00000600079
  CDS Start-End: 183-1955
ggcggcagcggcggcagcggcggctccggcccctagatcagacattctctctcattacccggcgcgtgggaacgggtccacagccccttgtccgccctagaacccccatgggctgccgcccgccgccgcctcggctgccacccaggacacggcagagataagcgcaggaccagacggccaccatgtcaggagactacgaggatgacctctgccggcgggcactcatcctggtctcggacctctgtgcgcgggtccgagatgctgacaccaacgacaggtgccaggagttcaatgaccgaatccgaggctatccccggggtccagatgcagacatctccgtgagcctgctgtcggtcatcgtgacattctgtggcattgtccttctgggtgtctctctcttcgtgtcctggaagttgtgctgggtgccctggcgggacaagggaggctcggcagtgggcggtggccccctgcgcaaagacctaggccctggtgtcgggctggcaggcctggtaggcggaggcgggcaccacctggcggctggcctgggtggccatcctctgctgggcggcccacaccaccatgcccatgccgcccaccatccaccctttgctgagctgctggagccaggcagcctggggggttctgacacccctgagccctcctacttggacatggactcgtatccagaggctgcagcagcagcagtggccgctggggtcaaaccgagccaaacatcccctgagctgccctctgaggggggagcaggctctgggttgctcctgctgccccccagtggtgggggcttgcccagtgcccagtcacatcagcaggtcacaagcctggcacccactaccaggtacccagccctgccccgacccctcacccagcagactctgacctcccagccggaccccagcagtgaggagcggccacctgccctgcccttacccctgcctggaggcgaggaaaaagccaaactcattgggcagattaagccagagctgtaccaggggactggccctggtggccggcggagcggtgggggcccaggctctggagaggcaggcacaggggcaccctgtggccgtatcagcttcgccctgcggtacctctatggctcggaccagctggtggtgaggatcctgcaggccctggacctccctgccaaggactccaacggcttctcagacccctacgtcaagatctacctgctgcctgaccgcaagaaaaagtttcagaccaaggtgcacaggaagaccctgaaccccgtcttcaatgagacgtttcaattctcggtgcccctggccgagctggcccaacgcaaactgcacttcagcgtctatgactttgaccgcttctcgcggcacgacctcatcggccaggtggtgctggacaacctcctggagctggccgagcagccccctgaccgcccgctctggagggacatcgtggagggcggctcggaaaaagcagatcttggggagctcaacttctcactctgctacctccccacggccgggcgcctcaccgtgaccatcatcaaagcctctaacctcaaagcgatggacctcactggcttctcagacccctacgtgaaggcctccctgatcagcgaggggcggcgtctgaagaagcggaaaacctccatcaagaagaacacgctgaaccccacctataatgaggcgctggtgttcgacgtggcccccgagagcgtggagaacgtggggctcagcatcgccgtggtagactacgactgcatcgggcacaacgaggtgatcggcgtgtgccgtgtgggccccgacgctgccgacccgcacggccgcgagcactgggcagagatgctggccaatccccgcaagcccgtggagcactggcatcagctagtggaggaaaagactgtgaccagcttcacaaaaggcagcaaaggactatcagagaaagagaactccgagtgaggggtctggcctaggcccgggatcggaccaggctccctcaggaccccatcctttcctgcccggaccgtgaattcatctccttgaagccataacgtccgagctgctggtgcggggcagccctggccctaggcttcctaaccctggaagcgagaggatgagaggaggccggcccagctccttctttcagggtgggggtcattcagcctccactgtgtctgtcttttcttccctggggctccccctcgaggcgaggggccatgcatgtctgggggacccctgccccccaaaaccctctgtctgtctctgtctctttgctgtttgtccaagactcagtgtcccgacccttgttctcgccgtgaatgtcaatgggccaatcctctctgtcctttcagacacacacacacctgtgtccaccccttctgttcgccacacccctgcgtctggccggtccccccactgctgctgctatcaacgccagaataaacacactctgtgggtctcactccaa

SEQ ID NO: 188150 - DNA, 586 bp, Homo sapiens
  Payload ID: 17025
  Gene Symbol: SYT3
  Gene Name: synaptotagmin III
  ENST ID: ENST00000598997
  CDS Start-End: 298-586
gtagtctctaagccctcaacgggagctgggggcccggaggtgggagggggtggccgggctcccagtgggtcgcctggggtcgggcagctggctcgagtagggcaagatgtgactgttaagctgagctttttctcccggcctcagcccctagatcagacattctctctcattacccggcgcgtgggaacgggtccacagccccttgtccgccctagaacccccatgggctgccgcccgccgccgcctcggctgccacccaggacacggcagagataagcgcaggaccagacggccaccatgtcaggagactacgaggatgacctctgccggcgggcactcatcctggtctcggacctctgtgcgcgggtccgagatgctgacaccaacgacaggtgccaggagttcaatgaccgaatccgaggctatccccggggtccagatgcagacatctccgtgagcctgctgtcggtcatcgtgacattctgtggcattgtccttctgggtgtctctctcttcgtgtcctggaagttgtgctgggtgccctggcgggacaagggaggctcggcagtgggcggtggccccctgc

SEQ ID NO: 188151 - DNA, 567 bp, Homo sapiens
  Payload ID: 17025
  Gene Symbol: SYT3
  Gene Name: synaptotagmin III
  ENST ID: ENST00000595557
  CDS Start-End: 1-240
gggcacaacgaggtgatcggcgtgtgccgtgtgggccccgacgctgccgacccgcacggccgcgagcactgggcagagatgctggccaatccccgcaagcccgtggagcactggcatcagctagtggaggtgagtaggggtcccacaccgacccctgacaagcacccgtgcaccctcggccccttcatccatgcaacgaacgccctgcatgttcgtgagtcgcagagccaggcgtcctaggtttcaatccctgctgtgccaactttagctgtgcggcttagagccagttacccaagcgctctgtgcctcaatttacccactaggaaatgggactgttgatagcatcttctgttaggatagaggtgagatgtgctgagttaaacgttctgtaggtggtcgctgctgttgttacccatgaggctaagttgaaaatagagggggctgggcgtgagccaccgcgcctggctattggcttctctctcgggtaggtgtttgcagtggcaatgagatggtcacttggagctccaggtgtataatgctgtatctgttatgataccttcggctgaa

SEQ ID NO: 188152 - DNA, 4110 bp, Homo sapiens
  Payload ID: 17026
  Gene Symbol: SYT4
  Gene Name: synaptotagmin IV
  Uniprot ID: Q9H2B2
  ENST ID: ENST00000255224
  CDS Start-End: 370-1647
gatgagcatgtgttgaatcctcaagagaggagggaggaagcaagaaggaaagcttgaagggaggaggggaggggggcaggtgctgatttcagccctgtagcgtcaggattgcgtcaattcgggttccagccacgtctggagtctcggagacgagcttctcagaagagccaaaacaggaaccgaggtggcaaatcactgtgcgagggcgagtggacctccctctttgcctcctccctgttccaggagctggtgccctgggctctgcgctgttgttttcagcgctccgaaagccggcgcttgagatccaggcaagtgaatccagccaggcagttttcccttcagcacctcggacagaacacgcagtaaaaaatggctccgatcaccaccagccgggaagaatttgatgaaatccccacagtggtggggatcttcagtgcatttggcctggtcttcacagtctctctctttgcatggatctgctgtcagagaaaatcatccaagtctaacaagactcctccatacaagtttgtgcatgtgcttaagggagttgatatttaccctgaaaacctaaatagcaaaaagaagtttggagcagatgataaaaatgaagtaaagaataagccagctgtgccaaagaattcattgcatctggatcttgaaaagagagatctcaatggcaattttcccaaaaccaacctcaaacctggcagtccttctgatctggagaatgcaaccccgaagctctttttagaaggggaaaaagagtcagtttcccctgagagtttaaagtccagcacttcccttacttcagaagagaaacaagagaagctgggaactctcttcttctccttagaatacaacttcgagagaaaagcatttgtggtcaatatcaaggaagcccgtggcttgccagccatggatgagcagtcgatgacctctgacccatatatcaaaatgacgatcctcccagagaagaagcataaagtgaaaactagagtgctgagaaaaaccttggatccagcttttgatgagacctttacattctatgggataccctacacccaaatccaagaattggccttgcacttcacaattttgagttttgacaggttttcaagagatgatatcattggggaagttctaattcctctctcgggaattgaattatctgaaggaaaaatgttaatgaatagagagatcatcaagagaaatgttaggaagtcttcaggacggggtgagttactgatctctctctgctatcagtccaccacaaacactctaactgtggttgtcttaaaagctcgacatctgcctaaatctgatgtgtccggactttcagatccctatgtcaaagtgaacctgtaccatgccaaaaagagaatctccaagaagaagactcatgtgaagaaatgcacccccaatgcagtgttcaatgagctgtttgtctttgatattccttgtgagggccttgaagatataagtgttgaatttttggttttggattctgaaagggggtcccgaaatgaggtaatcgggcagttagtcttgggtgcagcagcagaaggaactggtggagagcactggaaagagatctgtgactaccccaggagacaaattgccaagtggcacgtgctctgtgatggttagcatcctagccgtgagttggaacttaaaggtttttactaggcaaggagaaattttctttctttctatattggattgcaagcttgggaaatcaagctacctttttgttgttgttgttgttgctagaaatggattgaattagtagaccagaaagtaacttcaaatgtgtattatgataatttccctatttattagaagagttggataaattttcataagatattcaatatctccttcagattaccagtgatataactaggaatagtcagacattttatgaatactgtgccagaatcccaaattataaatgtgacaatctcattggaacatgtcacaaaaagttaatgtgattaagatttaaaaacgaaaagtatgccttgccttgtgaaaatttatccatttatcttcaggttggggaaatcaatttttctttaaatccaaagatactaaaaaaatgtcctccagtttgtatttattaattctgtcatgtgcaaatggttgtcctgcatataaaagtatctggtcatttcagtttggtttgtaattatttgatgcaattttatcataagagtaactcagattcatttcaaaaggacagtgaacaagctgagaaattattttatcaaagggctgagttgagaacactgtggctgaaatataatttttctcccccctaaggttacatgtgagtcaaaattttgtaaaatataacctcacataagaaccatggccttggattattcactgcctgtcacaagcctcagtgtggcctgagaaatccctatgtacctttgtgaaattgttgaattagttagtgaataaagaaataaacttcaactagaaatccagttagaagtgcaattttcttataggaaataggtatagtgtgcaagtgtacttttaaggccatcgtttgtacccagagtcggcatggccacctaagtcttcatttaatttattgtcccccagaaaagattaagatgctacttgaaaagactgtgaagattttttacattgccagataaaaagtgttacttaaccaacaaacaaatgtaagactacaaaatcgttcaagagcaattctaatataatttacatatgttcacgcaaaatatgcttaggctgtcaaattagcacaacaaagaatgtgtttcactatcttttctaggctaatttgtcttgagctgttgtctatagagcagtttacagacttgtgtcttgtatcattttccagtgccagggttctgaaattcattcagaacctgttagattaaagctgcaccctgtgattatttgaaaagaattagcttgagagtaatgtcactatatttgagttcttagagaagtatgagtggaacttgagtacagttgaattattaaatatgcaagttagaaattaagtctactgaaaaatttacattttgagtcaggttttgtgtcagtactttagcagtttttgagaatgtgtttgatatcacagtgtttgtaaattctatgaaaaatgcattttccaaacaacttatacatgctttttatgactatgcctaatgtaaagaaaatgtattacattctgtatgtacaaagattaaaaatcaacctcttttttgtgctttaaaatgactttgggattaaaaaagcatatttcccaatcattgtcttcattccactacaaagtcacctcacagcatcttgctccactcggcatctctgtgaaagcaacatgaaatgaactgtagtaggtgtgtagtttggggaagtcaaatggccattttatgtatgtgcatttggtatcatgggccgtggaacagaatatatgttggacctctgaaaagttgtaaggggccaattctaagtattcttcacggcagccagaagttaatggtggtagcagctgaggtatggttgttggacgaggccgatttttttttttttaacatggaacaatgaaaccaacaacaaacatttttaaaattaaaatggataatttgtaaatagtttttagcttttaaaatttaaagtgtttttgagtgtgaaaagttgagtaaaactatttgcaactggttttcagaaaagagaaaagaaacaacaaaggaattgaaacaggcagggagatcttaatacctaatttcatcatttctgaaaatgtactgttttagaatgtattacaatatcaatgtgaatatcttgaatcctgttacaaatcctgcactgtattaaacatgtaaattaattgtttgtctgattagccaatctcaccacccaaatggggaggtatacatgtttgaagaactgtgtaactcagtaattgatttgttctgatgttgtaactcaatagaagtgttttggaaggaagcatggtgtgtgagacagtgtctgttcttttgtgccagctctgtatgatgtttgtaagaccatgtttgtaagacatgaataaattgctgcttttgcccaacccgtttcaatgca

SEQ ID NO: 188153 - DNA, 1765 bp, Homo sapiens
  Payload ID: 17026
  Gene Symbol: SYT4
  Gene Name: synaptotagmin IV
  Uniprot ID: Q9H2B2
  ENST ID: ENST00000590752
  CDS Start-End: 210-1433
agaagagccaaaacaggaaccgaggtggcaaatcactgtgcgagggcgagtggacctccctctttgcctcctccctgttccaggagctggtgccctgggctctgcgctgttgttttcagcgctccgaaagccggcgcttgagatccaggcaagtgaatccagccaggcagttttcccttcagcacctcggacagaacacgcagtaaaaaatggctccgatcaccaccagccgggaagaatttgtctctctctttgcatggatctgctgtcagagaaaatcatccaagtctaacaagactcctccatacaagtttgtgcatgtgcttaagggagttgatatttaccctgaaaacctaaatagcaaaaagaagtttggagcagatgataaaaatgaagtaaagaataagccagctgtgccaaagaattcattgcatctggatcttgaaaagagagatctcaatggcaattttcccaaaaccaacctcaaacctggcagtccttctgatctggagaatgcaaccccgaagctctttttagaaggggaaaaagagtcagtttcccctgagagtttaaagtccagcacttcccttacttcagaagagaaacaagagaagctgggaactctcttcttctccttagaatacaacttcgagagaaaagcatttgtggtcaatatcaaggaagcccgtggcttgccagccatggatgagcagtcgatgacctctgacccatatatcaaaatgacgatcctcccagagaagaagcataaagtgaaaactagagtgctgagaaaaaccttggatccagcttttgatgagacctttacattctatgggataccctacacccaaatccaagaattggccttgcacttcacaattttgagttttgacaggttttcaagagatgatatcattggggaagttctaattcctctctcgggaattgaattatctgaaggaaaaatgttaatgaatagagagatcatcaagagaaatgttaggaagtcttcaggacggggtgagttactgatctctctctgctatcagtccaccacaaacactctaactgtggttgtcttaaaagctcgacatctgcctaaatctgatgtgtccggactttcagatccctatgtcaaagtgaacctgtaccatgccaaaaagagaatctccaagaagaagactcatgtgaagaaatgcacccccaatgcagtgttcaatgagctgtttgtctttgatattccttgtgagggccttgaagatataagtgttgaatttttggttttggattctgaaagggggtcccgaaatgaggtaatcgggcagttagtcttgggtgcagcagcagaaggaactggtggagagcactggaaagagatctgtgactaccccaggagacaaattgccaagtggcacgtgctctgtgatggttagcatcctagccgtgagttggaacttaaaggtttttactaggcaaggagaaattttctttctttctatattggattgcaagcttgggaaatcaagctacctttttgttgttgttgttgttgctagaaatggattgaattagtagaccagaaagtaacttcaaatgtgtattatgataatttccctatttattagaagagttggataaattttcataagatattcaatatctccttcagattaccagtgatataactaggaatagtcagacattttatgaatactgtgccagaatcccaaattataaatgtgacaatctcattggaacatgtcac

SEQ ID NO: 188154 - DNA, 565 bp, Homo sapiens
  Payload ID: 17026
  Gene Symbol: SYT4
  Gene Name: synaptotagmin IV
  ENST ID: ENST00000596867
  CDS Start-End: 257-565
agaagagccaaaacaggaaccgaggtggcaaatcactgtgcgagggcgagtggacctccctctttgcctcctccctgttccaggagctggtgccctgggctctgcgctgttgttttcagcgctccgaaagccggcgcttgagatccaggcaagtgaatccagccaggcagttttcccttcagcacctcggacagaacacgcagtaaaaaatggctccgatcaccaccagccgggaagaatttggtaagcaagaaaaatgttaatgaatagagagatcatcaagagaaatgttaggaagtcttcaggacggggtgagttactgatctctctctgctatcagtccaccacaaacactctaactgtggttgtcttaaaagctcgacatctgcctaaatctgatgtgtccggactttcagatccctatgtcaaagtgaacctgtaccatgccaaaaagagaatctccaagaagaagactcatgtgaagaaatgcacccccaatgcagtgttcaatgagctgtttgtctttgatattccttgtgagggccttgaagatataagtgttgaa

SEQ ID NO: 188155 - DNA, 560 bp, Homo sapiens
  Payload ID: 17026
  Gene Symbol: SYT4
  Gene Name: synaptotagmin IV
  ENST ID: ENST00000593720
  CDS Start-End: 130-560
ttcagcgctccgaaagccggcgcttgagatccaggcaagtgaatccagccaggcagttttcccttcagcacctcggacagaacacgcagtaaaaaatggctccgatcaccaccagccgggaagaatttgatgaaatccccacagtggtggggatcttcagtgcatttggcctggtcttcacagtctctctctttgcatggatctgctgtcagagaaaatcatccaatgaaaactagagtgctgagaaaaaccttggatccagcttttgatgagacctttacattctatgggataccctacacccaaatccaagaattggccttgcacttcacaattttgagttttgacaggttttcaagagatgatatcattggggaagttctaattcctctctcgggaattgaattatctgaaggaaaaatgttaatgaatagagagatcatcaagagaaatgttaggaagtcttcaggacggggtgagttactgatctctctctgctatcagtccaccacaaacactctaactgtggttgtcttaaaagctcgacatctgcctaaatc

SEQ ID NO: 188156 - DNA, 3955 bp, Homo sapiens
  Payload ID: 17027
  Gene Symbol: SYT9
  Gene Name: synaptotagmin IX
  Uniprot ID: Q86SS6
  ENST ID: ENST00000318881
  CDS Start-End: 238-1713
cggagggaccgggcgggagagagagaaagcctgaccgaccggctggcgaagagctgcatgcaaccggtgggaggccgggccggctgggtctggggctcgggctcaggctcgcaccgtttctcggcaggtccctggcggtgagcgcggacggcccggaggcggcggctctgagctggcaggcggagggctgtctcctgcgcccgcctgcccggcgcggtccgaggatgcgggggggcgatgcccggggccagggacgcgctctgtcaccaggcgctgcagctgctggccgagctctgtgcccgtggggccctggagcacgacagctgccaggatttcatttaccacctgcgggaccgtgccagaccccggctccgcgacccagatatctcagtgagcctgctgacccttgtggtcactgcctgtggtctcgctctctttggcgtgtctctcttcgtatcttggaaactctgctgggttccgtggcgagaacgaggcctgccctctggtagcaaagacaacaaccaggagccccttaactacatggacacagagaccaatgagcaggagaacagtgaggacttcctagatcctcccacgccctgccctgactcctccatgaagatcagccacacctcccctgacattcccctctccacccagacggggatccaggagaactgtgcccatggcgtccgcgtgcagcgccaagtcacagagccaacctcgtcggcccggcataattcaatccgaagacaactcaacttgtcaaacccggacttcaatatccagcagcttcaaaaacaggaacagttgactggaattggtagaattaaaccagagttatataagcagaggtcattggataatgatgacgggagacggagtaacagcaaggcttgtgggaaactgaacttcattttaaaatatgactgtgacttagagcagctcatagtgaagattcacaaagctgtcaatttgcccgccaaggacttttctgggacttcagatccttatgtcaagatctatttgcttcctgatcggaaaacaaaacaccagactaaagttcacagaaagaccctgaaccctgtgtttgatgaagtgtttttatttccggttccctacaatgaccttgaagcacggaagcttcacttctctgtgtacgactttgacaggttctctcgtcatgacttaatcggccaagtggtggtggatcacttcctagacttggctgatttccccagggagtgcatcctttggaaggatatcgaatatgtcaccaatgacaacgtggatctgggagagctgatgttttccctgtgctatcttccaacggctggcaggctgaccattaccattataaaagcaaggaatttaaaggcaatggacataacaggagcatcagatccctatgtgaaagtctcgctgatgtgtgatggcagacgactgaagaagaggaaaacatccaccaagaggaacaccttgaatcctgtttacaacgaagccatagtctttgatgtccctcccgagaacattgaccaaatccacttgtccatagcagtcatggactatgaccgtgtaggtcacaatgagatcatcggcgtgtgtcaagtaggcaacgaggctgagaggctgggcagagaccactggagtgaaatgttgtcatatcctcggaagcccattgcacactggcattccctggtggagaaacgatgaccatgggtaagaggactgcttgtgccaaggacaaaataggacaaccatctcacaaagatcttaagtaactttttccatccagcaacatccagacgatttcagtgaccaaatgctcagctgtaaccacagcactaactggccttctttccagattgggtttggtgaacctgaatggtccagccaccttctgcaggtggcccaaggtgatgtgctgcagggaagcatgtctctcatgccaagaaccaagatcggactatgaacaaaaacaaatgatagatatagtgacagtaccaagagtaccaggactcaatgtttcatatgaagcccttggtgatgaggacatagcatctgccctggaaatcgttattccaacataatattattttctagaatgccctggaaggacagaatatttaaaaatatatccaggtgctaaataggcagcagatctcaattcacacatgactacctttgagctaatgactgtctccagaaaataactgtgccccaagaagtgctccagatttgcaaggaatagccccaagagaataccaagacaagcaggctgttccctggaaaaaatctaatgcaaggagggctagttcacagcaaattcactgcctcctcccatgcacgtggtagagagtaccagtatcaacatggccctgttttctgctaaaaccagattttgaggaatcagagacccccaacactactcactcagtagctagcagccccttcctttcaactgggagtgttattagaatgaaaagtaattagttagaagggcatacatctcagtggcatgagcattgtggaatatcctttcctaggcacattcgtccactaagggaacagcctcagaaactggtacagcaatgggtgagatgagatcatggagagagaacacagccatcccctatagaaaggcacagcttttgggcttctctggcctgaatgccttctggggtatttccatatgcaacagcccagagtcatagccttgggcaaccacacatagaggtttccttctcacttcagacacatacatcactttcacaccacttggggatggaaatacctacaagagtgaaggtcaagggccctccccaggcatctcattcattactcagcttccttcctgaccaagtctgccaaccaatggccagctatgcgcctcatcctcattgcttctgcctccacgtaaatgaaaccaaaggcctcagcatatcctgggaggactgggggctgttacctaatggtcctctctgtcccattataggtgcaaggcaccccatccacacatttgcaccactactccaagatagtatttttcttttcacacaatctctttacagcagaatccagagttggattgtagtttaccttcctggaaagctcattatctctgtttgaattaacatttcagcatggaactaactgggcggaggaaggatcgttatacgtcttcagaaagttctcattgccccagctgcctagtactatacaagaagctctactttgatggcagatctaagaaggctataggcctttgtttgtaggaagcagtgtcattacattcaagcttcacttctctgattggcttccaaccactgggattcaaagagaatccaaggttctgcctatgtctgatgacataaggaaaacttggcttcctctgctcaaggttcccctctgctcatccctcctcattcagacatcctccaccataccagtgtttagaagcaaaacatgaagggctagcgccaccaggatagttagcagaaatattgtctgtaaagctaggcagatgagcccagaagaatggtcccagagaaagcagactggctccaatagatatcaggcagcaatcccaataaattctgacatgtccttggcaatggaagcctgggttggagatcctgaggcagctgtgcctactgttccccacctcagaagcttcctgcccagagagccagcagccttgggatactaatgaggatgcaactggcttattggtatgaaatagaaggtggctttgtaggggcaagcaggcaaagagtactatccacatggcaggcaggtggctttgtgtctggaaagctttgcctagccagtacagctgtgagcagaggctggttataaatttgaactccctcagcccatttgcaactctgcctctgttctcttgcattctgtttggttgccctttagtttcctagtaaatgctccttttgaaaaa

SEQ ID NO: 188157 - DNA, 2094 bp, Homo sapiens
  Payload ID: 17027
  Gene Symbol: SYT9
  Gene Name: synaptotagmin IX
  ENST ID: ENST00000524820
  CDS Start-End: 91-1050
gcagtcctgagctttgtcaacatgatcctcctgcctgagacttcaatttgggaaagaatgatatgaagaagccagtaatgcagagaacaaatgctggcgaaggtggtggagggagatttagctttcaaaggaggcagagatatctcagtgagcctgctgacccttgtggtcactgcctgtggtctcgctctctttggcgtgtctctcttcgtatcttggaaactctgctgggttccgtggcgagaacgaggcctgccctctggtagcaaagacaacaaccaggagccccttaactacatggacacagagaccaatgagcaggagaacagtgaggacttcctagatcctcccacgccctgccctgactcctccatgaagatcagccacacctcccctgacattcccctctccacccagacggggatccaggagaactgtgcccatggcgtccgcgtgcagcgccaagtcacagagccaacctcgtcggcccggcataattcaatccgaagacaactcaacttgtcaaacccggacttcaatatccagcagcttcaaaaacaggaacagttgactggaattggtagaattaaaccagagttatataagcagaggtcattggataatgatgacgggagacggagtaacagcaaggcttgtgggaaactgaacttcattttaaaatatgactgtgacttagagcagctcatagtgaagattcacaaagctgtcaatttgcccgccaaggacttttctgggacttcagatccttatgtcaagatctatttgcttcctgatcggaaaacaaaacaccagactaaagttcacagaaagaccctgaaccctgtgtttgatgaagtgtttttatttccggttccctacaatgaccttgaagcacggaagcttcacttctctgtgtacgactttgacaggttctctcgtcatgacttaatcggccaagtggtggtggatcacttcctagacttggctgatttccccagggagtgcatcctttggaaggatatcgaatatgtcaccaatattcttagctagcccctaagagacagcaggtgttatctgtcctccgtaccacattttctttagagctttttcaggttgtttgtgctgaatggaacctggcattctattaactgtagtctgcagctaagagaccattacctgactctgacagcagacaacgtggatctgggagagctgatgttttccctgtgctatcttccaacggctggcaggctgaccattaccattataaaagcaaggaatttaaaggcaatggacataacaggagcatcagatccctatgtgaaagtctcgctgatgtgtgatggcagacgactgaagaagaggaaaacatccaccaagaggaacaccttgaatcctgtttacaacgaagccatagtctttgatgtccctcccgagaacattgaccaaatccacttgtccatagcagtcatggactatgaccgtgtaggtcacaatgagatcatcggcgtgtgtcaagtaggcaacgaggctgagaggctgggcagagaccactggagtgaaatgttgtcatatcctcggaagcccattgcacactggcattccctggtggaggtctcttggtgcccaggttttctctgcatacttgctgcactctctggtgtcctggaagcagctctgccctcttccaacctggctcagccttgaaagggccccttttttcacattggtgcaggggaggaagaagggtttccagctgcaaggagagagcagcgtgcagtgacagtgaggcaccaggatgtagaacaatgctgccagaacatattccctgaggtttgggaatgaacttcttcaagggctgtgctccctttttgatgggtcctagtgggcctctgtgctggtcgtgaccgacttttcttcaatgatccagtggaggctgcaatgtattttgcttaaaactacagctggtttataattttggcctcagacagtaattacagctgctggggctccttggagagataattacggaaagaattcagcatattcattttatctacacacttaaccatcaattaaatcattaccatctaa

SEQ ID NO: 188158 - DNA, 3183 bp, Homo sapiens
  Payload ID: 17027
  Gene Symbol: SYT9
  Gene Name: synaptotagmin IX
  ENST ID: ENST00000532592
  CDS Start-End: 18-539
gaggatgcgggggggcgatgcccggggccagggacgcgctctgtcaccaggcgctgcagctgctggccgagctctgtgcccgtggggccctggagcacgacagctgccaggatttcatttaccacctgcgggaccgtgccagaccccggctccgcgacccagatatctcagtgagcctgctgacccttgtggtcactgcctgtggtctcgctctctttggcgtgtctctcttcgtatcttggaaactctgctgggttccgtggcgagaacgaggcctgccctctggtagcaaagacaacaaccaggagccccttaactacatggacacagagaccaatgagcaggagaacagtgaggacttcctagatcctcccacgccctgccctgactcctccatgaagatcagccacacctcccctgacattcccctctccacccagacggggatccaggagaactgtgcccatggcgtccgcgtgcagcgccaagtcacagagccaacctcgtcggcccggacaacgtggatctgggagagctgatgttttccctgtgctatcttccaacggctggcaggctgaccattaccattataaaagcaaggaatttaaaggcaatggacataacaggagcatcagatccctatgtgaaagtctcgctgatgtgtgatggcagacgactgaagaagaggaaaacatccaccaagaggaacaccttgaatcctgtttacaacgaagccatagtctttgatgtccctcccgagaacattgaccaaatccacttgtccatagcagtcatggactatgaccgtgtaggtcacaatgagatcatcggcgtgtgtcaagtaggcaacgaggctgagaggctgggcagagaccactggagtgaaatgttgtcatatcctcggaagcccattgcacactggcattccctggtggagaaacgatgaccatgggtaagaggactgcttgtgccaaggacaaaataggacaaccatctcacaaagatcttaagtaactttttccatccagcaacatccagacgatttcagtgaccaaatgctcagctgtaaccacagcactaactggccttctttccagattgggtttggtgaacctgaatggtccagccaccttctgcaggtggcccaaggtgatgtgctgcagggaagcatgtctctcatgccaagaaccaagatcggactatgaacaaaaacaaatgatagatatagtgacagtaccaagagtaccaggactcaatgtttcatatgaagcccttggtgatgaggacatagcatctgccctggaaatcgttattccaacataatattattttctagaatgccctggaaggacagaatatttaaaaatatatccaggtgctaaataggcagcagatctcaattcacacatgactacctttgagctaatgactgtctccagaaaataactgtgccccaagaagtgctccagatttgcaaggaatagccccaagagaataccaagacaagcaggctgttccctggaaaaaatctaatgcaaggagggctagttcacagcaaattcactgcctcctcccatgcacgtggtagagagtaccagtatcaacatggccctgttttctgctaaaaccagattttgaggaatcagagacccccaacactactcactcagtagctagcagccccttcctttcaactgggagtgttattagaatgaaaagtaattagttagaagggcatacatctcagtggcatgagcattgtggaatatcctttcctaggcacattcgtccactaagggaacagcctcagaaactggtacagcaatgggtgagatgagatcatggagagagaacacagccatcccctatagaaaggcacagcttttgggcttctctggcctgaatgccttctggggtatttccatatgcaacagcccagagtcatagccttgggcaaccacacatagaggtttccttctcacttcagacacatacatcactttcacaccacttggggatggaaatacctacaagagtgaaggtcaagggccctccccaggcatctcattcattactcagcttccttcctgaccaagtctgccaaccaatggccagctatgcgcctcatcctcattgcttctgcctccacgtaaatgaaaccaaaggcctcagcatatcctgggaggactgggggctgttacctaatggtcctctctgtcccattataggtgcaaggcaccccatccacacatttgcaccactactccaagatagtatttttcttttcacacaatctctttacagcagaatccagagttggattgtagtttaccttcctggaaagctcattatctctgtttgaattaacatttcagcatggaactaactgggcggaggaaggatcgttatacgtcttcagaaagttctcattgccccagctgcctagtactatacaagaagctctactttgatggcagatctaagaaggctataggcctttgtttgtaggaagcagtgtcattacattcaagcttcacttctctgattggcttccaaccactgggattcaaagagaatccaaggttctgcctatgtctgatgacataaggaaaacttggcttcctctgctcaaggttcccctctgctcatccctcctcattcagacatcctccaccataccagtgtttagaagcaaaacatgaagggctagcgccaccaggatagttagcagaaatattgtctgtaaagctaggcagatgagcccagaagaatggtcccagagaaagcagactggctccaatagatatcaggcagcaatcccaataaattctgacatgtccttggcaatggaagcctgggttggagatcctgaggcagctgtgcctactgttccccacctcagaagcttcctgcccagagagccagcagccttgggatactaatgaggatgcaactggcttattggtatgaaatagaaggtggctttgtaggggcaagcaggcaaagagtactatccacatggcaggcaggtggctttgtgtctggaaagctttgcctagccagtacagctgtgagcagaggctggttataaatttgaactccctcagcccatttgcaactctgcctctgttctcttgcattctgtttggttgccctttagtttcctagtaaatgctccttttg

SEQ ID NO: 188159 - DNA, 3792 bp, Homo sapiens
  Payload ID: 17028
  Gene Symbol: SYT5
  Gene Name: synaptotagmin V
  Uniprot ID: O00445
  ENST ID: ENST00000354308
  CDS Start-End: 371-1531
aaggcagaaaatgctaaagcaccaggataaacatctgtgggcgtcatcgaggttcccgggtggaggcgggaggaggggcggggcagggctttccgcctacccgagaccaaatacgggcacacacaatacacaccacacacgcgcgcacacgcacacgggcacacacgcgcgcacgggatcctgctccgctccgcggctcccccgccccggagagctccgcgatcagcacccgggacagcgccaccgcccacgtgcagggggtggggtccgggcggggctggcgcctcggcgtctcccgggagtgtcccgtccagccgccgagcagggtgcttgagtgtctctgcagaaaagactccaggaccccgccaccatgttcccggagcccccaaccccggggcctccatcgcccgacacgcctcccgactccagtcgcatcagccacggcccagtgcccccctgggccctggccaccatcgtgctggtctcaggcctcctcatcttcagctgctgtttctgtctctaccggaagagctgtcggaggcggacaggcaagaagagccaggcccaagcccaggtccaccttcaggaagtgaaggggctgggccagagttacatagacaaggtgcagccagaagtagaggagctggagccagcaccatccgggccagggcagcaggtggcagacaagcatgagctaggacgactgcagtactccctggattatgacttccagagtggccagctgctggtgggcattctgcaagcaatgggattggcagccttggatcttggtggctcctcggacccctatgtgcgggtctacctgctgccggacaaacggaggcggtacgagaccaaggtgcatcggcagacgctgaaccctcactttggggagaccttcgccttcaaggtcccctacgtggagctggggggcagggtgctggtcatggcggtgtacgacttcgaccgcttctctcgcaatgacgccatcggggaggtgcgggtccctatgagctccgtggacctggggcggccagtgcaggcctggcgggagctgcaggcggctccgcgggaggagcaggagaagcttggggacatctgcttctccctccgctatgtccccacggccgggaagctcaccgtcatcgtcctggaggctaaaaacctgaagaagatggacgtaggaggactgtcagatccatacgtcaaggtccacctgctgcagggcggcaaaaaggtgcggaagaagaaaaccaccatcaagaagaacactctgaacccctattacaacgaagctttcagcttcgaggtgccctgtgaccaagtccagaaggtgcaggtggagctgaccgtgctggactacgacaagctgggcaagaacgaggccatcgggagggtggccgtgggggcggccgccggcggggctggcctgcggcactgggcggacatgctggccaacccgcggcggcccattgcccagtggcactcgctgcggcccccggaccgagtgaggctgctgcctgcgccctgactcccaccccaagcccccggccaagcctggactctagcccctgaccccagactcccgagaccggccaaagccaagccagccccacccttaagcttcctctgacggttaccctccccccaccttccaccccaaccatctgaaccattcctgtcttctcacccccaacgatgccaatcacgacaactttccagcacactcccccgaccctcgcggacacacccagatgccccagggaccccgggaagggaaggcagcctggtttctcctgcccccgggtcctgccccctgctttgacaatcagccatcctcgtctgctctcctctctcttccaacacagcccatccctgcactgctcctggggccaaataaatattcagcagctccggtggcctgggcccatgctccttgatgggggtgggcaagggctgggacccaagaggaaacctcgtttccaggaatgggcgctcgcagggcggtgtgagtgctgttcgtcctgaaagcctctgagagactggcctgaccccatggactccctcacactctcacccgttcattcctcactcaccactctgagcctgggtttcctcctctggagaatgttgggataataataattcctgccacacgctggctgtgaggagtccgcgagaactcccttgcttgtccatgaatttatccactcgcttgctcacccatgactcacatcgattttcatacccatttctgcatccctccctccctctcttttttttcttccttccattccatattccctgaggtcttctgttgagtgctggggccccagaatatccaaacacagacctgaccccccaagcgacttactgccatcaaaacaaaggagaggcgcggagccagggaatacaatctccagagcctgcgagagaggttggagttcagcaaggaaagccaatgatttcaacttcacctctttcttttttcttttcttttttcctttttgttttctttctgtctttccttttctttctttttctcttgttttttttttgtttgtttgtttttttgtttttgtttttgtttttttgagatgaagtctcactttgtcgcccaggctggagtgcagtggcacgatttcggctcactgcaagctcctcctcccgggttcacgccattctcctgcctcagcctcccgagcagctgggactacaggcgcccgccaccacacccggctaatttttttgtatttttagtagagacggcatttcaccgtgttagccaggatgatctcgatctcctgacctcgtgatccgcccgcctcggcctcccaatgtgctaggattacaggcgtgagccaccgcgcccggcccttcttcttttcttttcttttctatttcttttcttctcttcttcttttttttaattttgagacggagtttcgctgttgttgcccagaatggagggcaatggtgcaatctcggctcaccgcaacccctgcctcccgggttcaagcgattcttctgcctcagcctcttctttcttctttttttgacagggtttctctgtgtaccctggctggagtgcggtggggcaatcatagctcactgcagcctcaacctcctgggctcaggggatcctcctgcctcagactcctgagtagctgggaccacaggcacatgcaaccatgcctagctaattttttcttttcttttcttttcttttttagagatggggtcttgctatgttgcacaggctggtttcaaactcctgcaatcctcctgtgtgagtagctgggactgtagacatgagccgccgcatctgacctcattgttctttcaacgaatgctgcctcctactctgtttctagcaaagatgatagttccattggcttctaccttatctcatcccatacagaattttgggtggtgaacaaagacctataagatttggccagagaactctctgagcagcagattaagtggagaatgaggcaaaaattacccccacgtaccaaaaaaggaggcagcaaacaaacttacttgctcctaagcttcctggtagccaatcgggaaagtgaaaatagaacagctacacagattataatatccatgagatttttaatttttctccaaaggaattcagtaacttttcatgtgtgtgagtgtgtgtgtgtgtgtgtgtgtgtgtgtgtgtgtgtgtgtggctgtagagcatgtctttatgaagacagccctttatgttactactattactgccaataataatcctcacagcaaactcatgaa

SEQ ID NO: 188160 - DNA, 2612 bp, Homo sapiens
  Payload ID: 17028
  Gene Symbol: SYT5
  Gene Name: synaptotagmin V
  Uniprot ID: O00445
  ENST ID: ENST00000537500
  CDS Start-End: 1064-2224
gggacccccgccctcagcccatccgcatccgcatccctagaggaaaggggtgtgcgagtgggggctggggcactggggagacaaccagagggagggcagcagcctgaagcggagagacagggatctggggacgcgagacaggtatggagaagacaaagagccgagggcggggagtggggcgcaggcggaggggagagggagagaccctggagacagaggccaggcgatagggaagagagacaggcgggttggggaggcagacacagggaagacgcctatgtggggtcaagaggcagcgtggagaccgaggcggtcacgagagcagcacggatgcgtggagagaccaacaggccaagaaggatgagggggctcagcacaggcaccgggcagcccccgacccgccctccagcaaaattggggagagggaagagggaacctgcgtctcagctcccaggaccaggtgcggagggagcagtcggctgtgggcgctcggaccacaggctgcccgctccccacctcgcgggacctcaggatcccagtcgggctattggggggttcccaggcaccggtgggccccggagcgagcctgccccgccgggactccgcgtctgtgcgtcagccccgcccgttgtcctggcaacaacccgttgcccgggcaaccagctttgctctcaccccgcttgagaggagcccggctgttgctctgggcaacgcggtctgctggttcccacgtctgccttcgcccgcttccggttcagaccctgcggaggggcgaggacgaggcagaagtcagcgggatgcctgtggggccgtggaggaagagggtatccctttaggatggaactaggtcctggacaccccctctcaagtgcggggaggctgatactacaactcccagcatgactcgcggtggctgtccggtttctgcgcggctgttcgcgcaaaggcctcatgggagttggagttctttgttgtgcgtggggctcaaaggacgtctggggtgggaatgggggactagggtgcttgagtgtctctgcagaaaagactccaggaccccgccaccatgttcccggagcccccaaccccggggcctccatcgcccgacacgcctcccgactccagtcgcatcagccacggcccagtgcccccctgggccctggccaccatcgtgctggtctcaggcctcctcatcttcagctgctgtttctgtctctaccggaagagctgtcggaggcggacaggcaagaagagccaggcccaagcccaggtccaccttcaggaagtgaaggggctgggccagagttacatagacaaggtgcagccagaagtagaggagctggagccagcaccatccgggccagggcagcaggtggcagacaagcatgagctaggacgactgcagtactccctggattatgacttccagagtggccagctgctggtgggcattctgcaagcaatgggattggcagccttggatcttggtggctcctcggacccctatgtgcgggtctacctgctgccggacaaacggaggcggtacgagaccaaggtgcatcggcagacgctgaaccctcactttggggagaccttcgccttcaaggtcccctacgtggagctggggggcagggtgctggtcatggcggtgtacgacttcgaccgcttctctcgcaatgacgccatcggggaggtgcgggtccctatgagctccgtggacctggggcggccagtgcaggcctggcgggagctgcaggcggctccgcgggaggagcaggagaagcttggggacatctgcttctccctccgctatgtccccacggccgggaagctcaccgtcatcgtcctggaggctaaaaacctgaagaagatggacgtaggaggactgtcagatccatacgtcaaggtccacctgctgcagggcggcaaaaaggtgcggaagaagaaaaccaccatcaagaagaacactctgaacccctattacaacgaagctttcagcttcgaggtgccctgtgaccaagtccagaaggtgcaggtggagctgaccgtgctggactacgacaagctgggcaagaacgaggccatcgggagggtggccgtgggggcggccgccggcggggctggcctgcggcactgggcggacatgctggccaacccgcggcggcccattgcccagtggcactcgctgcggcccccggaccgagtgaggctgctgcctgcgccctgactcccaccccaagcccccggccaagcctggactctagcccctgaccccagactcccgagaccggccaaagccaagccagccccacccttaagcttcctctgacggttaccctccccccaccttccaccccaaccatctgaaccattcctgtcttctcacccccaacgatgccaatcacgacaactttccagcacactcccccgaccctcgcggacacacccagatgccccagggaccccgggaagggaaggcagcctggtttctcctgcccccgggtcctgccccctgctttgacaatcagccatcctcgtctgctctcctctctcttccaacacagcccatccctgcactgctcctggggccaaataaatattcagcagctccggtg

SEQ ID NO: 188161 - DNA, 769 bp, Homo sapiens
  Payload ID: 17028
  Gene Symbol: SYT5
  Gene Name: synaptotagmin V
  ENST ID: ENST00000585461
  CDS Start-End: 350-499
ggtctgctggttcccacgtctgccttcgcccgcttccggttcagaccctgcggaggggcgaggacgaggcagaagtcagcgggatgcctgtggggccgtggaggaagagggtatccctttaggatggaactaggtcctggacaccccctctcaagtgcggggaggctgatactacaactcccagcatgactcgcggtggctgtccggtttctgcgcggctgttcgcgcaaaggcctcatgggagttggagttctttgttgtgcgtggggctcaaaggacgtctggggtgggaatgggggactagggtgcttgagtgtctctgcagaaaagactccaggaccccgccaccatgttcccggagcccccaaccccggggcctccatcgcccgacacgcctcccgactccagtcgcatcagccacggcccaggtgcagccagaagtagaggagctggagccagcaccatccgggccagggcagcaggtggcagacaagcatgagctaggacgactgcagtactccctggattatgacttccagagtggccagctgctggtgggcattctgcaagcaatgggattggcagccttggatcttggtggctcctcggacccctatgtgcgggtctacctgctgccggacaaacggaggcggtacgagaccaaggtgcatcggcagacgctgaaccctcactttggggagaccttcgccttcaaggtcccctacgtggagctggggggcagggtgctggtcatggcggtgtacgactt

SEQ ID NO: 188162 - DNA, 640 bp, Homo sapiens
  Payload ID: 17028
  Gene Symbol: SYT5
  Gene Name: synaptotagmin V
  ENST ID: ENST00000592470
  CDS Start-End: 185-640
cgcgcgcacgggatcctgctccgctccgcggctcccccgccccggagagctccgcgatcagcacccgggacagcgccaccgcccacgtgcagggggtggggtccgggcggggctggcgcctcggcgtctcccgggagtgtcccgtccagccgccgagcagaaaagactccaggaccccgccaccatgttcccggagcccccaaccccggggcctccatcgcccgacacgcctcccgactccagtcgcatcagccacggcccagtgcccccctgggccctggccaccatcgtgctggtctcaggcctcctcatcttcagctgctgtttctgtctctaccggaagagctgtcggaggcggacaggcaagaagagccaggcccaagcccaggtccaccttcaggaagtgaaggggctgggccagagttacatagacaaggtgcagccagaagtagaggagctggagccagcaccatccgggccagggcagcaggtggcagacaagcatgagctaggacgactgcagtactccctggattatgacttccagagtggccagctgctggtgggcattctgcaagcaatgggattggcagccttggatcttggtggctcctcggacccctatgtgcgggtctacctg

SEQ ID NO: 188163 - DNA, 329 bp, Homo sapiens
  Payload ID: 17028
  Gene Symbol: SYT5
  Gene Name: synaptotagmin V
  ENST ID: ENST00000587067
  CDS Start-End: 129-329
ggggctctggtgatgggcccctctcctttcagcaggagaagcttggggacatctgcttctccctccgctatgtccccacggccgggaagctcaccgtcatcgtcctggaggctaaaaacctgaagaagatggacgtaggaggactgtcagatccatacgtcaaggtccacctgctgcagggcggcaaaaaggtgcggaagaagaaaaccaccatcaagaagaacactctgaacccctattacaacgaagctttcagcttcgaggtgccctgtgaccaagtccagaaggtgcaggtggagctgaccgtgctggactacgacaagctgggc

SEQ ID NO: 188164 - DNA, 3619 bp, Homo sapiens
  Payload ID: 17028
  Gene Symbol: SYT5
  Gene Name: synaptotagmin V
  Uniprot ID: O00445
  ENST ID: ENST00000590851
  CDS Start-End: 186-1334
ggtctgctggttcccacgtctgccttcgcccgcttccggttcagaccctgcggaggggcgaggacgaggcagaagtcagcgggatgcctgtggggccgtggaggaagagggtatccctttaggatggaactaggtcctggacaccccctctcaagtgcggggaggctgatactacaactcccagcatgactcgcggtggctgtccggtttctgcgcggctgttcgcgcaaaggcctcatgggagttggagttctttgttgtgcgtggggctcaaaggacgtctggggtgggaatgggggactagggtgcttgagtgtctctgcagaaaagactccaggaccccgccaccatgttcccggagcccccaaccccggggcctccatcgcccgacacgcctcccgactccagtcgcatcagccacggcccaggtgcagccagaagtagaggagctggagccagcaccatccgggccagggcagcaggtggcagacaagcatgagctaggacgactgcagtactccctggattatgacttccagagtggccagctgctggtgggcattctgcaagcaatgggattggcagccttggatcttggtggctcctcggacccctatgtgcgggtctacctgctgccggacaaacggaggcggtacgagaccaaggtgcatcggcagacgctgaaccctcactttggggagaccttcgccttcaaggtcccctacgtggagctggggggcagggtgctggtcatggcggtgtacgacttcgaccgcttctctcgcaatgacgccatcggggaggtgcgggtccctatgagctccgtggacctggggcggccagtgcaggcctggcgggagctgcaggcggctccgcgggaggaggagaagcttggggacatctgcttctccctccgctatgtccccacggccgggaagctcaccgtcatcgtcctggaggctaaaaacctgaagaagatggacgtaggaggactgtcagatccatacgtcaaggtccacctgctgcagggcggcaaaaaggtgcggaagaagaaaaccaccatcaagaagaacactctgaacccctattacaacgaagctttcagcttcgaggtgccctgtgaccaagtccagaaggtgcaggtggagctgaccgtgctggactacgacaagctgggcaagaacgaggccatcgggagggtggccgtgggggcggccgccggcggggctggcctgcggcactgggcggacatgctggccaacccgcggcggcccattgcccagtggcactcgctgcggcccccggaccgagtgaggctgctgcctgcgccctgactcccaccccaagcccccggccaagcctggactctagcccctgaccccagactcccgagaccggccaaagccaagccagccccacccttaagcttcctctgacggttaccctccccccaccttccaccccaaccatctgaaccattcctgtcttctcacccccaacgatgccaatcacgacaactttccagcacactcccccgaccctcgcggacacacccagatgccccagggaccccgggaagggaaggcagcctggtttctcctgcccccgggtcctgccccctgctttgacaatcagccatcctcgtctgctctcctctctcttccaacacagcccatccctgcactgctcctggggccaaataaatattcagcagctccggtggcctgggcccatgctccttgatgggggtgggcaagggctgggacccaagaggaaacctcgtttccaggaatgggcgctcgcagggcggtgtgagtgctgttcgtcctgaaagcctctgagagactggcctgaccccatggactccctcacactctcacccgttcattcctcactcaccactctgagcctgggtttcctcctctggagaatgttgggataataataattcctgccacacgctggctgtgaggagtccgcgagaactcccttgcttgtccatgaatttatccactcgcttgctcacccatgactcacatcgattttcatacccatttctgcatccctccctccctctcttttttttcttccttccattccatattccctgaggtcttctgttgagtgctggggccccagaatatccaaacacagacctgaccccccaagcgacttactgccatcaaaacaaaggagaggcgcggagccagggaatacaatctccagagcctgcgagagaggttggagttcagcaaggaaagccaatgatttcaacttcacctctttcttttttcttttcttttttcctttttgttttctttctgtctttccttttctttctttttctcttgttttttttttgtttgtttgtttttttgtttttgtttttgtttttttgagatgaagtctcactttgtcgcccaggctggagtgcagtggcacgatttcggctcactgcaagctcctcctcccgggttcacgccattctcctgcctcagcctcccgagcagctgggactacaggcgcccgccaccacacccggctaatttttttgtatttttagtagagacggcatttcaccgtgttagccaggatgatctcgatctcctgacctcgtgatccgcccgcctcggcctcccaatgtgctaggattacaggcgtgagccaccgcgcccggcccttcttcttttcttttcttttctatttcttttcttctcttcttcttttttttaattttgagacggagtttcgctgttgttgcccagaatggagggcaatggtgcaatctcggctcaccgcaacccctgcctcccgggttcaagcgattcttctgcctcagcctcttctttcttctttttttgacagggtttctctgtgtaccctggctggagtgcggtggggcaatcatagctcactgcagcctcaacctcctgggctcaggggatcctcctgcctcagactcctgagtagctgggaccacaggcacatgcaaccatgcctagctaattttttcttttcttttcttttcttttttagagatggggtcttgctatgttgcacaggctggtttcaaactcctgcaatcctcctgtgtgagtagctgggactgtagacatgagccgccgcatctgacctcattgttctttcaacgaatgctgcctcctactctgtttctagcaaagatgatagttccattggcttctaccttatctcatcccatacagaattttgggtggtgaacaaagacctataagatttggccagagaactctctgagcagcagattaagtggagaatgaggcaaaaattacccccacgtaccaaaaaaggaggcagcaaacaaacttacttgctcctaagcttcctggtagccaatcgggaaagtgaaaatagaacagctacacagattataatatccatgagatttttaatttttctccaaaggaattcagtaacttttcatgtgtgtgagtgtgtgtgtgtgtgtgtgtgtgtgtgtgtgtgtgtgtgtggctgtagagcatgtctttatgaagacagccctttatgttactactattactgccaataataatcctcacagcaaactcatgaaataaacatgatcattattcccagt

SEQ ID NO: 188165 - DNA, 580 bp, Homo sapiens
  Payload ID: 17028
  Gene Symbol: SYT5
  Gene Name: synaptotagmin V
  ENST ID: ENST00000589172
  CDS Start-End: 117-580
cactggggagacaaccagagggagggcagcagcctgaagcggagagacagggatctggggacgcgagacagggtgcttgagtgtctctgcagaaaagactccaggaccccgccaccatgttcccggagcccccaaccccggggcctccatcgcccgacacgcctcccgactccagtcgcatcagccacggcccagtgcccccctgggccctggccaccatcgtgctggtctcaggcctcctcatcttcagctgctgtttctgtctctaccggaagagctgtcggaggcggacaggcaagaagagccaggcccaagcccaggtccaccttcaggaagtgaaggggctgggccagagttacatagacaaggtgcagccagaagtagaggagctggagccagcaccatccgggccagggcagcaggtggcagacaagcatgagctaggacgactgcagtactccctggattatgacttccagagtggccagctgctggtgggcattctgcaagcaatgggattggcagccttggatcttggtggctcctcggacccctatgtgcgggtctacctgctgccgga

SEQ ID NO: 188166 - DNA, 438 bp, Homo sapiens
  Payload ID: 17028
  Gene Symbol: SYT5
  Gene Name: synaptotagmin V
  ENST ID: ENST00000590859
  CDS Start-End: 1-68
cctattacaacgaagctttcagcttcgaggtgccctgtgaccaagtccagggacggcgcctaccctagcccggcccctgttaaagttctgcagctttgcggctcttaggaggctgctcccccaggaggcgccgaacacacccgctccgcaaccgagtcctgagggttcatttccttagaaacctggctgcgcaggaagaaaggcgccagagcctcctcctcgccgcaggctccgtccctctcgtctcccaccccctcccccgtcccgagctccggggccccgagccctcgggtggcagcgagaggtaccctcagccgtgaaaacggacaccgccccttccggggcctcctcccctcacgctcctctctcctcttcctcccgcgcccaccccagaaggtgcaggtggagctgaccgtgctggactacgacaagctgggc

SEQ ID NO: 188167 - DNA, 4369 bp, Homo sapiens
  Payload ID: 17029
  Gene Symbol: SYT6
  Gene Name: synaptotagmin VI
  Uniprot ID: Q5T7P8
  ENST ID: ENST00000369547
  CDS Start-End: 251-1528
tggggccgtcgtgccccgccccagtgcggccggggcgcgggttcgagctgctgctcggcaagcctgggtgtctagggcatgagcggagtgtggggggccggcgggcctcggtgccaggaggcgctcgcggtcctcgcctcgctgtgccgggcccggccgccccctctcgggctggacgtggagacttgtcggagcttcgagctgcagcccccagagcggagtcccagcgcggcaggcgcagctgtgctggatgccctggaggaacaaggaggcctccagtccctcttctgctaatccccccttggaagccctccagagccccagcttcagaggcaacatggcggacaagctgaaggaccccagcaccctgggcttcctggaggcggccgtgaagatcagccacacgtccccagatatcccagctgaggtgcagatgtcggtcaaggagcacatcatgcgtcacacccggctgcagcggcaaactacagagccagcgtcatccaccaggcacacgtccttcaagcgccacctgccaaggcagatgcatgtctccagtgtagactatggcaatgagcttccaccagcagcagagcagcccaccagcattggccgcatcaagcctgagctctacaagcagaagtcggtggatggggaggatgccaagtctgaggccaccaagagctgcgggaagatcaacttcagcctacgctacgattacgagaccgagaccctgattgtgcgtatcctgaaggcttttgacctccctgccaaggacttttgtggaagctctgacccttatgtcaagatctacctcctgcctgaccgcaaatgcaagctgcagacccgggtgcaccgcaagaccctgaaccccacctttgatgagaacttccacttccctgtgccctatgaggagctggctgaccgcaagctgcatctcagtgtcttcgactttgaccgcttctcccgccatgacatgattggcgaggtcatcctggacaacctctttgaggcctctgacctgtctcgggaaacctccatctggaaggatatccaatatgccacaagtgaaagcgtggacttgggagagatcatgttctccctttgctacctgcccactgcaggcaggctcaccctcacagtgattaagtgtcggaacctcaaggcgatggacatcacaggctattcagatccctatgtgaaagtgtccttgctctgtgatgggcggaggctgaagaagaagaaaacaaccataaagaaaaacactctcaatcctgtctacaatgaggccatcatctttgacattcccccggaaaacatggatcaagtcagcctgctcatctcagtcatggactatgatcgagtgggccacaatgagatcataggagtctgtcgtgtggggatcactgctgaaggcctgggcagggaccactggaacgagatgctggcatacccccggaagcccatcgcacactggcactccttggtggaggtaaagaaatccttcaaagagggaaaccctcggttgtgatttcattcacgtggatgctgcaagcagagagactgccacctggagttaggatggcagggccgagctgctagcttcgacagtgagagctcgtgcccatctccgaaaccacctccaacaccatgagatgtgcagccaaataacacaaatgggactcagcaatgttctctttgcacttgttcaaccgtctaaacagtgttgtgcagtcgcagtggcggcagcagcggcagccgtccgtcactccagagtcttacctgctcctgtgtaggtcaaagctgagacacttgtcatgtggtcagatctgtcttagtcttttgtgtctcccaaggtgatgtttttgtggtttttcactttttatgggtctgctggtaagaaaagggaaaaaaaaaaagagtaggaaaagacaaagggtggaaagcccagaagttggttctagaaaatacaaggtacagttttttggaaagaggtggattgagtttctgaaatgctgcgtctccagcaagctccacaaccctggaaaaggaggaggcgtggtgggactgcggctgcattttcagtgccctgcaggaatggggtgaatccatggaagagcctttgtgaggtgaattactagtctttgaagctcttcgctggcaggacataaaccacgctgggaccctcagtcccgtgttgaaatcacaagacctctgaggcgcttgtgagccttcagctgatgtgcagggttcctcgctccccttcctcgctggctttccccatgaattgaaaacgtcttgattcctcatgggaacttagtcactttctttaggaatgattcagttcagccgaaactaaacacgccatatgttttctgatgcgccacagttaatgatcacatttgtttgaaaacaggatctttgtcctcagaaataatcttgattgtaaagtaagagagaaacatatgttctggaatgatttctgcattatacatagctttataattccatgaagtatcaagctgctgtttaaaatgcctaaacagattaaagaaaaacctagattaaatgttcttttccaaatggggagttttgaaatccaaatagcagtttgagtccatctttctatgaagagtatgtttttgattgaaaccgagtcagcgtaagcctatttcagcccctttggctctttgacaatattcatcttaaactttagttctataaattactaagtacttcagtgttgtttgtttcagtggttgtgagggtttcttgtttcctttagatctttaccttaggccaaactcagtttaggaaaaaaaaaattgtttgaactattctgtgttgtaatagcacatttctgttgagttaatagtggtcttcccaccaacccctaaaaccaggttgatttgctcaatctcagtttgtataaccccagtaagcgcatggaggtgagtttctacttcgacttgtggcgacacagtgccagtttcctgagctgtgtgtactacttgcaagaggcaagtctgctgaagaaccccttcttttaacagtggaaaatcaagaacagaaaatctgttcacacacctgtgtcttattctttatatatgctacatggtagaggagcagcgaccaataaagtatccctcattttaaaccaagttgtcagatttctctgctgatagaacgctgcatagtatcttctagccctaaaaatgaccaggttgggcatgagttaacaggatattgtggcaaaaggaattttctgcttagaaaagtaaatgtagataaacctaaactccaccctgtactgagccttaggctagggactcatgtgtaaagatgacttttctccccagatatcttgtcattgacaggccttcctagtctggtagtcctacatttgggtgttctcctgagagtgagaaaaaacccaaggtcatgacaagattcctggcaggtgacagacttcattatgattctgactctagactgaccccatcaagatagtcgtttccgtcagtgaacagatgctgaaggccttgccattacaaaggagacaactgagttccctgggtcataaggagtccagaaattagtgtgagaaggtccttctggaagtgaactcaaaattcatgtccagctgtcatcgttaaacccttaggcaggtgagtataacccattctaacctcttggagaagggagtgtgatcaatgtgaatcacaatagtattgctcatctgagacattcctcttatatccaagcagctatctcccatgagtgaacatcccagtggtttcagaaaatcatgtcctgaacagattctagccagccccacaccaccctggccaactgcaaccgctgctgctctagcagtctgggtcaattcctacaggcttgggagcccaccccagggaggcttttatctcctgcagcctcatccccagcaccctcaaggtagactactcctcagcctgaatcatgaatgaaacctgaacatctgccaacttcattatctagcccagtatctcttccctcacagagaagaagaaaatgaaatacaaagttgatccatttgttggctttctctggccggagaaacctctcgggttgttgctgtgagctttgatgaagttgtgataaccagggccatttgcacataggtttttttaaaaaacatgaaaagttcccttctcctttatttagcagtgtttccgggctgaaagacgccctcctccccctctgcgcttacccaggacgttaattaattgcactgtcatttaaaatattatgttgttaattactcgtttgtgtcttcccacccgtgtcacagcctggagtttttattcaattaaatctctgtctcttgccc

SEQ ID NO: 188168 - DNA, 611 bp, Homo sapiens
  Payload ID: 17029
  Gene Symbol: SYT6
  Gene Name: synaptotagmin VI
  ENST ID: ENST00000608879
  CDS Start-End: 237-611
ggactcggggccggtgcgcgactgagctggcgcctctagccgactttgccaagagggcgcctcctgcccgatccgcgctgaccctgcgcgggacgcagccccaggcggctgcctagccgaggcgggagcccgagctgagtcgagctcgccggagcgggtgagtcccgagcccgatccccgccgggctggaccctggcgcgcagctgcggcgtctccggggagtcgcggcagggggaatggcgtgtcgcgccctggcggcgggagctgcgggagggtcggcgacgtggcggccggcccagggcacctctgtcagcctcctcgcagttgtagttattgtgtgtggcgtggccctggtggcagtttttctctttctcttttggaagctgtgctggatgccctggaggaacaaggaggcctccagtccctcttctgctaatccccccttggaagccctccagagccccagcttcagaggcaacatggcggacaagctgaaggaccccagcaccctgggcttcctggaggcggccgtgaagatcagccacacgtccccagatatcccagctgaggtgcagatgtcggtcaaggagcacatcatgcgtcacacccgg

SEQ ID NO: 188169 - DNA, 1707 bp, Homo sapiens
  Payload ID: 17029
  Gene Symbol: SYT6
  Gene Name: synaptotagmin VI
  Uniprot ID: Q5T7P8
  ENST ID: ENST00000610222
  CDS Start-End: 148-1680
ggggaccctgcggggaagtgattaaaagcagagcggagccgcagggggccgctgcagggagggtcttcttggggccgtcgtgccccgccccagtgcggccggggcgcgggttcgagctgctgctcggcaagcctgggtgtctagggcatgagcggagtgtggggggccggcgggcctcggtgccaggaggcgctcgcggtcctcgcctcgctgtgccgggcccggccgccccctctcgggctggacgtggagacttgtcggagcttcgagctgcagcccccagagcggagtcccagcgcggcaggcgcaggcacctctgtcagcctcctcgcagttgtagttattgtgtgtggcgtggccctggtggcagtttttctctttctcttttggaagctgtgctggatgccctggaggaacaaggaggcctccagtccctcttctgctaatccccccttggaagccctccagagccccagcttcagaggcaacatggcggacaagctgaaggaccccagcaccctgggcttcctggaggcggccgtgaagatcagccacacgtccccagatatcccagctgaggtgcagatgtcggtcaaggagcacatcatgcgtcacacccggctgcagcggcaaactacagagccagcgtcatccaccaggcacacgtccttcaagcgccacctgccaaggcagatgcatgtctccagtgtagactatggcaatgagcttccaccagcagcagagcagcccaccagcattggccgcatcaagcctgagctctacaagcagaagtcggtggatggggaggatgccaagtctgaggccaccaagagctgcgggaagatcaacttcagcctacgctacgattacgagaccgagaccctgattgtgcgtatcctgaaggcttttgacctccctgccaaggacttttgtggaagctctgacccttatgtcaagatctacctcctgcctgaccgcaaatgcaagctgcagacccgggtgcaccgcaagaccctgaaccccacctttgatgagaacttccacttccctgtgccctatgaggagctggctgaccgcaagctgcatctcagtgtcttcgactttgaccgcttctcccgccatgacatgattggcgaggtcatcctggacaacctctttgaggcctctgacctgtctcgggaaacctccatctggaaggatatccaatatgccacaagtgaaagcgtggacttgggagagatcatgttctccctttgctacctgcccactgcaggcaggctcaccctcacagtgattaagtgtcggaacctcaaggcgatggacatcacaggctattcagatccctatgtgaaagtgtccttgctctgtgatgggcggaggctgaagaagaagaaaacaaccataaagaaaaacactctcaatcctgtctacaatgaggccatcatctttgacattcccccggaaaacatggatcaagtcagcctgctcatctcagtcatggactatgatcgagtgggccacaatgagatcataggagtctgtcgtgtggggatcactgctgaaggcctgggcagggaccactggaacgagatgctggcatacccccggaagcccatcgcacactggcactccttggtggaggtaaagaaatccttcaaagagggaaaccctcggttgtgatttcattcacgtggatgctgcaagcag

SEQ ID NO: 188170 - DNA, 4352 bp, Homo sapiens
  Payload ID: 17029
  Gene Symbol: SYT6
  Gene Name: synaptotagmin VI
  Uniprot ID: Q5T7P8
  ENST ID: ENST00000607941
  CDS Start-End: 233-1510
aaggaccaggacgccggggttccaggagactctgcaggctccatccctccttattcccccaccccgaccccagtagcgctgggcctaggagcactcgggagttgctcagtggctctgcaccgctggcgcgggaaggggagaaaggggctgccagaggcgggaatttggtccccacgcgctgctccagggacgagaagccagggaccggcggttctgggagcagctgtgctggatgccctggaggaacaaggaggcctccagtccctcttctgctaatccccccttggaagccctccagagccccagcttcagaggcaacatggcggacaagctgaaggaccccagcaccctgggcttcctggaggcggccgtgaagatcagccacacgtccccagatatcccagctgaggtgcagatgtcggtcaaggagcacatcatgcgtcacacccggctgcagcggcaaactacagagccagcgtcatccaccaggcacacgtccttcaagcgccacctgccaaggcagatgcatgtctccagtgtagactatggcaatgagcttccaccagcagcagagcagcccaccagcattggccgcatcaagcctgagctctacaagcagaagtcggtggatggggaggatgccaagtctgaggccaccaagagctgcgggaagatcaacttcagcctacgctacgattacgagaccgagaccctgattgtgcgtatcctgaaggcttttgacctccctgccaaggacttttgtggaagctctgacccttatgtcaagatctacctcctgcctgaccgcaaatgcaagctgcagacccgggtgcaccgcaagaccctgaaccccacctttgatgagaacttccacttccctgtgccctatgaggagctggctgaccgcaagctgcatctcagtgtcttcgactttgaccgcttctcccgccatgacatgattggcgaggtcatcctggacaacctctttgaggcctctgacctgtctcgggaaacctccatctggaaggatatccaatatgccacaagtgaaagcgtggacttgggagagatcatgttctccctttgctacctgcccactgcaggcaggctcaccctcacagtgattaagtgtcggaacctcaaggcgatggacatcacaggctattcagatccctatgtgaaagtgtccttgctctgtgatgggcggaggctgaagaagaagaaaacaaccataaagaaaaacactctcaatcctgtctacaatgaggccatcatctttgacattcccccggaaaacatggatcaagtcagcctgctcatctcagtcatggactatgatcgagtgggccacaatgagatcataggagtctgtcgtgtggggatcactgctgaaggcctgggcagggaccactggaacgagatgctggcatacccccggaagcccatcgcacactggcactccttggtggaggtaaagaaatccttcaaagagggaaaccctcggttgtgatttcattcacgtggatgctgcaagcagagagactgccacctggagttaggatggcagggccgagctgctagcttcgacagtgagagctcgtgcccatctccgaaaccacctccaacaccatgagatgtgcagccaaataacacaaatgggactcagcaatgttctctttgcacttgttcaaccgtctaaacagtgttgtgcagtcgcagtggcggcagcagcggcagccgtccgtcactccagagtcttacctgctcctgtgtaggtcaaagctgagacacttgtcatgtggtcagatctgtcttagtcttttgtgtctcccaaggtgatgtttttgtggtttttcactttttatgggtctgctggtaagaaaagggaaaaaaaaaaagagtaggaaaagacaaagggtggaaagcccagaagttggttctagaaaatacaaggtacagttttttggaaagaggtggattgagtttctgaaatgctgcgtctccagcaagctccacaaccctggaaaaggaggaggcgtggtgggactgcggctgcattttcagtgccctgcaggaatggggtgaatccatggaagagcctttgtgaggtgaattactagtctttgaagctcttcgctggcaggacataaaccacgctgggaccctcagtcccgtgttgaaatcacaagacctctgaggcgcttgtgagccttcagctgatgtgcagggttcctcgctccccttcctcgctggctttccccatgaattgaaaacgtcttgattcctcatgggaacttagtcactttctttaggaatgattcagttcagccgaaactaaacacgccatatgttttctgatgcgccacagttaatgatcacatttgtttgaaaacaggatctttgtcctcagaaataatcttgattgtaaagtaagagagaaacatatgttctggaatgatttctgcattatacatagctttataattccatgaagtatcaagctgctgtttaaaatgcctaaacagattaaagaaaaacctagattaaatgttcttttccaaatggggagttttgaaatccaaatagcagtttgagtccatctttctatgaagagtatgtttttgattgaaaccgagtcagcgtaagcctatttcagcccctttggctctttgacaatattcatcttaaactttagttctataaattactaagtacttcagtgttgtttgtttcagtggttgtgagggtttcttgtttcctttagatctttaccttaggccaaactcagtttaggaaaaaaaaaattgtttgaactattctgtgttgtaatagcacatttctgttgagttaatagtggtcttcccaccaacccctaaaaccaggttgatttgctcaatctcagtttgtataaccccagtaagcgcatggaggtgagtttctacttcgacttgtggcgacacagtgccagtttcctgagctgtgtgtactacttgcaagaggcaagtctgctgaagaaccccttcttttaacagtggaaaatcaagaacagaaaatctgttcacacacctgtgtcttattctttatatatgctacatggtagaggagcagcgaccaataaagtatccctcattttaaaccaagttgtcagatttctctgctgatagaacgctgcatagtatcttctagccctaaaaatgaccaggttgggcatgagttaacaggatattgtggcaaaaggaattttctgcttagaaaagtaaatgtagataaacctaaactccaccctgtactgagccttaggctagggactcatgtgtaaagatgacttttctccccagatatcttgtcattgacaggccttcctagtctggtagtcctacatttgggtgttctcctgagagtgagaaaaaacccaaggtcatgacaagattcctggcaggtgacagacttcattatgattctgactctagactgaccccatcaagatagtcgtttccgtcagtgaacagatgctgaaggccttgccattacaaaggagacaactgagttccctgggtcataaggagtccagaaattagtgtgagaaggtccttctggaagtgaactcaaaattcatgtccagctgtcatcgttaaacccttaggcaggtgagtataacccattctaacctcttggagaagggagtgtgatcaatgtgaatcacaatagtattgctcatctgagacattcctcttatatccaagcagctatctcccatgagtgaacatcccagtggtttcagaaaatcatgtcctgaacagattctagccagccccacaccaccctggccaactgcaaccgctgctgctctagcagtctgggtcaattcctacaggcttgggagcccaccccagggaggcttttatctcctgcagcctcatccccagcaccctcaaggtagactactcctcagcctgaatcatgaatgaaacctgaacatctgccaacttcattatctagcccagtatctcttccctcacagagaagaagaaaatgaaatacaaagttgatccatttgttggctttctctggccggagaaacctctcgggttgttgctgtgagctttgatgaagttgtgataaccagggccatttgcacataggtttttttaaaaaacatgaaaagttcccttctcctttatttagcagtgtttccgggctgaaagacgccctcctccccctctgcgcttacccaggacgttaattaattgcactgtcatttaaaatattatgttgttaattactcgtttgtgtcttcccacccgtgtcacagcctggagtttttattcaattaaatctctgtctcttgccca

SEQ ID NO: 188171 - DNA, 4320 bp, Homo sapiens
  Payload ID: 17029
  Gene Symbol: SYT6
  Gene Name: synaptotagmin VI
  ENST ID: ENST00000610121
  CDS Start-End: 97-312
ctgcagggagggtcttcttggggccgtcgtgccccgccccagtgcggccggggcgcgggttcgagctgctgctcggcaagcctgggtgtctagggcatgagcggagtgtggggggccggcgggcctcggtgccaggaggcgctcgcggtcctcgcctcgctgtgccgggcccggccgccccctctcgggctggacgtggagacttgtcggagcttcgagctgcagcccccagagcggagtcccagcgcggcaggcgcagctgtgctggatgccctggaggaacaaggaggcctccagtccctcttctgctaatccccccttggaagccctccagagccccagcttcagaggcaacatggcggacaagctgaaggaccccagcaccctgggcttcctggaggcggccgtgaagatcagccacacgtccccagatatcccagctgaggtgcagatgtcggtcaaggagcacatcatgcgtcacacccggctgcagcggcaaactacagagccagcgtcatccaccaggcacacgtccttcaagcgccacctgccaaggcagatgcatgtctccagtgtagactatggcaatgagcttccaccagcagcagagcagcccaccagcattggccgcatcaagcctgagctctacaagcagaagtcggtggatggggaggatgccaagtctgaggccaccaagagctgcgggaagatcaacttcagcctacgctacgattacgagaccgagaccctgattgtgcgtatcctgaaggcttttgacctccctgccaaggacttttgtggaagctctgacccttatgtcaagatctacctcctgcctgaccgcaaatgcaagctgcagacccgggtgcaccgcaagaccctgaaccccacctttgatgagaacttccacttccctgtgccctatgaggagctggctgaccgcaagctgcatctcagtgtcttcgactttgaccgcttctcccgccatgacatgattggcgaggtcatcctggacaacctctttgaggcctctgacctgtctcgggaaacctccatctggaaggatatccaatatgccacaagtgaaagcgtggacttgggagagatcatgttctccctttgctacctgcccactgcaggcaggctcaccctcacagtgattaagtgtcggaacctcaaggcgatggacatcacaggctattcagatccctatgtgaaagtgtccttgctctgtgatgggcggaggctgaagaagaagaaaacaaccataaagaaaaacactctcaatcctgtctacaatgaggccatcatctttgacattcccccggaaaacatggatcaagtcagcctgctcatctcagtcatggactatgatcgagtgggccacaatgagatcataggagtctgtcgtgtggggatcactgctgaaggcctgggcagggaccactggaacgagatgctggcatacccccggaagcccatcgcacactggcactccttggtggaggtaaagaaatccttcaaagagtggcagggccgagctgctagcttcgacagtgagagctcgtgcccatctccgaaaccacctccaacaccatgagatgtgcagccaaataacacaaatgggactcagcaatgttctctttgcacttgttcaaccgtctaaacagtgttgtgcagtcgcagtggcggcagcagcggcagccgtccgtcactccagagtcttacctgctcctgtgtaggtcaaagctgagacacttgtcatgtggtcagatctgtcttagtcttttgtgtctcccaaggtgatgtttttgtggtttttcactttttatgggtctgctggtaagaaaagggaaaaaaaaaaagagtaggaaaagacaaagggtggaaagcccagaagttggttctagaaaatacaaggtacagttttttggaaagaggtggattgagtttctgaaatgctgcgtctccagcaagctccacaaccctggaaaaggaggaggcgtggtgggactgcggctgcattttcagtgccctgcaggaatggggtgaatccatggaagagcctttgtgaggtgaattactagtctttgaagctcttcgctggcaggacataaaccacgctgggaccctcagtcccgtgttgaaatcacaagacctctgaggcgcttgtgagccttcagctgatgtgcagggttcctcgctccccttcctcgctggctttccccatgaattgaaaacgtcttgattcctcatgggaacttagtcactttctttaggaatgattcagttcagccgaaactaaacacgccatatgttttctgatgcgccacagttaatgatcacatttgtttgaaaacaggatctttgtcctcagaaataatcttgattgtaaagtaagagagaaacatatgttctggaatgatttctgcattatacatagctttataattccatgaagtatcaagctgctgtttaaaatgcctaaacagattaaagaaaaacctagattaaatgttcttttccaaatggggagttttgaaatccaaatagcagtttgagtccatctttctatgaagagtatgtttttgattgaaaccgagtcagcgtaagcctatttcagcccctttggctctttgacaatattcatcttaaactttagttctataaattactaagtacttcagtgttgtttgtttcagtggttgtgagggtttcttgtttcctttagatctttaccttaggccaaactcagtttaggaaaaaaaaaattgtttgaactattctgtgttgtaatagcacatttctgttgagttaatagtggtcttcccaccaacccctaaaaccaggttgatttgctcaatctcagtttgtataaccccagtaagcgcatggaggtgagtttctacttcgacttgtggcgacacagtgccagtttcctgagctgtgtgtactacttgcaagaggcaagtctgctgaagaaccccttcttttaacagtggaaaatcaagaacagaaaatctgttcacacacctgtgtcttattctttatatatgctacatggtagaggagcagcgaccaataaagtatccctcattttaaaccaagttgtcagatttctctgctgatagaacgctgcatagtatcttctagccctaaaaatgaccaggttgggcatgagttaacaggatattgtggcaaaaggaattttctgcttagaaaagtaaatgtagataaacctaaactccaccctgtactgagccttaggctagggactcatgtgtaaagatgacttttctccccagatatcttgtcattgacaggccttcctagtctggtagtcctacatttgggtgttctcctgagagtgagaaaaaacccaaggtcatgacaagattcctggcaggtgacagacttcattatgattctgactctagactgaccccatcaagatagtcgtttccgtcagtgaacagatgctgaaggccttgccattacaaaggagacaactgagttccctgggtcataaggagtccagaaattagtgtgagaaggtccttctggaagtgaactcaaaattcatgtccagctgtcatcgttaaacccttaggcaggtgagtataacccattctaacctcttggagaagggagtgtgatcaatgtgaatcacaatagtattgctcatctgagacattcctcttatatccaagcagctatctcccatgagtgaacatcccagtggtttcagaaaatcatgtcctgaacagattctagccagccccacaccaccctggccaactgcaaccgctgctgctctagcagtctgggtcaattcctacaggcttgggagcccaccccagggaggcttttatctcctgcagcctcatccccagcaccctcaaggtagactactcctcagcctgaatcatgaatgaaacctgaacatctgccaacttcattatctagcccagtatctcttccctcacagagaagaagaaaatgaaatacaaagttgatccatttgttggctttctctggccggagaaacctctcgggttgttgctgtgagctttgatgaagttgtgataaccagggccatttgcacataggtttttttaaaaaacatgaaaagttcccttctcctttatttagcagtgtttccgggctgaaagacgccctcctccccctctgcgcttacccaggacgttaattaattgcactgtcatttaaaatattatgttgttaattactcgtttgtgtcttcccacccgtgtcacagcctggagtttttattcaattaaatctctgtctcttgcccat

SEQ ID NO: 188172 - DNA, 843 bp, Homo sapiens
  Payload ID: 17029
  Gene Symbol: SYT6
  Gene Name: synaptotagmin VI
  ENST ID: ENST00000608203
  CDS Start-End: 202-843
ccctataactcgctccctccgtccctctcggactcggactcggggccggtgcgcgactgagctggcgcctctagccgactttgccaagagggcgcctcctgcccgatccgcgctgaccctgcgcgggacgcagccccaggcggctgcctagccgaggcgggagcccgagctgagtcgagctcgccggagcggctgtgctggatgccctggaggaacaaggaggcctccagtccctcttctgctaatccccccttggaagccctccagagccccagcttcagaggcaacatggcggacaagctgaaggaccccagcaccctgggcttcctggaggcggccgtgaagatcagccacacgtccccagatatcccagctgaggtgcagatgtcggtcaaggagcacatcatgcgtcacacccggctgcagcggcaaactacagagccagcgtcatccaccaggcacacgtccttcaagcgccacctgccaaggcagatgcatgtctccagtgtagactatggcaatgagcttccaccagcagcagagcagcccaccagcattggccgcatcaagcctgagctctacaagcagaagtcggtggatggggaggatgccaagtctgaggccaccaagagctgcgggaagatcaacttcagcctacgctacgattacgagaccgagaccctgattgtgcgtatcctgaaggcttttgacctccctgccaaggacttttgtggaagctctgacccttatgtcaagatctacctcctgcctgaccgcaaatgcaagctgcagacccgggtgcaccgcaagaccctgaaccccacctttgatgagaacttccac

SEQ ID NO: 188173 - DNA, 572 bp, Homo sapiens
  Payload ID: 17029
  Gene Symbol: SYT6
  Gene Name: synaptotagmin VI
  ENST ID: ENST00000609577
  CDS Start-End: 308-572
gtccttcccccaccccctctcgcccctataactcgctccctccgtccctctcggactcggactcggggccggtgcgcgactgagctggcgcctctagccgactttgccaagagggcgcctcctgcccgatccgcgctgaccctgcgcgggacgcagccccaggcggctgcctagccgaggcgggagcccgagctgagtcgagctcgccggagcgggcacctctgtcagcctcctcgcagttgtagttattgtgtgtggcgtggccctggtggcagtttttctctttctcttttggaagctgtgctggatgccctggaggaacaaggaggcctccagtccctcttctgctaatccccccttggaagccctccagagccccagcttcagaggcaacatggcggacaagctgaaggaccccagcaccctgggcttcctggaggcggccgtgaagatcagccacacgtccccagatatcccagctgaggtgcagatgtcggtcaaggagcacatcatgcgtcacacccggctgcagcggcaaactacagagccagcgtcatccaccaggcacacgt

SEQ ID NO: 188174 - DNA, 1897 bp, Homo sapiens
  Payload ID: 17029
  Gene Symbol: SYT6
  Gene Name: synaptotagmin VI
  ENST ID: ENST00000610096
  CDS Start-End: 79-294
tggggccgtcgtgccccgccccagtgcggccggggcgcgggttcgagctgctgctcggcaagcctgggtgtctagggcatgagcggagtgtggggggccggcgggcctcggtgccaggaggcgctcgcggtcctcgcctcgctgtgccgggcccggccgccccctctcgggctggacgtggagacttgtcggagcttcgagctgcagcccccagagcggagtcccagcgcggcaggcgcagctgtgctggatgccctggaggaacaaggaggcctccagtccctcttctgctaatccccccttggaagccctccagagccccagcttcagaggcaacatggcggacaagctgaaggaccccagcaccctgggcttcctggaggcggccgtgaagatcagccacacgtccccagatatcccagctgaggtgcagatgtcggtcaaggagcacatcatgcgtcacacccggctgcagcggcaaactacagagccagcgtcatccaccaggcacacgtccttcaagcgccacctgccaaggcagatgcatgtctccagtgtagactatggcaatgagcttccaccagcagcagagcagcccaccagcattggccgcatcaagcctgagctctacaagcagaagtcggtggatggggaggatgccaagtctgaggccaccaagagctgcgggaagatcaacttcagcctacgctacgattacgagaccgagaccctgattgtgcgtatcctgaaggcttttgacctccctgccaaggacttttgtggaagctctgacccttatgtcaagatctacctcctgcctgaccgcaaatgcaagctgcagacccgggtgcaccgcaagaccctgaaccccacctttgatgagaacttccacttccctgtgccctatgaggagctggctgaccgcaagctgcatctcagtgtcttcgactttgaccgcttctcccgccatgacatgattggcgaggtcatcctggacaacctctttgaggcctctgacctgtctcgggaaacctccatctggaaggatatccaatatgccacaagtgaaagcgtggacttgggagagatcatgttctccctttgctacctgcccactgcaggcaggctcaccctcacagtgattaagtgtcggaacctcaaggcgatggacatcacaggctattcagatccctatgtgaaagtgtccttgctctgtgatgggcggaggctgaagaagaagaaaacaaccataaagaaaaacactctcaatcctgtctacaatgaggccatcatctttgacattcccccggaaaacatggatcaagtcagcctgctcatctcagtcatggactatgatcgagtgggccacaatgagatcataggagtctgtcgtgtggggatcactgctgaaggcctgggcagggaccactggaacgagatgctggcatacccccggaagcccatcgcacactggcactccttggtggaggtaaagaaatccttcaaagagggaaaccctcggttgtgatttcattcacgtggatgctgcaagcagagagactgccacctggagttaggatggcagggccgagctgctagcttcgacagtgagagctcgtgcccatctccgaaaccacctccaacaccatgagatgtgcagccaaataacacaaatgggactcagcaatgttctctttgcacttgttcaaccgtctaaacagtgttgtgcagtcgcagtggcggcagcagcggcagccgtccgtcactccagagtcttacctgctcctgtgtaggtcaaagctgagacacttgtcatgtggtcagatctgtcttagtcttttgtgtctcccaaggtgatgtttttgtggtttttcactttttatgggtctgctggtaa

SEQ ID NO: 188175 - DNA, 4424 bp, Homo sapiens
  Payload ID: 17029
  Gene Symbol: SYT6
  Gene Name: synaptotagmin VI
  Uniprot ID: Q5T7P8
  ENST ID: ENST00000609117
  CDS Start-End: 305-1582
cggggccggtgcgcgactgagctggcgcctctagccgactttgccaagagggcgcctcctgcccgatccgcgctgaccctgcgcgggacgcagccccaggcggctgcctagccgaggcgggagcccgagctgagtcgagctcgccggagcgggtgagtcccgagcccgatccccgccgggctggaccctggcgcgcagctgcggcgtctccggggagtcgcggcagggggaatggcgtgtcgcgccctggcggcgggagctgcgggagggtcggcgacgtggcggccggcccaggctgtgctggatgccctggaggaacaaggaggcctccagtccctcttctgctaatccccccttggaagccctccagagccccagcttcagaggcaacatggcggacaagctgaaggaccccagcaccctgggcttcctggaggcggccgtgaagatcagccacacgtccccagatatcccagctgaggtgcagatgtcggtcaaggagcacatcatgcgtcacacccggctgcagcggcaaactacagagccagcgtcatccaccaggcacacgtccttcaagcgccacctgccaaggcagatgcatgtctccagtgtagactatggcaatgagcttccaccagcagcagagcagcccaccagcattggccgcatcaagcctgagctctacaagcagaagtcggtggatggggaggatgccaagtctgaggccaccaagagctgcgggaagatcaacttcagcctacgctacgattacgagaccgagaccctgattgtgcgtatcctgaaggcttttgacctccctgccaaggacttttgtggaagctctgacccttatgtcaagatctacctcctgcctgaccgcaaatgcaagctgcagacccgggtgcaccgcaagaccctgaaccccacctttgatgagaacttccacttccctgtgccctatgaggagctggctgaccgcaagctgcatctcagtgtcttcgactttgaccgcttctcccgccatgacatgattggcgaggtcatcctggacaacctctttgaggcctctgacctgtctcgggaaacctccatctggaaggatatccaatatgccacaagtgaaagcgtggacttgggagagatcatgttctccctttgctacctgcccactgcaggcaggctcaccctcacagtgattaagtgtcggaacctcaaggcgatggacatcacaggctattcagatccctatgtgaaagtgtccttgctctgtgatgggcggaggctgaagaagaagaaaacaaccataaagaaaaacactctcaatcctgtctacaatgaggccatcatctttgacattcccccggaaaacatggatcaagtcagcctgctcatctcagtcatggactatgatcgagtgggccacaatgagatcataggagtctgtcgtgtggggatcactgctgaaggcctgggcagggaccactggaacgagatgctggcatacccccggaagcccatcgcacactggcactccttggtggaggtaaagaaatccttcaaagagggaaaccctcggttgtgatttcattcacgtggatgctgcaagcagagagactgccacctggagttaggatggcagggccgagctgctagcttcgacagtgagagctcgtgcccatctccgaaaccacctccaacaccatgagatgtgcagccaaataacacaaatgggactcagcaatgttctctttgcacttgttcaaccgtctaaacagtgttgtgcagtcgcagtggcggcagcagcggcagccgtccgtcactccagagtcttacctgctcctgtgtaggtcaaagctgagacacttgtcatgtggtcagatctgtcttagtcttttgtgtctcccaaggtgatgtttttgtggtttttcactttttatgggtctgctggtaagaaaagggaaaaaaaaaaagagtaggaaaagacaaagggtggaaagcccagaagttggttctagaaaatacaaggtacagttttttggaaagaggtggattgagtttctgaaatgctgcgtctccagcaagctccacaaccctggaaaaggaggaggcgtggtgggactgcggctgcattttcagtgccctgcaggaatggggtgaatccatggaagagcctttgtgaggtgaattactagtctttgaagctcttcgctggcaggacataaaccacgctgggaccctcagtcccgtgttgaaatcacaagacctctgaggcgcttgtgagccttcagctgatgtgcagggttcctcgctccccttcctcgctggctttccccatgaattgaaaacgtcttgattcctcatgggaacttagtcactttctttaggaatgattcagttcagccgaaactaaacacgccatatgttttctgatgcgccacagttaatgatcacatttgtttgaaaacaggatctttgtcctcagaaataatcttgattgtaaagtaagagagaaacatatgttctggaatgatttctgcattatacatagctttataattccatgaagtatcaagctgctgtttaaaatgcctaaacagattaaagaaaaacctagattaaatgttcttttccaaatggggagttttgaaatccaaatagcagtttgagtccatctttctatgaagagtatgtttttgattgaaaccgagtcagcgtaagcctatttcagcccctttggctctttgacaatattcatcttaaactttagttctataaattactaagtacttcagtgttgtttgtttcagtggttgtgagggtttcttgtttcctttagatctttaccttaggccaaactcagtttaggaaaaaaaaaattgtttgaactattctgtgttgtaatagcacatttctgttgagttaatagtggtcttcccaccaacccctaaaaccaggttgatttgctcaatctcagtttgtataaccccagtaagcgcatggaggtgagtttctacttcgacttgtggcgacacagtgccagtttcctgagctgtgtgtactacttgcaagaggcaagtctgctgaagaaccccttcttttaacagtggaaaatcaagaacagaaaatctgttcacacacctgtgtcttattctttatatatgctacatggtagaggagcagcgaccaataaagtatccctcattttaaaccaagttgtcagatttctctgctgatagaacgctgcatagtatcttctagccctaaaaatgaccaggttgggcatgagttaacaggatattgtggcaaaaggaattttctgcttagaaaagtaaatgtagataaacctaaactccaccctgtactgagccttaggctagggactcatgtgtaaagatgacttttctccccagatatcttgtcattgacaggccttcctagtctggtagtcctacatttgggtgttctcctgagagtgagaaaaaacccaaggtcatgacaagattcctggcaggtgacagacttcattatgattctgactctagactgaccccatcaagatagtcgtttccgtcagtgaacagatgctgaaggccttgccattacaaaggagacaactgagttccctgggtcataaggagtccagaaattagtgtgagaaggtccttctggaagtgaactcaaaattcatgtccagctgtcatcgttaaacccttaggcaggtgagtataacccattctaacctcttggagaagggagtgtgatcaatgtgaatcacaatagtattgctcatctgagacattcctcttatatccaagcagctatctcccatgagtgaacatcccagtggtttcagaaaatcatgtcctgaacagattctagccagccccacaccaccctggccaactgcaaccgctgctgctctagcagtctgggtcaattcctacaggcttgggagcccaccccagggaggcttttatctcctgcagcctcatccccagcaccctcaaggtagactactcctcagcctgaatcatgaatgaaacctgaacatctgccaacttcattatctagcccagtatctcttccctcacagagaagaagaaaatgaaatacaaagttgatccatttgttggctttctctggccggagaaacctctcgggttgttgctgtgagctttgatgaagttgtgataaccagggccatttgcacataggtttttttaaaaaacatgaaaagttcccttctcctttatttagcagtgtttccgggctgaaagacgccctcctccccctctgcgcttacccaggacgttaattaattgcactgtcatttaaaatattatgttgttaattactcgtttgtgtcttcccacccgtgtcacagcctggagtttttattcaattaaatctctgtctcttgccca

SEQ ID NO: 188176 - DNA, 4854 bp, Homo sapiens
  Payload ID: 17030
  Gene Symbol: SYT7
  Gene Name: synaptotagmin VII
  Uniprot ID: O43581
  ENST ID: ENST00000263846
  CDS Start-End: 329-1540
ccgggcgcgctcacacacgcgctcacacacacacatacacacggcctcgtacacacacacacgctccggcgcgcacacgcggcgcgcaggccggagggaggcggctcggcgctgttcggcggcggcggcagcgtgctccgcgggcgggcgggagggctggcgggcggcccccgctccccggctccgcggctaggtgcagcccgctcggcccccgccctcggacccgcccccgggggtcgcccggccccatgcccagcggcggcggcggagcagcgcgcggccgcgggcggctctgaggagcccggagggaaccggcgacgaggggaccatgtaccgggacccggaggcggccagcccaggggcgccctcgcgcgacgtcctgctggtctctgccatcatcaccgtcagccttagcgtcactgtcgtcctctgcggcctctgccactggtgtcagcgcaaactgggcaaacgctacaagaattccttggagacggtgggcacgccagactcagggcgtgggcgcagtgagaagaaggctatcaagttgcctgcaggagggaaggcggtgaacacagcccccgtgccaggccagacaccccacgatgagtccgaccgccggaccgagccacgttcctccgtctcagacctcgtcaactccctcaccagcgagatgctcatgctctccccaggctccgaggaggatgaggcccacgagggttgcagccgagagaacctgggccggatccagttcagtgtcggctacaacttccaggagtccacgctcaccgtgaagatcatgaaggcccaggagctgccggccaaggacttcagcggcaccagcgaccccttcgtcaagatctacctgctgcccgacaagaagcacaagctggagaccaaggtgaagcggaagaacctgaacccccactggaacgagaccttcctctttgaaggttttccctatgagaaggtggtgcagaggatcctctacctccaagtcctggactatgaccgcttcagccgcaacgaccccattggggaggtgtccatcccccttaacaaggtggacctgacccagatgcagaccttctggaaggatctgaagccatgcagcgatgggagtgggagccgaggggagctgctcttgtctctctgctacaacccctctgccaactccatcatcgtgaacatcatcaaagcccggaacctcaaagccatggacatcgggggcacatcagacccctacgtgaaggtatggctgatgtacaaggacaagcgggtggagaagaagaagacggtgacgatgaagaggaacctgaaccccatcttcaatgagtccttcgccttcgatatccccacggagaagctgagggagacgaccatcatcatcactgtcatggacaaggacaagctcagccgcaatgacgtcatcggcaagatctacctgtcctggaagagcgggccaggggaggtgaagcactggaaggacatgattgcccgtccccggcagcccgtggcccagtggcaccagctgaaggcctgagtggggccaagggaggcccagggggccgagggcccaggtccccatcatgccctcaccactttatgcacaacgcccggcctgagccccctgccatagggaggggaggaccctgagggctcagccagggaggggtcccaggactcaactgggccccgtttctaggaagtaccagccccatcccccacagtccagctccggggaaggggctctgggaggcattttcctgctttgccccttttcttcctgacttactaatactaaagaagttgggggagctcgagagccagacggccagacaggcagacccctccagaggcccgccaggtgggcatggtcccccattttctttaaggcagcacctggagtggagagaggccactccctctccagcccccgatgtggacccggggaggggaggctgaggcgtttggccccggcctggccaggagaggcccatccccagggcagtttcaggtgccggctgggccctgaatgtcgaggatagtatatagcccgctcctgggtcctggagctgtggccctttgtactcgtgttgtgtccattgtgtgtgtgcgtggggacagaggcctggaaatgcggaggactatacagagaaggcaggttttgtgaaggccaggcagggttggaggccgggggtgtgagaggagaggcccatagggctgagtggggtcgggtgaggcagaggtcagaaacagaagagctgcagttgctggagctgggctgagaactgggctgcctcctgccatccccccgtctcctccccttctccccttggtgcccccctctgctcagaatctgaagtagttccctcctcagcaatttcatctcttgaacactgactcacaccttttaggcacctactgtgtgcatagcattccaccaggactcatctcccttccttctcagggggtcccgagccccgactagctttgccctaactccttcatcaaaagaccccccgccagcttcccacacctcatacgcagccacatctgccctattctccatgctttccagcttgcctgcccttcctcatctctccctgcctgtgcagacctccacccttctttcctccacccctccatcccccaatgcttgtagaccttccattcattccgtctcatcgtgcgtggtctctgatcgtccatcacctgaccttctccaggactgtcttctcacccttccccactccctggtccccgggagcagctccttctgcccgactcactcacagtgcagggaaaggaggcagggaaaagaccaggattctgtgagttctgaggttgccacacacaaagaagctgtggtttctctgcctcggccactgatgagactaaaactggcttccccttggagacggcagatttcaggctgatccctgcttaagccctctcatccccacgctggtcctggtattgatacaagacccagctggtgacaaagcctccaatcctgggggtccacgagcctgggcctgacattcccagaactaccgccaggtggcgccaggcccccacagtctgtggccgtggtcttagcccccagttccactctggatgggcctgtgacaccccaaagagaagaaggggactctggatagggtccccacatccagggcgtggggagaccattggcatttgggaaccattttccttcgaacggcttccccttgagctgagcattctgcttgctgcagtagacgggtcgccttttgcccataccgaaattttctgaaattaaatcgcacacccccaccatttcctctccctgggatctggaggaacatcatacatagtaggtgaatcgttttgtagagtgaagaatgctaatgtaaagcaaatagtcacccacgttccttgtaaatccaaatgtttctatattgtagctttgcttaaaatggggtcggccccaactgcatcctcctctttggcgggctggggagcggcccccagccgggacgggagggcagcgaccccgaggcctcgtggacgtgggagagagtgtggtgggaagtcttgagcggaggaggggatctgcccttctccactcctctcttggatccgcctcggtttcctgtccccccaccacccgcctgccccgcggaagaccgcccagtgagccagcccccaccttccaggcgccttcgccctggggatccaaccaacttgtatcgagtgggcggggcaacggctccccatttttcccgagccccgcccacagagctcttagccaatcctatgcagagagcatctcctggcaggggtctcttcccaaccagaccccacccaggcacattagcgaccaggcttgggcttccccagcgccccaccaccaccacgtgcaggtggagctctgggatgctatgttggggcggcaagcggtgggccgagggccgggtaggctagcacgggaggtaagggtggtatgggatggggcgggggcggtctagggcaataggagagcagagaatgggggaacttgagggtggggggagggcaccggagccttgccaccatcccaggactttgggcaagtcacccgcactccctgggcctcggtttccccatctgtaaaatgatggtaataatacttcacctacctcataggggaggttgtgaggccaccatcacctgacctgggggtcaaggcaggaggactccgaaggtgctacccgtgagcaaagtgtaattaccgaatcctgactgcaaggcccacctgcccctcccccacagagcctccagagctagctgaggccaacgcaggcccatccgtctcttcactctgtcgcaggccctttcatgggcttcgtctgccatctttgtgggtgccctagacttagtccttatcttgtcctggtttcctttcttgtgaccatctccccatgaaagtgctgtacaaattccacccgccccaggacccccgcacctgccctctggcaccagatgccagggaagggacagaggaaaacagccacaaacaagccaggggggctccccggagccccaggggtggggattggtggccactgtttgtatgttcttgagtgcaagtgttttataaaaaataaaacaaaaacccaccatcacaaaaaaaaaaattttgcagcgaagagaaatgaagaaaaactgaagaaaaaaaaaaaacaggaaaaaaagaaccatacaaaatttttccaccacacataccctctaagccagcaagatttcctctttgcaaaatcatatttttgtgggaatgggccctgctttttgtggcaaggcctgttctgattaataaaggatcgtgaaaaagta

SEQ ID NO: 188177 - DNA, 1621 bp, Homo sapiens
  Payload ID: 17030
  Gene Symbol: SYT7
  Gene Name: synaptotagmin VII
  ENST ID: ENST00000535826
  CDS Start-End: 53-1621
gcggccgcgggcggctctgaggagcccggagggaaccggcgacgaggggaccatgtaccgggacccggaggcggccagcccaggggcgccctcgcgcgacgtcctgctggtctctgccatcatcaccgtcagccttagcgtcactgtcgtcctctgcggcctctgccactggtgtcagcgcaaactgggcaaacgctacaagaattccttggagacggtgggcacgccagactcagggcgtgggcgcagtgagaagaaggctatcaatgatctagacagagacttttggaataacaatgagagcacagtgcagcagaaatggagctcctaccctcccaaggagtttattctaaacatttcaccctacgccccttatggcgacccacgactgtccctcaatggcaccctcctgtcgggcgccaaagtggccgccgcggcggggctggcggtggagcgggaaggccggctgggggagaagccggcaccggtgccgccacccggagaggacgccttgagaagcggcggggctgcccccagcgagccgggcagcggtggcaaggcggggagaggccgctggcggacggtgcagagccacctggccgcagggaagctcaacttgtccaagttgcctgcaggagggaaggcggtgaacacagcccccgtgccaggccagacaccccacgatgagtccgaccgccggaccgagccacgttcctccgtctcagacctcgtcaactccctcaccagcgagatgctcatgctctccccaggctccgaggaggatgaggcccacgagggttgcagccgagagaacctgggccggatccagttcagtgtcggctacaacttccaggagtccacgctcaccgtgaagatcatgaaggcccaggagctgccggccaaggacttcagcggcaccagcgaccccttcgtcaagatctacctgctgcccgacaagaagcacaagctggagaccaaggtgaagcggaagaacctgaacccccactggaacgagaccttcctctttgaaggttttccctatgagaaggtggtgcagaggatcctctacctccaagtcctggactatgaccgcttcagccgcaacgaccccattggggaggtgtccatcccccttaacaaggtggacctgacccagatgcagaccttctggaaggatctgaagccatgcagcgatgggagtgggagccgaggggagctgctcttgtctctctgctacaacccctctgccaactccatcatcgtgaacatcatcaaagcccggaacctcaaagccatggacatcgggggcacatcagacccctacgtgaaggtatggctgatgtacaaggacaagcgggtggagaagaagaagacggtgacgatgaagaggaacctgaaccccatcttcaatgagtccttcgccttcgatatccccacggagaagctgagggagacgaccatcatcatcactgtcatggacaaggacaagctcagccgcaatgacgtcatcggcaagatctacctgtcctggaagagcgggccaggggaggtgaagcactggaaggacatgattgcccgtccccggcagcccgtggcccagtggcaccagctgaaggcctga

SEQ ID NO: 188178 - DNA, 1961 bp, Homo sapiens
  Payload ID: 17030
  Gene Symbol: SYT7
  Gene Name: synaptotagmin VII
  ENST ID: ENST00000539246
  CDS Start-End: 1-369
atgtaccgggacccggaggcggccagcccaggggcgccctcgcgcgacgtcctgctggtctctgccatcatcaccgtcagccttagcgtcactgtcgtcctctgcggcctctgccactggtgtcagcgcaaactgggcaaacgctacaagaattccttggagacggtgggcacgccagactcagggcgtgggcgcagtgagaagaaggctatcaatgatctagacagagacttttggaataacaatgagagcacagtgcagcagaaatggagctcctaccctcccaaggagtttattctaaacatttcaccctacgccccttatggcgacccacgactgtccctcaacccgctcttcctccgtcgttaacccttcgttgtcctgtgggatagagttggaggtggctgccctcccccaacccccgccgcccctgccccaggcggtggggaggggccccccctccgttgtcgtgtttcgaggactccaccctgtccacggccactacccttgagtctatccccagctccacgggagagccgaaatgccagcgaccccgcaccctgatgcggcagcagagcctgcaacagccgctgagccagcaccagcggggccggcagcccagccagcccaccaccagccagagcctgggccagctgcaggcccacatggcctcggcaccaggccccaacccccgggcctatggccggggccaggctcggcagggcacctcggccggctccaagtaccgggcggcagggggccgcagccgctccaacccaggcagctgggaccacgtggtggggcagattcgaaaccgaggcttggacatgaaatccttcctggaaggccggatggtggtgctatccttggtcttagggctttcggaacaggatgactttgccaatatccctgacctgcaaaacccaggaacccagcagaaccagaacgctcagggggacaagaggttgcctgcaggagggaaggcggtgaacacagcccccgtgccaggccagacaccccacgatgagtccgaccgccggaccgagccacgttcctccgtctcagacctcgtcaactccctcaccagcgagatgctcatgctctccccaggctccgaggaggatgaggcccacgagggttgcagccgagagaacctgggccggatccagttcagtgtcggctacaacttccaggagtccacgctcaccgtgaagatcatgaaggcccaggagctgccggccaaggacttcagcggcaccagcgaccccttcgtcaagatctacctgctgcccgacaagaagcacaagctggagaccaaggtgaagcggaagaacctgaacccccactggaacgagaccttcctctttgaaggttttccctatgagaaggtggtgcagaggatcctctacctccaagtcctggactatgaccgcttcagccgcaacgaccccattggggaggtgtccatcccccttaacaaggtggacctgacccagatgcagaccttctggaaggatctgaagccatgcagcgatgggagtgggagccgaggggagctgctcttgtctctctgctacaacccctctgccaactccatcatcgtgaacatcatcaaagcccggaacctcaaagccatggacatcgggggcacatcagacccctacgtgaaggtatggctgatgtacaaggacaagcgggtggagaagaagaagacggtgacgatgaagaggaacctgaaccccatcttcaatgagtccttcgccttcgatatccccacggagaagctgagggagacgaccatcatcatcactgtcatggacaaggacaagctcagccgcaatgacgtcatcggcaagatctacctgtcctggaagagcgggccaggggaggtgaagcactggaaggacatgattgcccgtccccggcagcccgtggcccagtggcaccagctgaaggcctga

SEQ ID NO: 188179 - DNA, 2061 bp, Homo sapiens
  Payload ID: 17030
  Gene Symbol: SYT7
  Gene Name: synaptotagmin VII
  ENST ID: ENST00000539008
  CDS Start-End: 1-2061
atgtaccgggacccggaggcggccagcccaggggcgccctcgcgcgacgtcctgctggtctctgccatcatcaccgtcagccttagcgtcactgtcgtcctctgcggcctctgccactggtgtcagcgcaaactgggcaaacgctacaagaattccttggagacggtgggcacgccagactcagggcgtgggcgcagtgagaagaaggctatcaatgatctagacagagacttttggaataacaatgagagcacagtgcagcagaaatggagctcctaccctcccaaggagtttattctaaacatttcaccctacgccccttatggcgacccacgactgtccctcaatggcaccctcctgtcgggcgccaaagtggccgccgcggcggggctggcggtggagcgggaaggccggctgggggagaagccggcaccggtgccgccacccggagaggacgccttgagaagcggcggggctgcccccagcgagccgggcagcggtggcaaggcggggagaggccgctggcggacggtgcagagccacctggccgcagggaagctcaacttgtccaatttcgaggactccaccctgtccacggccactacccttgagtctatccccagctccacgggagagccgaaatgccagcgaccccgcaccctgatgcggcagcagagcctgcaacagccgctgagccagcaccagcggggccggcagcccagccagcccaccaccagccagagcctgggccagctgcaggcccacatggcctcggcaccaggccccaacccccgggcctatggccggggccaggctcggcagggcacctcggccggctccaagtaccgggcggcagggggccgcagccgctccaacccaggcagctgggaccacgtggtggggcagattcgaaaccgaggcttggacatgaaatccttcctggaaggccggatggtggtgctatccttggtcttagggctttcggaacaggatgactttgccaatatccctgacctgcaaaacccaggaacccagcagaaccagaacgctcagggggacaagaggttgcctgcaggagggaaggcggtgaacacagcccccgtgccaggccagacaccccacgatgagtccgaccgccggaccgagccacgttcctccgtctcagacctcgtcaactccctcaccagcgagatgctcatgctctccccaggctccgaggaggatgaggcccacgagggttgcagccgagagaacctgggccggatccagttcagtgtcggctacaacttccaggagtccacgctcaccgtgaagatcatgaaggcccaggagctgccggccaaggacttcagcggcaccagcgaccccttcgtcaagatctacctgctgcccgacaagaagcacaagctggagaccaaggtgaagcggaagaacctgaacccccactggaacgagaccttcctctttgaaggttttccctatgagaaggtggtgcagaggatcctctacctccaagtcctggactatgaccgcttcagccgcaacgaccccattggggaggtgtccatcccccttaacaaggtggacctgacccagatgcagaccttctggaaggatctgaagccatgcagcgatgggagtgggagccgaggggagctgctcttgtctctctgctacaacccctctgccaactccatcatcgtgaacatcatcaaagcccggaacctcaaagccatggacatcgggggcacatcagacccctacgtgaaggtatggctgatgtacaaggacaagcgggtggagaagaagaagacggtgacgatgaagaggaacctgaaccccatcttcaatgagtccttcgccttcgatatccccacggagaagctgagggagacgaccatcatcatcactgtcatggacaaggacaagctcagccgcaatgacgtcatcggcaagatctacctgtcctggaagagcgggccaggggaggtgaagcactggaaggacatgattgcccgtccccggcagcccgtggcccagtggcaccagctgaaggcctga

SEQ ID NO: 188180 - DNA, 2186 bp, Homo sapiens
  Payload ID: 17030
  Gene Symbol: SYT7
  Gene Name: synaptotagmin VII
  ENST ID: ENST00000539468
  CDS Start-End: 1-369
atgtaccgggacccggaggcggccagcccaggggcgccctcgcgcgacgtcctgctggtctctgccatcatcaccgtcagccttagcgtcactgtcgtcctctgcggcctctgccactggtgtcagcgcaaactgggcaaacgctacaagaattccttggagacggtgggcacgccagactcagggcgtgggcgcagtgagaagaaggctatcaatgatctagacagagacttttggaataacaatgagagcacagtgcagcagaaatggagctcctaccctcccaaggagtttattctaaacatttcaccctacgccccttatggcgacccacgactgtccctcaacccgctcttcctccgtcgttaacccttcgttgtcctgtgggatagagttggaggtggctgccctcccccaacccccgccgcccctgccccaggcggtggggaggggccccccctccgttgtcgtgtggcaccctcctgtcgggcgccaaagtggccgccgcggcggggctggcggtggagcgggaaggccggctgggggagaagccggcaccggtgccgccacccggagaggacgccttgagaagcggcggggctgcccccagcgagccgggcagcggtggcaaggcggggagaggccgctggcggacggtgcagagccacctggccgcagggaagctcaacttgtccaatttcgaggactccaccctgtccacggccactacccttgagtctatccccagctccacgggagagccgaaatgccagcgaccccgcaccctgatgcggcagcagagcctgcaacagccgctgagccagcaccagcggggccggcagcccagccagcccaccaccagccagagcctgggccagctgcaggcccacatggcctcggcaccaggccccaacccccgggcctatggccggggccaggctcggcagggcacctcggccggctccaagtaccgggcggcagggggccgcagccgctccaacccaggcagctgggaccacgtggtggggcagattcgaaaccgaggcttggacatgaaatccttcctggaaggccggatggtggtgctatccttggtcttagggctttcggaacaggatgactttgccaatatccctgacctgcaaaacccaggaacccagcagaaccagaacgctcagggggacaagaggttgcctgcaggagggaaggcggtgaacacagcccccgtgccaggccagacaccccacgatgagtccgaccgccggaccgagccacgttcctccgtctcagacctcgtcaactccctcaccagcgagatgctcatgctctccccaggctccgaggaggatgaggcccacgagggttgcagccgagagaacctgggccggatccagttcagtgtcggctacaacttccaggagtccacgctcaccgtgaagatcatgaaggcccaggagctgccggccaaggacttcagcggcaccagcgaccccttcgtcaagatctacctgctgcccgacaagaagcacaagctggagaccaaggtgaagcggaagaacctgaacccccactggaacgagaccttcctctttgaaggttttccctatgagaaggtggtgcagaggatcctctacctccaagtcctggactatgaccgcttcagccgcaacgaccccattggggaggtgtccatcccccttaacaaggtggacctgacccagatgcagaccttctggaaggatctgaagccatgcagcgatgggagtgggagccgaggggagctgctcttgtctctctgctacaacccctctgccaactccatcatcgtgaacatcatcaaagcccggaacctcaaagccatggacatcgggggcacatcagacccctacgtgaaggtatggctgatgtacaaggacaagcgggtggagaagaagaagacggtgacgatgaagaggaacctgaaccccatcttcaatgagtccttcgccttcgatatccccacggagaagctgagggagacgaccatcatcatcactgtcatggacaaggacaagctcagccgcaatgacgtcatcggcaagatctacctgtcctggaagagcgggccaggggaggtgaagcactggaaggacatgattgcccgtccccggcagcccgtggcccagtggcaccagctgaaggcctga

SEQ ID NO: 188181 - DNA, 578 bp, Homo sapiens
  Payload ID: 17030
  Gene Symbol: SYT7
  Gene Name: synaptotagmin VII
  ENST ID: ENST00000545053
  CDS Start-End: 53-578
gcggccgcgggcggctctgaggagcccggagggaaccggcgacgaggggaccatgtaccgggacccggaggcggccagcccaggggcgccctcgcgcgacgtcctgctggtctctgccatcatcaccgtcagccttagcgtcactgtcgtcctctgcggcctctgccactggtgtcagcgcaaactgggcaaacgctacaagaattccttggagacggtgggcacgccagactcagggcgtgggcgcagtgagaagaaggctatcaagttgcctgcaggagggaaggcggtgaacacagcccccgtgccaggccagacaccccacgatgagtccgaccgccggaccgagccacgttcctccgtctcagacctcgtcaactccctcaccagcgagatgctcatgctctccccaggctccgaggaggatgaggcccacgagggttgcagccgagagaacctgggccggatccagttcagtgtcggctacaacttccaggagtccacgctcaccgtgaagatcatgaaggcccaggagctgccggccaaggacttcagcggcaccagcgaccccttcgtca

SEQ ID NO: 188182 - DNA, 1887 bp, Homo sapiens
  Payload ID: 17030
  Gene Symbol: SYT7
  Gene Name: synaptotagmin VII
  ENST ID: ENST00000542670
  CDS Start-End: 52-1887
cggccgcgggcggctctgaggagcccggagggaaccggcgacgaggggaccatgtaccgggacccggaggcggccagcccaggggcgccctcgcgcgacgtcctgctggtctctgccatcatcaccgtcagccttagcgtcactgtcgtcctctgcggcctctgccactggtgtcagcgcaaactgggcaaacgctacaagaattccttggagacggtgggcacgccagactcagggcgtgggcgcagtgagaagaaggctatcaatgatctagacagagacttttggaataacaatgagagcacagtgcagcagaaatggagctcctaccctcccaaggagtttattctaaacatttcaccctacgccccttatggcgacccacgactgtccctcaatttcgaggactccaccctgtccacggccactacccttgagtctatccccagctccacgggagagccgaaatgccagcgaccccgcaccctgatgcggcagcagagcctgcaacagccgctgagccagcaccagcggggccggcagcccagccagcccaccaccagccagagcctgggccagctgcaggcccacatggcctcggcaccaggccccaacccccgggcctatggccggggccaggctcggcagggcacctcggccggctccaagtaccgggcggcagggggccgcagccgctccaacccaggcagctgggaccacgtggtggggcagattcgaaaccgaggcttggacatgaaatccttcctggaaggccggatggtggtgctatccttggtcttagggctttcggaacaggatgactttgccaatatccctgacctgcaaaacccaggaacccagcagaaccagaacgctcagggggacaagaggttgcctgcaggagggaaggcggtgaacacagcccccgtgccaggccagacaccccacgatgagtccgaccgccggaccgagccacgttcctccgtctcagacctcgtcaactccctcaccagcgagatgctcatgctctccccaggctccgaggaggatgaggcccacgagggttgcagccgagagaacctgggccggatccagttcagtgtcggctacaacttccaggagtccacgctcaccgtgaagatcatgaaggcccaggagctgccggccaaggacttcagcggcaccagcgaccccttcgtcaagatctacctgctgcccgacaagaagcacaagctggagaccaaggtgaagcggaagaacctgaacccccactggaacgagaccttcctctttgaaggttttccctatgagaaggtggtgcagaggatcctctacctccaagtcctggactatgaccgcttcagccgcaacgaccccattggggaggtgtccatcccccttaacaaggtggacctgacccagatgcagaccttctggaaggatctgaagccatgcagcgatgggagtgggagccgaggggagctgctcttgtctctctgctacaacccctctgccaactccatcatcgtgaacatcatcaaagcccggaacctcaaagccatggacatcgggggcacatcagacccctacgtgaaggtatggctgatgtacaaggacaagcgggtggagaagaagaagacggtgacgatgaagaggaacctgaaccccatcttcaatgagtccttcgccttcgatatccccacggagaagctgagggagacgaccatcatcatcactgtcatggacaaggacaagctcagccgcaatgacgtcatcggcaagatctacctgtcctggaagagcgggccaggggaggtgaagcactggaaggacatgattgcccgtccccggcagcccgtggcccagtggcaccagctgaaggcctga

SEQ ID NO: 188183 - DNA, 2013 bp, Homo sapiens
  Payload ID: 17030
  Gene Symbol: SYT7
  Gene Name: synaptotagmin VII
  Uniprot ID: O43581
  ENST ID: ENST00000540677
  CDS Start-End: 7-1443
gggaccatgtaccgggacccggaggcggccagcccaggggcgccctcgcgcgacgtcctgctggtctctgccatcatcaccgtcagccttagcgtcactgtcgtcctctgcggcctctgccactggtgtcagcgcaaactgggcaaacgctacaagaattccttggagacggtgggcacgccagactcagggcgtgggcgcagtgagaagaaggctatcaatggcaccctcctgtcgggcgccaaagtggccgccgcggcggggctggcggtggagcgggaaggccggctgggggagaagccggcaccggtgccgccacccggagaggacgccttgagaagcggcggggctgcccccagcgagccgggcagcggtggcaaggcggggagaggccgctggcggacggtgcagagccacctggccgcagggaagctcaacttgtccaagttgcctgcaggagggaaggcggtgaacacagcccccgtgccaggccagacaccccacgatgagtccgaccgccggaccgagccacgttcctccgtctcagacctcgtcaactccctcaccagcgagatgctcatgctctccccaggctccgaggaggatgaggcccacgagggttgcagccgagagaacctgggccggatccagttcagtgtcggctacaacttccaggagtccacgctcaccgtgaagatcatgaaggcccaggagctgccggccaaggacttcagcggcaccagcgaccccttcgtcaagatctacctgctgcccgacaagaagcacaagctggagaccaaggtgaagcggaagaacctgaacccccactggaacgagaccttcctctttgaaggttttccctatgagaaggtggtgcagaggatcctctacctccaagtcctggactatgaccgcttcagccgcaacgaccccattggggaggtgtccatcccccttaacaaggtggacctgacccagatgcagaccttctggaaggatctgaagccatgcagcgatgggagtgggagccgaggggagctgctcttgtctctctgctacaacccctctgccaactccatcatcgtgaacatcatcaaagcccggaacctcaaagccatggacatcgggggcacatcagacccctacgtgaaggtatggctgatgtacaaggacaagcgggtggagaagaagaagacggtgacgatgaagaggaacctgaaccccatcttcaatgagtccttcgccttcgatatccccacggagaagctgagggagacgaccatcatcatcactgtcatggacaaggacaagctcagccgcaatgacgtcatcggcaagatctacctgtcctggaagagcgggccaggggaggtgaagcactggaaggacatgattgcccgtccccggcagcccgtggcccagtggcaccagctgaaggcctgagtggggccaagggaggcccagggggccgagggcccaggtccccatcatgccctcaccactttatgcacaacgcccggcctgagccccctgccatagggaggggaggaccctgagggctcagccagggaggggtcccaggactcaactgggccccgtttctaggaagtaccagccccatcccccacagtccagctccggggaaggggctctgggaggcattttcctgctttgccccttttcttcctgacttactaatactaaagaagttgggggagctcgagagccagacggccagacaggcagacccctccagaggcccgccaggtgggcatggtcccccattttctttaaggcagcacctggagtggagagaggccactccctctccagcccccgatgtggacccggggaggggaggctgaggcgtttggccccggcctggccaggagaggcccatccccagggcagtttcaggtgccggctgggccctgaatgtcgaggatagtatatagcccgctcctgggtcctggagctgtggccctttgtactcgtgttgtgtccattgtgtgt

SEQ ID NO: 188184 - DNA, 1362 bp, Homo sapiens
  Payload ID: 17030
  Gene Symbol: SYT7
  Gene Name: synaptotagmin VII
  ENST ID: ENST00000542836
  CDS Start-End: 19-1362
accggcgacgaggggaccatgtaccgggacccggaggcggccagcccaggggcgccctcgcgcgacgtcctgctggtctctgccatcatcaccgtcagccttagcgtcactgtcgtcctctgcggcctctgccactggtgtcagcgcaaactgggcaaacgctacaagaattccttggagacggtgggcacgccagactcagggcgtgggcgcagtgagaagaaggctatcaatgatctagacagagacttttggaataacaatgagagcacagtgcagcagaaatggagctcctaccctcccaaggagtttattctaaacatttcaccctacgccccttatggcgacccacgactgtccctcaagttgcctgcaggagggaaggcggtgaacacagcccccgtgccaggccagacaccccacgatgagtccgaccgccggaccgagccacgttcctccgtctcagacctcgtcaactccctcaccagcgagatgctcatgctctccccaggctccgaggaggatgaggcccacgagggttgcagccgagagaacctgggccggatccagttcagtgtcggctacaacttccaggagtccacgctcaccgtgaagatcatgaaggcccaggagctgccggccaaggacttcagcggcaccagcgaccccttcgtcaagatctacctgctgcccgacaagaagcacaagctggagaccaaggtgaagcggaagaacctgaacccccactggaacgagaccttcctctttgaaggttttccctatgagaaggtggtgcagaggatcctctacctccaagtcctggactatgaccgcttcagccgcaacgaccccattggggaggtgtccatcccccttaacaaggtggacctgacccagatgcagaccttctggaaggatctgaagccatgcagcgatgggagtgggagccgaggggagctgctcttgtctctctgctacaacccctctgccaactccatcatcgtgaacatcatcaaagcccggaacctcaaagccatggacatcgggggcacatcagacccctacgtgaaggtatggctgatgtacaaggacaagcgggtggagaagaagaagacggtgacgatgaagaggaacctgaaccccatcttcaatgagtccttcgccttcgatatccccacggagaagctgagggagacgaccatcatcatcactgtcatggacaaggacaagctcagccgcaatgacgtcatcggcaagatctacctgtcctggaagagcgggccaggggaggtgaagcactggaaggacatgattgcccgtccccggcagcccgtggcccagtggcaccagctgaaggcctga

SEQ ID NO: 188185 - DNA, 1556 bp, Homo sapiens
  Payload ID: 17031
  Gene Symbol: SYT8
  Gene Name: synaptotagmin VIII
  ENST ID: ENST00000341958
  CDS Start-End: 303-1466
cagggactaggctgcccaggccctgcctgcttggctggggctgggggctgctgggaggtggctgggaggctgggcctgggcagctaagctggagctttggccagggtccagagcctccctcccttcagcttcctgctgcacagaaccctcgcccctggccaccccgtgctgcctccttgccctggcagacccagcactggctgctgctagtcagatggggtagcgggcaggggccggaggggccaccctcccagctgacccagcctcctgggccgcttcttccaaaccagcagggtagaaagatggggcacccaccagtctctcccagtgccccggccccagctggcaccacagctatacctgggcttattccagaccttgtcgccgggaccccctggccccgctgggctctcattgccggcgcccttgccgcgggcgtcctcctcgtctcctgcctcctctgtgctgcctgctgctgctgccgccgccacaggaagaagcccagggacaaggagtccgtgggtctgggcagtgcccgcggcaccaccaccacccacctggtgcaacctgatgtggatggcctggagtccagcccgggggatgctcagcaatgggggtgcctgcagctctccctggagttcgactttggaagccaggagatcagggtgggcctgaggcaggcagccgacctgaggcctgggggcaccgtggacccctatgcccgggtcagcgtctccacccaggccggacacagacatgagacaaaagtgcaccgaggcacgctctgccccgtgtttgacgagacctgctgcttccacatcccgcaggcggagctgccaggggccaccctgcaggtgcagcttttcaacttcaagcgcttctcggggcatgagcccctgggtgagctccgtctgccactgggcaccgtggatctgcagcatgttctggagcactggtacctgctgggcccgccggctgccactcagcccgagcaggtcggggagctgtgcttctctctccggtacgtgcccagctcaggccggctgaccgtggtggtgctggaggctcgaggcctgcgtccaggacttgcagagccctacgtgaaggtccagctcatgctgaaccagaggaagtggaagaagagaaagacagccaccaaaaagggcacggcggccccctacttcaatgaggccttcaccttcctggtgcccttcagccaggtccagaatgtggacctggtgctggctgtctgggaccgcagcctgccgctccgaactgagcccgtaggcaaggtgcacctgggtgcccgggcctcggggcagcccctgcagcactgggcagacatgctggcccacgcccggcggcccattgcccagcggcaccccctgcggccagccagggaggtggaccgcatgctggccctgcagccccgccttcgcctgcgcctgcccttgccccactcctgaatgcaccacatgcctctgtctccccgctgagcccaggcacttgcccaggccgccctgcaggaccactgcaataaacgccttctcctgcca

SEQ ID NO: 188186 - DNA, 1424 bp, Homo sapiens
  Payload ID: 17031
  Gene Symbol: SYT8
  Gene Name: synaptotagmin VIII
  Uniprot ID: Q8NBV8
  ENST ID: ENST00000381968
  CDS Start-End: 129-1334
gcccctgccaggaatgcacctttagcccaggcctgctcagtgagctccgccgacagccagccctgctcctcccgccatgaccctgcagacccctctgggcttccaagttcctgggggctgcagtgaacatgctccacctgcatggctggcaaaccatgcagggtagaaagatggggcacccaccagtctctcccagtgccccggccccagctggcaccacagctatacctgggcttattccagaccttgtcgccgggaccccctggccccgctgggctctcattgccggcgcccttgccgcgggcgtcctcctcgtctcctgcctcctctgtgctgcctgctgctgctgccgccgccacaggaagaagcccagggacaaggagtccgtgggtctgggcagtgcccgcggcaccaccaccacccacctggtgcaacctgatgtggatggcctggagtccagcccgggggatgctcagcaatgggggtgcctgcagctctccctggagttcgactttggaagccaggagatcagggtgggcctgaggcaggcagccgacctgaggcctgggggcaccgtggacccctatgcccgggtcagcgtctccacccaggccggacacagacatgagacaaaagtgcaccgaggcacgctctgccccgtgtttgacgagacctgctgcttccacatcccgcaggcggagctgccaggggccaccctgcaggtgcagcttttcaacttcaagcgcttctcggggcatgagcccctgggtgagctccgtctgccactgggcaccgtggatctgcagcatgttctggagcactggtacctgctgggcccgccggctgccactcagcccgagcaggtcggggagctgtgcttctctctccggtacgtgcccagctcaggccggctgaccgtggtggtgctggaggctcgaggcctgcgtccaggacttgcagagccctacgtgaaggtccagctcatgctgaaccagaggaagtggaagaagagaaagacagccaccaaaaagggcacggcggccccctacttcaatgaggccttcaccttcctggtgcccttcagccaggtccagaatgtggacctggtgctggctgtctgggaccgcagcctgccgctccgaactgagcccgtaggcaaggtgcacctgggtgcccgggcctcggggcagcccctgcagcactgggcagacatgctggcccacgcccggcggcccattgcccagcggcaccccctgcggccagccagggaggtggaccgcatgctggccctgcagccccgccttcgcctgcgcctgcccttgccccactcctgaatgcaccacatgcctctgtctccccgctgagcccaggcacttgcccaggccgccctgcaggaccactgcaataaacgccttctcctgcca

SEQ ID NO: 188187 - DNA, 1291 bp, Homo sapiens
  Payload ID: 17031
  Gene Symbol: SYT8
  Gene Name: synaptotagmin VIII
  ENST ID: ENST00000381978
  CDS Start-End: 1-1201
tggcaaaccatggtgggccccagctgtgggtagaaagatggggcacccaccagtctctcccagtgccccggccccagctggcaccacagctatacctgggcttattccagaccttgtcgccgggaccccctggccccgctgggctctcattgccggcgcccttgccgcgggcgtcctcctcgtctcctgcctcctctgtgctgcctgctgctgctgccgccgccacaggaagaagcccagggacaaggagtccgtgggtctgggcagtgcccgcggcaccaccaccacccacctggtgcaacctgatgtggatggcctggagtccagcccgggggatgctcagcaatgggggtgcctgcagctctccctggagttcgactttggaagccaggagatcagggtgggcctgaggcaggcagccgacctgaggcctgggggcaccgtggacccctatgcccgggtcagcgtctccacccaggccggacacagacatgagacaaaagtgcaccgaggcacgctctgccccgtgtttgacgagacctgctgcttccacatcccgcaggcggagctgccaggggccaccctgcaggtgcagcttttcaacttcaagcgcttctcggggcatgagcccctgggtgagctccgtctgccactgggcaccgtggatctgcagcatgttctggagcactggtacctgctgggcccgccggctgccactcagcccgagcaggtcggggagctgtgcttctctctccggtacgtgcccagctcaggccggctgaccgtggtggtgctggaggctcgaggcctgcgtccaggacttgcagagccctacgtgaaggtccagctcatgctgaaccagaggaagtggaagaagagaaagacagccaccaaaaagggcacggcggccccctacttcaatgaggccttcaccttcctggtgcccttcagccaggtccagaatgtggacctggtgctggctgtctgggaccgcagcctgccgctccgaactgagcccgtaggcaaggtgcacctgggtgcccgggcctcggggcagcccctgcagcactgggcagacatgctggcccacgcccggcggcccattgcccagcggcaccccctgcggccagccagggaggtggaccgcatgctggccctgcagccccgccttcgcctgcgcctgcccttgccccactcctgaatgcaccacatgcctctgtctccccgctgagcccaggcacttgcccaggccgccctgcaggaccactgcaataaacgccttctcctgcca

SEQ ID NO: 188188 - DNA, 482 bp, Homo sapiens
  Payload ID: 17031
  Gene Symbol: SYT8
  Gene Name: synaptotagmin VIII
  ENST ID: ENST00000417052
  CDS Start-End: 184-482
ggactgggggcacctttgcagatgtgtgcaatatcacccacactctcagaggattccagacacacaccactcagaaatgtgggctaggagcacccgctgcacctgcgctgagagagctgcagaaagggttaccagcccctcgggtggaaggagacagccggagctctcaggcagggtagaaagatggggcacccaccagtctctcccagtgccccggccccagctggcaccacagctatacctgggcttattccagaccttgtcgccgggaccccctggccccgctgggctctcattgccggcgcccttgccgcgggcgtcctcctcgtctcctgcctcctctgtgctgcctgctgctgctgccgccgccacaggaagaagcccagggacaaggagtccgtgggtctgggcagtgcccgcggcaccaccaccacccacctggtgcaacctgatgtggatggcctggagtccagcccggggga

SEQ ID NO: 188189 - DNA, 575 bp, Homo sapiens
  Payload ID: 17031
  Gene Symbol: SYT8
  Gene Name: synaptotagmin VIII
  ENST ID: ENST00000430303
  CDS Start-End: 269-575
gtgcccgtcagggtgatggttgaagtcctcactactcagatggtcggaggagggggtaggacacccagtcagctgccggacactcaggggactgggggcacctttgcagatgtgtgcaatatcacccacactctcagaggattccagacacacaccactcagaaatgtgggctaggagcacccgctgcacctgcgctgagagagctgcagaaagggttaccagcccctcgggtggaaggagacagccggagctctcaggggtagaaagatggggcacccaccagtctctcccagtgccccggccccagctggcaccacagctatacctgggcttattccagaccttgtcgccgggaccccctggccccgctgggctctcattgccggcgcccttgccgcgggcgtcctcctcgtctcctgcctcctctgtgctgcctgctgctgctgccgccgccacaggaagaagcccagggacaaggagtccgtgggtctgggcagtgcccgcggcaccaccaccacccacctggtgcaacctgatgtggatggcctggagtccagcccgggggatgctcagc

SEQ ID NO: 188190 - DNA, 1506 bp, Homo sapiens
  Payload ID: 17031
  Gene Symbol: SYT8
  Gene Name: synaptotagmin VIII
  ENST ID: ENST00000424556
  CDS Start-End: 236-625
ggctgggcctgggcagctaagctggagctttggccagggtccagagcctccctcccttcagcttcctgctgcacagaaccctcgcccctggccaccccgtgctgcctccttgccctggcagacccagcactggctgctgctagtcagatggggtagcgggcaggggccggaggggccaccctcccagctgacccagcctcctgggccgcttcttccaaaccagcagggtagaaagatggggcacccaccagtctctcccagtgccccggccccagctggcaccacagctatacctgggcttattccagaccttgtcgccgggaccccctcctggcctctaccccagggccccgctgggctctcattgccggcgcccttgccgcgggcgtcctcctcgtctcctgcctcctctgtgctgcctgctgctgctgccgccgccacaggaagaagcccagggacaaggagtccgtgggtctgggcagtgcccgcggcaccaccaccacccacctggtgcaacctgatgtggatggcctggagtccagcccgggggatgctcagcaatgggggtgcctgcagctctccctggagttcgactttggaagccaggagatcagggtgggcctgaggcaggcagccgacctgaggcctgggggcaccgtggacccctatgcccgggtcagcgtctccacccaggccggacacagacatgagacaaaagtgcaccgaggcacgctctgccccgtgtttgacgagacctgctgcttccacatcccgcaggcggagctgccaggggccaccctgcaggtgcagcttttcaacttcaagcgcttctcggggcatgagcccctgggtgagctccgtctgccactgggcaccgtggatctgcagcatgttctggagcactggtacctgctgggcccgccggctgccactcagcccgagcaggtcggggagctgtgcttctctctccggtacgtgcccagctcaggccggctgaccgtggtggtgctggaggctcgaggcctgcgtccaggacttgcagagccctacgtgaaggtccagctcatgctgaaccagaggaagtggaagaagagaaagacagccaccaaaaagggcacggcggccccctacttcaatgaggccttcaccttcctggtgcccttcagccaggtccagaatgtggacctggtgctggctgtctgggaccgcagcctgccgctccgaactgagcccgtaggcaaggtgcacctgggtgcccgggcctcggggcagcccctgcagcactgggcagacatgctggcccacgcccggcggcccattgcccagcggcaccccctgcggccagccagggaggtggaccgcatgctggccctgcagccccgccttcgcctgcgcctgcccttgccccactcctgaatgcaccacatgcctctgtctccccgctgagcccaggcacttgcccaggccgccctgcaggaccactgcaataaacgccttctcctgcca

SEQ ID NO: 188191 - DNA, 4461 bp, Homo sapiens
  Payload ID: 17032
  Gene Symbol: SYT10
  Gene Name: synaptotagmin X
  Uniprot ID: Q6XYQ8
  ENST ID: ENST00000228567
  CDS Start-End: 298-1869
actccatgccgggtctctagttccagcgcgcctcggctcgctcgcgcggcgggagagttggcgcaaacctcgcggcagccgcagcctcctcgcgcgcctctccttcccctacgccctccgctcccgccatggggccaacgtggggctcctaagagttgccggctctcagcggcgcaatctccagccaaagtcaccgcgggcggactatggcttagggcgccagaggggttagaggtacgggaagaggaaaagacggctaactgggaaaaaaagagaaaacgaaagaaaagccaaacgatgagtttccacaaggaggacggagtgaacagtctgtgccagaaggctctgcacatcgtcaccgagctgtgcttcgccggccaggtggagtgggagaagtgctcgggcatcttccctcgggacaggggcagccagggcggaagcagcacagatatttcagtcagcctgttagctgtcgttgtcagcttttgtggactggccttgttggttgtctcactttttgtcttctggaagctgtgttggccatgctggaaaagcaaacctgtgacttccaacatcactacgcttccacagagcatttcaagtgctcctactgaagtttttgagactgaagagaaaaaagaaattaaggaaaatgaaaagccagccgtaaaagctattgagcctgcaataaaaatcagccacacttcccctgacatcccagcagaagtccaaactgctttaaaagaacatttaattaaacatgcacgtgtgcaaagacaaattactgagcctacgtcatcaacccgccacagttccttccgaagacacctgccgaggcaaatgcaggtttccagtgttgattttagcatgggcacagaacctgttttacaacgaggagaaacaacaaccagcattgggaggataaagccagaactctacaaacagaaatcagttgactctgagggcaaccaaaacgaagatgtcaaaatctgtgggaaacttaactttaccctccagtatgattatgaaaatgaacttctagttgttaaaattatcaaagctttagatctccctgctaaagacttcacaggaacttctgacccttatgtgaagatgtatcttcttccagataggaaaaagaaatttcagacccgcgtgcacagaaagactttaaatcctctatttgatgaaacttttcaatttcctgtagcatatgatcaactaagcaaccgaaaactacatttcagtgtgtatgattttgacagattttctagacatgacatgattggggaagtgattcttgataatttgtttgaagtctctgatctctccagggaagccacagtatggaaagatattcactgtgctaccacagaaagtatagacctgggtgaaatcatgttttccctttgttacctaccgacggctgggcgtatgacattgacagtcattaagtgcagaaatctgaaggcgatggatattactggctcatcagatccttatgtcaaagtgtccctgatgtgtgaaggtcgaagattaaaaaagaggaaaacaactacaaagaaaaacactctaaaccctgtgtacaatgaggccattatttttgacatccctccagagaacgtggaccaggtcagcctctccattgcggtcatggattacgatagggtaggacacaatgaggtcataggagtgtgcagaacaggactggatgctgagggtcttgggcgagaccactggaatgaaatgctggcctatcatcgaaaaccaataacgcactggcacccattgctggagttacctggccgggcgaccagttttgatagtcaaggatcctgcccttctcctaaaccaccttccacaccataatgcctccaaaatgagaccatgatattaagcatctaggatcacgtgctcattgaatcagaaaaaaagtggaaggtttggtttcctcatttgaaatatatccgtactaatgaacaaacttgatgtgcacttttttatttgcttttattgttgattttttaactttgaacatcaatacattttacttgaatacatatagtccttagttgcataaggcattttatccttcgtatcaaatgcctgttagcacaaagagtgttttactatgttgtaattctttgcatatgaaatgtttttttaaacagttcatacttacctaaaattaaatatagtttatgctgctattgtataaagtagcacatgtcatatatgtatgggtttgattttgttatactgtgttcatttctagttgtgcaggtggttctgtataaacttaaaaggagattttgaacttaacttacacaacattaaatccttgcacaatcaaattaatgttacttatctgataatacttttctttcattctcagaaaattactttcttggtgaggtttggctctgctaaactcaaaacttgtctctcaagcttgttctttaaaatacatagacaaagctgtaaatttaaagaatcattttgaatataaatttaagaagtaatacttattggctgaaaaacggaggctgagccattgtggctaccattttacactgttttactgtaacattagctcaaatatctgttgcactgttcaactgatatttttaaaattctaataatcttcatctcaaatgtagcattagtatttctaagtgaacagaatcagaagttaatttttaagtgtttgtaaggttctcaagtactgtgacatgtatttttttgtgacgtgtattttttgtgacttgaagctatcatatagatcctgtatttctgatagaccatactaacagacaccaaaggaacaacaacactgtctgtgttcatcaccgtttagattgtacacagtaatggtgactcttaaacccagtcagaagctcatcattggaattcagtattttcttaaagaaaggatgatttattttcagcaacatatagaaatatactataaatattaataatacaacttcaatgcttaataataataaacaaattaattctaaaggcccaggcctccagtccttgcatgaaaggcatttgccttcataaggatcaaggttcaggccactacatgtaaaaactatgcaagtgtttttacaagacagaactttcttttaagtcaggtcaacatattttgtcccattttcaggccctgttggaaggtatctatactgaattaccccaaccttacttttaagatgtgtggtatagatagtatatatttcaagcttatttcaaaattggtggtttttttaaaaaaagaggcaagaaaataaaaacatatttacctggatgagaaaattttatcagcggttatgaaatttttatttttgtaaaatcccattatttctaaatattaaaaaaaagttttaaaagccttgaaattttgttgacatctcttatagtgatggcattactgttaattaagaggtaaatattttgcacattaccattttaaaggcaaacacagttctgcctcagatttttcaaaaatgcttataccaccctaaggaaaacaggtactcctagctaacattttctcattgaaaataatagaagaaagctgtttggaaacatttggctaccttgtcgagcctaaaagaattatttgctataggtaaaatgaaagatgacacttgcattttgaaattatttgttttattgggaaataaaacttttcaaataggaagacaaaaagttatactattaatagaatgacatttttggagacagttgttttattagtagatataactgcagcttaaagtaaattagcaattacgtttcctaagtgagtataattattttcacccaaaaacacatttttaaggactttttgttgattcttagaaactcgcttttctttactccctaaggagaaaaagccaatgcttgtgatgaaaaaatgtgaaccattggccaatcagaagactctaatatgggaattgtagattaaaataagttttaaaagaattttttaaatgtttccttgaagttagaataaactcatcatgcaaggatatgtgttaatcctgagaaagagatcagcgagaggaaattcaccacaactcatctttcatgtaattcaggaggtaggtttatgctcagattaataaggcatgattgttaaaaatgacagttcatattattaaaatgtaatcctaacaattttaatacaacacaccctcactctacacagcccacacattcatatacacataacttaccatctttctgcttgtaattgaagatgaaatattttcagtttcagtatttaaaataagatttgatattacaaatccccttatttgtgtgggacatcacattttaatgacagtactgacacattatgaagctgcagttcaggtatataatgaacatctaatttcagggacttcttcagggacttaccaaatatcagtctaggaaaaaaaagagtaa

SEQ ID NO: 188192 - DNA, 2433 bp, Homo sapiens
  Payload ID: 17032
  Gene Symbol: SYT10
  Gene Name: synaptotagmin X
  ENST ID: ENST00000539102
  CDS Start-End: 125-709
gcaatctccagccaaagtcaccgcgggcggactatggcttagggcgccagaggggttagaggtacgggaagaggaaaagacggctaactgggaaaaaaagagaaaacgaaagaaaagccaaacgatgagtttccacaaggaggacggagtgaacagtctgtgccagaaggctctgcacatcgtcaccgagctgtgcttcgccggccaggtggagtgggagaagtgctcgggcatcttccctcgggacaggggcagccagggcggaagcagcacagatatttcagtcagcctgttagctgtcgttgtcagcttttgtggactggccttgttggttgtctcactttttgtcttctggaagctgtgttggccatgctggaaaagcaaacctgtgacttccaacatcactacgcttccacagagcatttcaagtgctcctactgaagtttttgagactgaagagaaaaaagaaattaaggaaaatgaaaagccagccgtaaaagctattgagcctgcaataaaaatcagccacacttcccctgacatcccagcagaagtccaaactgctttaaaagaacatttaattaaacatgcacgtgtgcaaagacaaattactgagcctacgtcatcaacccgtggttggggaaagaagaagaagaaaagaattttgagcacttgcaattttgtcactatgccaaggcacccttcctgataatccttcaccaacctgcatgaaagtttctgaagaccacagcatgttgaaaaaaagaaaatgtactcatttttggctgccacaactatatattctttttaaaaccacagttccttccgaagacacctgccgaggcaaatgcaggtttccagtgttgattttagcatgggcacagaacctgttttacaacgaggagaaacaacaaccagcattgggaggataaagccagaactctacaaacagaaatcagttgactctgagggcaaccaaaacgaagatgtcaaaatctgtgggaaacttaactttaccctccagtatgattatgaaaatgaacttctagttgttaaaattatcaaagctttagatctccctgctaaagacttcacaggaacttctgacccttatgtgaagatgtatcttcttccagataggaaaaagaaatttcagacccgcgtgcacagaaagactttaaatcctctatttgatgaaacttttcaatttcctgtagcatatgatcaactaagcaaccgaaaactacatttcagtgtgtatgattttgacagattttctagacatgacatgattggggaagtgattcttgataatttgtttgaagtctctgatctctccagggaagccacagtatggaaagatattcactgtgctaccacagaaagtatagacctgggtgaaatcatgttttccctttgttacctaccgacggctgggcgtatgacattgacagtcattaagtgcagaaatctgaaggcgatggatattactggctcatcagatccttatgtcaaagtgtccctgatgtgtgaaggtcgaagattaaaaaagaggaaaacaactacaaagaaaaacactctaaaccctgtgtacaatgaggccattatttttgacatccctccagagaacgtggaccaggtcagcctctccattgcggtcatggattacgatagggtaggacacaatgaggtcataggagtgtgcagaacaggactggatgctgagggtcttgggcgagaccactggaatgaaatgctggcctatcatcgaaaaccaataacgcactggcacccattgctggagttacctggccgggcgaccagttttgatagtcaaggatcctgcccttctcctaaaccaccttccacaccataatgcctccaaaatgagaccatgatattaagcatctaggatcacgtgctcattgaatcagaaaaaaagtggaaggtttggtttcctcatttgaaatatatccgtactaatgaacaaacttgatgtgcacttttttatttgcttttattgttgattttttaactttgaacatcaatacattttacttgaatacatatagtccttagttgcataaggcattttatccttcgtatcaaatgcctgttagcacaaagagtgttttactatgttgtaattctttgcatatgaaatgtttttttaaacagttcatacttacctaaaattaaatatagtttatgctgctattgtataaagtagcacatgtcatatatgtatgggtttgattttgttatactgtgttcatttctagttgtgcaggtggttctgtataaacttaaaaggagattttgaacttaacttacacaacattaaatccttgcacaatcaaattaatgttacttatctgataatacttttctttcattctcagaaaattactttcttggtgaggtttggctctg

SEQ ID NO: 188193 - DNA, 5240 bp, Homo sapiens
  Payload ID: 17033
  Gene Symbol: SYT11
  Gene Name: synaptotagmin XI
  Uniprot ID: Q9BT88
  ENST ID: ENST00000368324
  CDS Start-End: 254-1549
agaaggcggagcctacctctcatcaggaccagtctgactgcacctgcatccttagctcagcgcatccccggagcatcttaagagctgagcgcagctgacaactaggggccggaccgtcgcaggaggcgtccgctggataccttcccccttccctgacctagagctctacagctgctgcctcggtactgaccgagggttcccagagctgtctcaccattgcaaaaacgttatagcaacagcctctgattacgacatggctgagatcaccaatatccgacctagctttgatgtgtcaccggtggtggccggcctcatcggggcctctgtgctggtggtgtgtgtctcggtgaccgtctttgtctggtcatgctgccaccagcaggcagagaagaagcagaagaacccaccatacaagtttattcacatgctcaaaggcatcagcatatacccagagaccctcagcaacaagaagaaaatcatcaaagtgcggagagacaaagatggtcctgggagggaaggtggacgtaggaacctgttggtggacgcagcagaggctggcctgctaagccgagacaaagatcccagggggcctagctctggatcttgtatagaccaattacccatcaaaatggactatggggaagaactaaggagccctattacaagcctgacccctggggagagcaaaaccacctctccatcatctccagaggaggatgtcatgctaggatccctcaccttctcagtggactataacttcccgaaaaaagccctggtggtgacaatccaggaggcccatgggctgccagtgatggatgaccagacccagggatctgacccctacatcaaaatgaccatccttcctgacaaacggcatcgggtgaagaccagagtgctgcggaagaccctggaccctgtgtttgacgagaccttcaccttctatggcatcccctacagccagctgcaggacctggtgctgcacttccttgtcctcagctttgaccgcttctctcgggatgatgtcattggcgaggtcatggtgccactggcaggggtggaccccagcacaggcaaggtacaactgaccagggacatcatcaaaaggaatatccagaagtgcatcagcagaggggagctccaggtgtctctgtcatatcagcctgtggcacagagaatgacagtggtggtcctcaaagccagacacttgccgaagatggatatcaccggtctctcaggtaatccttatgtcaaggtgaacgtctactacggcagaaagcgcattgccaagaagaaaacccatgtgaagaagtgcactttgaaccccatcttcaatgaatctttcatctacgacatccccactgacctcctgcctgatatcagcatcgagttcctcgttatcgacttcgatcgcaccaccaagaatgaggtggtggggaggctgatcctgggggcacacagtgtcacagccagtggtgctgaacactggagagaggtctgcgagagcccccgcaagcctgtggccaagtggcacagtctgagcgagtactaatcctgttcttctctcctctaatccccgggggccaagctggggagggatgtggaggggaaaaagatgacagagaagtggactccaaacctcattttagttgtagaagaaaatttcttacaaaacaaattccacaaagaacaccctatatgaccacagctgcagatcagttcttagcaatgatgtttttttttctgctttgcaaggcgctagaatcttttattttactttattttttttgaggtggagtttcgctcttgttgcccgggctggagtgcaatggtgagatctcaactcactgcaacctctgccctccaggttcaagtgattctcctccctcagcctcccaagtagctgggattacaggcacccacgagcatgcccggctaattttttgtattttcagtagagatgggtttcaccatgttggccaggctggtctcgaattccagacctcaggtgatccacccgcctcggcctcccaaagtgctgggattacaggtgcgagccaccgtgcccggcctctggttttgttttgttttttttttttaatgggggacaaaagagagggaaagacccctataaatctatatataacaatgtaaccatatacttgcatgtctaatacaaactgaagaaattagcctaactgccaatatcaagttgcagattttaatccatggaaattgtgttttgtgctgaattgtatttgctgattacctgaaattggcttctttttattgggcttctctggagaatttctcccactccccacctctgcagaagaaaattttgctcttataaaacctcatgttttcatcattcccatcttttctttttattgcctcttatatctctgctctttgacctcaaggtctagaggtctgcagtaagccaagaaacaaaggtggggtggatgaggcaaggtttgcaggagaaagaggaattgagaaatggggtatttttgctatcagctcttctgctatgaagtagtaaaaggcagtctataattaactgacagacctaactgaagcacagagaatacatcagacttatgcatccaagacatcagaacttggattttatcaaacttgatgacttctctaaaaggagctttggaaacttcaaattcagctataggatagtaccaatgaacacatccagctgatcccaaaagctgttttcaggtataaggacaaggagaggagacaagtgacgacagccattcccctttgcagctatctactgtagtgacagccatttcttggttgatgggttggaagtcatcagaggtttgaagaattacactggcctttgtttttctggaaatgccgaccatggagatgctttagagtcttctcaaatagcttagatgttgtaatgaggttagctttgcttcataaaacaggggccctcagaagttctccttaaatttttcaataaaaatttagctcttaaaaaaataacagtgtgactgagtgaatgaagataagttggattctttcagagcattcttttcctcaaaacgagctgcataattcttggaatttatgtcttaccacatggtggagggatggaggaactacaggatgcaattcttcttctaccaatgggcaatagaggttgagagagattcagcatctttctgggattagaattcaagtctctttactcctacagcagctgtgtctccaacgttgagactttgcagatggcacagactccatggataataggtaaacttggggccgggcgcagtggctcacgcctgtaatcccagtattttgggaggccgaggtggaaagatcgcttgagcccaggagttcaagaccagcctgggctacatgacgaaactccatctctatcaaaaatacaaaaaattaactaggtgtggtgctgcacgcctgtggtcccagctattcaggaggctgaggtgggaggatcatttgagcccagaggtagaggctgcagtgagccatgatcatgccactgcactctgggctgggtaacagagtgagatcctgtctcaaaaattaattaattaattaattaaaataaactaggtaaacttggataggcagtagatatttttgcccacctgaggaggaactcagtcaagctgttgcttaacagcttgatccagggcgtgaaaggttagttgagactgaagtgttcacttccatagaagaacatcacttttaaccttgctttggcgaagggagtcggaaagctgagtctctatggacgggggggtgatcttgctttcagtgttccctcagcttttgtggatttaaaaccattctgctccccctaaaccttttgtttgatttcagcccatgttcttgacaatgcagagcaattctgagcagtcacaaagcctactctctgttcttgtccctgccaacccccaccccccataatctgactcacaacttcaccatcagttggggtcataccactagtctctgtcctataccccatgaaatgtaaatactgtatcataagtagaagaaaataatttttgttttctaaaaatgcattttgagatagtttaatgtaaatctgacaggagcattctgaagccccattaggaaaaaatttaaatggttcctcttcatcgccttaatgtctaaagatcagaaatcgctgagcaaacccgcttttgtttccttcccagaaacaatgcaaaacaacaggtggagatagtctggtctttgccctgctgtgtgtgcctctgtagctcctcctgacaaacgtctgggaaaacagcctcaccccactctcctctctcttccccatttccttgtagctttattccttgcatctttgggtctactgagcagtgggtgctgaggtgacaggggaggaaccagttgttctgtagcctaggaactgcctcagtgtctttgccagaaaaaggcaaagaggcggacagtgcagggctcctccctcctacctcaggcctgatccatcgtgcccttgactttgccgtctcaaagtttcttagctgactttggctttcacatttgttctttccagagctaactgataagagtggaggaggaatgccttctcctaagagtcagttgaaagaaagacaagagagtcacatcttagcttttgcacaaggcattcgtggtcaggaataggttagggaatggtcacttctgattttccaacagttgctccttctctgaagagatcttgattcctttgggaagacaagaatttttcttaataacaaaggtccctttatgagttattccttctttcagttcatctcactggagcacagccaagatggacatgtttatggacagtgctctagatgtgaaaacagatagaactggtttgtgggacaggggcagcttgctcaggagagggaataacgcaggtcccttttcttggaaggcttgtactatggccatgacagtgacattgccctcaccatgatccctctccaaagtggttgtctttctttaccttgtgtcttctcttgtaaaaatgaaactcaaaaataaaataaatgtgtcaaattttgaaaaaaaaagaaaactgaaaaagctaacatgaattgtgtgaaattgcataatgctgtaatgctaatctacaatatgtaatgctatcttgtatgttgaatttgttaatgcaccacacaagtgcaaaataaagactgattcacattacataggca

SEQ ID NO: 188194 - DNA, 4534 bp, Homo sapiens
  Payload ID: 17034
  Gene Symbol: SYT12
  Gene Name: synaptotagmin XII
  Uniprot ID: Q8IV01
  ENST ID: ENST00000393946
  CDS Start-End: 1163-2428
gaagttctagaaaatgttaattgggggagctgtggctggcagagaaggaaaaaggaagctgaagggcacttgggctcataatggtctctccaaccctgatcctgtcctttatggacatttggcagcgctgctgccttgaggtgccttgcaatgctttatctttttgttaaagccacctctgttgcttcagccagcttgagcggttttctgttacttgctagtggttgggaaggcttagccgacgaagggaaaatgagtcaggtcctgaaggatgagcaagttacgggagtgggccgcatggtgagggagtggacttcctgatggggttaagggcgcctgaacacctgggaggcaagttgaggccaagacctggggtgatggagaggcagggtaggctacccagtgagtaggaggccgaaggaaccacagcagggctccagatctcctggcccagaggggctggtacgggaagcccagaagacactcatccctaaggggagcctgagactgaggaactctcatgccctgcgtcgggctcgtgggcgaagggccttcccagggactgcaccatggcctgtccccagccttacccaggggcctccctctcaggttctgaaggacccaggggtcacagctgtgtggggtgctccactgaacacttccttcaaactccttcaggctggagtgcagtggcgcgatctcagctccatgggagagagtttgaaaggatgaagagtttacatcctctggaaagaagcaaatagaaggcattccaggcaaaaggaactgcatcgagtaaaagcatggaggcaagaaagggcttggtgtgtttgagaaacagtgagtagggcatggtggtggcagaagcttaaagtgtatggcccgtggacagtgacagccggacaagaagctgaagtgacagaacaagttgaaccaaaggaattccagacctgggaaagtggagaaagaattttggggtcagagccgtttaagactttgcctagggcctgggtcttctttctcctaaaggcctcaacccacagcacgccacacaaatatgtcacataacacacaaacaaacatcatatttcacagtccaggaaatgaaatgaagacaaaagcgccccctgtgggtgaagtcacagtcactgcagcagacatcatggctgtggatgtggcagaataccatctgagcgtcatcaagagcccccctggctgggaggtgggtgtctatgctgcaggggccctggccctgctgggaatcgcagctgtgagcctgtggaagctctggacgtcggggagcttccccagcccctctccgttccccaattacgactacaggtaccttcagcagaagtacggcgagagctgcgcagaggccagggagaagagagtgcctgcctggaatgcccagcgggccagcacgcggggaccacccagccgcaaaggcagtctcagcattgaggacacctttgagagcatcagtgaactggggcctctggagctgatgggccgggagttggacctggccccctatgggaccctccggaagtcccagtcggccgactccctgaactccatctcctccgtgagcaacacctttgggcaggacttcacactgggccaggtggaggtgagcatggagtacgacactgcctcccacacgctgaacgtggcggtgatgcagggcaaggacctcctggagcgggaggaggccagcttcgagtcctgcttcatgcgcgtcagcctgctgccggacgagcagatcgtgggcatttctcggatccagagaaatgcctactccatcttctttgatgagaagttctccatccccctggatcccacagccctggaggagaagagcctgcggttttctgtatttggcatcgatgaggatgagcgcaacgtcagcacgggggtggtggagctgaagctttctgtgcttgacctcccgctgcagcccttcagtggctggctctatttacaggaccagaacaaggccgccgatgctgtgggggagatcctgctctccctcagctacctccccacagccgagcgcctcaccgtggtcgtggttaaggccaagaacctcatctggaccaacgacaagaccacagcggaccccttcgtcaaggtgtacctgctgcaggatgggaggaagatgagcaaaaagaagacagccgtgaagagggatgaccccaacccggtgttcaacgaagccatgatcttctcggtgccagccattgtgctccaggacctgtctctccgcgtgacggtggctgagagcagcagcgacggccgtggggacaacgtgggccatgtcatcattgggccgtcagccagtggcatgggaaccacacattggaaccagatgttggccacgctgcgcaggcccgtgtccatgtggcacgctgtccggcgaaactagcaaccagggcgggccagttgggcaatggagctgctggagcccggtacccactcagctctgtctgatgccctctccatagcccagctggagccgtgaacactggggtcccctggcagagtcctcatgacccatcctggtctctctgtccagattgcagcagaggagtgggcgtggctctgtgtccagggccccagggtctgctcctgctgaggaccagctgtggctgggccaggacagaggactcaaccctgctcctcccggtaggccagctgccgagctgggctatgttctggaacccagtgaatcttgggggccaggcactgtgctaggcaccagcaggggtaacacgaagaagacccggcccttagggcatcaggaagactagctcccctgccccggaggatctgctcagtgctgatggcagcccagctgtgtggactcagggggctctgagggctagggaaacaggaagggcctctttgacaaggtaggagctgtgcttggaggggcaggaaaagaactgagcatgtcgcaggcagcgggcccagcctgagcaatggcaggatgtgaacttccccatcgcaaatgcagttctcagcccactgcagtggatacaaggaagggcctttctcggggccggagaagagaccaagagaccaggcccgggcagcagcctaccggccacgtggaacactggctccggagttattctctgtcaaatctactccccggacctcaaccatggcaagaaccagaggtccaaagaggcccagacccaggtccttgtgctcagtcctgcgcaaaccaggcccagaccctgcaagcatttgttgatgcccttgcaggcccactgggagaaagatgcctcaggcaggtctcagcctgggggtggcaggggtggggcagagagaatactgacagcagaggtcttggtgggctgcacgtgcctgcgaagatgtggtggacaaggaggctctcgggctgggccttggaggggtggcagcggaaggacagcccaggtggctgaggcctgatgggaagccggggaaggccagggtggaagggcggcttgagggacgccaggagaagactgaatgccaggctaggaaggaggcggctctcgatcacggggtgggtgcccccgacaccgggtctcctagcttgagttccctagaagcgaaatctgagagggggattctggggcaagtagtttcttgcgggtgagtgttctcagagaaacttaccagatcaagaaagggagctcaggctggatggaggaagccacgcaagtgtggcttcaagatccatcgccttggcctgatcgctgtgggggcaggggcctggagtacgaggggcaccctgggggctcccacccagaagcagaggggctgggctgttgcacctctactggcatcagtctttggttaccccccagccccagtaggaggagagcaggcagagcttgtcatccccagcctggtgtcccgcagtcccaggaagccgcttcttgccttcatggctgagtgctgggaagggctgagctcacccaggccagcaggtggggtatcatctgctcggtggggccacccacaggtgacagcatggaccctcaggctggctgcccctgttccttggtccataactggtgagctatggagacccaggccaacaaattatccccagtgatatggggggaggaggggctagaacaagggcccaggggactggaggcaggatggtggctttccctacctgacacagccatggcccagccccaaggccaggctgtctaccctatggccacagcaggaggtcagcccagggccaggagacacatggctggacaaggctttgcagcctgggagaccccgactttctctaacccagtggctgtgcggtgcaggccactgactccccccctgccctctcccctctctccctccccctaactgcatgacatgttaactgtgtgcccaggacagccgtggtggggaccgggtatgccaactggaatgattctagaaccaaaataaagttggggcaggaagagggggcttccagggagccctgctcggccctgaatcaccttcgtctcttctctaggaa

SEQ ID NO: 188195 - DNA, 1678 bp, Homo sapiens
  Payload ID: 17034
  Gene Symbol: SYT12
  Gene Name: synaptotagmin XII
  Uniprot ID: Q8IV01
  ENST ID: ENST00000525457
  CDS Start-End: 231-1496
atgtaaaaaatggagtcaccacgaccagattaggccacggtgaggactgagatgatgttgtaaggcaccagcacagagctgacctacagctcaatcgtggtgggagggagtaattatccattcagaaaaggggaaactttccgctgcgcctcctgtcgctgttttccttggctcccggaggtgcgcagtatcgggtccgtttttaagtcacagtcactgcagcagacatcatggctgtggatgtggcagaataccatctgagcgtcatcaagagcccccctggctgggaggtgggtgtctatgctgcaggggccctggccctgctgggaatcgcagctgtgagcctgtggaagctctggacgtcggggagcttccccagcccctctccgttccccaattacgactacaggtaccttcagcagaagtacggcgagagctgcgcagaggccagggagaagagagtgcctgcctggaatgcccagcgggccagcacgcggggaccacccagccgcaaaggcagtctcagcattgaggacacctttgagagcatcagtgaactggggcctctggagctgatgggccgggagttggacctggccccctatgggaccctccggaagtcccagtcggccgactccctgaactccatctcctccgtgagcaacacctttgggcaggacttcacactgggccaggtggaggtgagcatggagtacgacactgcctcccacacgctgaacgtggcggtgatgcagggcaaggacctcctggagcgggaggaggccagcttcgagtcctgcttcatgcgcgtcagcctgctgccggacgagcagatcgtgggcatttctcggatccagagaaatgcctactccatcttctttgatgagaagttctccatccccctggatcccacagccctggaggagaagagcctgcggttttctgtatttggcatcgatgaggatgagcgcaacgtcagcacgggggtggtggagctgaagctttctgtgcttgacctcccgctgcagcccttcagtggctggctctatttacaggaccagaacaaggccgccgatgctgtgggggagatcctgctctccctcagctacctccccacagccgagcgcctcaccgtggtcgtggttaaggccaagaacctcatctggaccaacgacaagaccacagcggaccccttcgtcaaggtgtacctgctgcaggatgggaggaagatgagcaaaaagaagacagccgtgaagagggatgaccccaacccggtgttcaacgaagccatgatcttctcggtgccagccattgtgctccaggacctgtctctccgcgtgacggtggctgagagcagcagcgacggccgtggggacaacgtgggccatgtcatcattgggccgtcagccagtggcatgggaaccacacattggaaccagatgttggccacgctgcgcaggcccgtgtccatgtggcacgctgtccggcgaaactagcaaccagggcgggccagttgggcaatggagctgctggagcccggtacccactcagctctgtctgatgccctctccatagcccagctggagccgtgaacactggggtcccctggcagagtcctcatgacccatcctggtctctctgtccagattgcagcagaggagtgggcgtggctctgtgt

SEQ ID NO: 188196 - DNA, 593 bp, Homo sapiens
  Payload ID: 17034
  Gene Symbol: SYT12
  Gene Name: synaptotagmin XII
  ENST ID: ENST00000533427
  CDS Start-End: 300-593
attcacaccctcactgaaatctcagctccctgggaaaggatgtcgtgttaaagggagaggaaagaacagacagcgtgggagtctggggtctgagctgggccagccatggaggtgatggggcccccgacagccagaggccagatgcagcttgaggctttgtcccgtaccacgcctgttgtgctgtggggtgtactttgccatgcataccttgctcgcgtgctgcgggcattggctgtcccagcttggccccactcttgcaaagtcagcttgtgccagtcacagtcactgcagcagacatcatggctgtggatgtggcagaataccatctgagcgtcatcaagagcccccctggctgggaggtgggtgtctatgctgcaggggccctggccctgctgggaatcgcagctgtgagcctgtggaagctctggacgtcggggagcttccccagcccctctccgttccccaattacgactacaggtaccttcagcagaagtacggcgagagctgcgcagaggccagggagaagagagtgcctgcctggaatgcccagcgggccagcacgcggggaccacccagccgcaaaggcagtctc

SEQ ID NO: 188197 - DNA, 1661 bp, Homo sapiens
  Payload ID: 17034
  Gene Symbol: SYT12
  Gene Name: synaptotagmin XII
  Uniprot ID: Q8IV01
  ENST ID: ENST00000527043
  CDS Start-End: 140-1405
actgcaggggtggcgttgccgccggcggccgggctaggcgcaggtgcgtgcgcgctgcgggaggcgggccggcagctggagcccagccggagcggcggcccctccgcggagcccggtcacagtcactgcagcagacatcatggctgtggatgtggcagaataccatctgagcgtcatcaagagcccccctggctgggaggtgggtgtctatgctgcaggggccctggccctgctgggaatcgcagctgtgagcctgtggaagctctggacgtcggggagcttccccagcccctctccgttccccaattacgactacaggtaccttcagcagaagtacggcgagagctgcgcagaggccagggagaagagagtgcctgcctggaatgcccagcgggccagcacgcggggaccacccagccgcaaaggcagtctcagcattgaggacacctttgagagcatcagtgaactggggcctctggagctgatgggccgggagttggacctggccccctatgggaccctccggaagtcccagtcggccgactccctgaactccatctcctccgtgagcaacacctttgggcaggacttcacactgggccaggtggaggtgagcatggagtacgacactgcctcccacacgctgaacgtggcggtgatgcagggcaaggacctcctggagcgggaggaggccagcttcgagtcctgcttcatgcgcgtcagcctgctgccggacgagcagatcgtgggcatttctcggatccagagaaatgcctactccatcttctttgatgagaagttctccatccccctggatcccacagccctggaggagaagagcctgcggttttctgtatttggcatcgatgaggatgagcgcaacgtcagcacgggggtggtggagctgaagctttctgtgcttgacctcccgctgcagcccttcagtggctggctctatttacaggaccagaacaaggccgccgatgctgtgggggagatcctgctctccctcagctacctccccacagccgagcgcctcaccgtggtcgtggttaaggccaagaacctcatctggaccaacgacaagaccacagcggaccccttcgtcaaggtgtacctgctgcaggatgggaggaagatgagcaaaaagaagacagccgtgaagagggatgaccccaacccggtgttcaacgaagccatgatcttctcggtgccagccattgtgctccaggacctgtctctccgcgtgacggtggctgagagcagcagcgacggccgtggggacaacgtgggccatgtcatcattgggccgtcagccagtggcatgggaaccacacattggaaccagatgttggccacgctgcgcaggcccgtgtccatgtggcacgctgtccggcgaaactagcaaccagggcgggccagttgggcaatggagctgctggagcccggtacccactcagctctgtctgatgccctctccatagcccagctggagccgtgaacactggggtcccctggcagagtcctcatgacccatcctggtctctctgtccagattgcagcagaggagtgggcgtggctctgtgtccagggccccagggtctgctcctgctgaggaccagctgtggctgggccaggacagaggactcaaccctgctcct

SEQ ID NO: 188198 - DNA, 5144 bp, Homo sapiens
  Payload ID: 17035
  Gene Symbol: SYT13
  Gene Name: synaptotagmin XIII
  Uniprot ID: Q7L8C5
  ENST ID: ENST00000020926
  CDS Start-End: 113-1393
ggcggcgggagagctgctggctcgcccggatcccgggagctgcctggaggcgggcccggcccggggaaggtgagcggctgcgggacccagcccctcgccgggagcgggcaccatggtgctgtcggtgcctgtgatcgcgctgggcgccacgctgggcacagccaccagcatcctcgcgttgtgcggggtcacctgcctgtgtcggcacatgcaccccaagaaggggctgctgccgcgggaccaggaccccgacctggagaaggcgaagcccagcttgctcgggtctgcacaacagttcaatgttaaaaagtccacggaacctgttcagccccgtgccctcctcaagttcccagacatctatggacccaggccagctgtgacggctccagaggtcatcaactatgcagactattcactgaggtctacggaggagcccactgcacctgccagcccccaacccccgaatgacagtcgcctcaagaggcaggtcacagaggagctgttcatcctccctcagaatggtgtggtggaggatgtctgtgtcatggagacctggaacccagagaaggctgccagttggaaccaggcccccaaactccactactgcctggactatgactgtcagaaggcagaattgtttgtgactcgcctggaagctgtgaccagcaaccacgacggaggctgtgactgctacgtccaagggagtgtggccaataggaccggctctgtggaggctcagacagccctaaagaagcggcagctgcacaccacctgggaggagggcctggtgctccccctggcggaggaggagctccccacagccaccctgacgctgaccttgaggacctgcgaccgcttctcccgtcacagcgtggccggggagctccgcctgggcctggacgggacatctgtgcctctaggggctgcccagtggggcgagctgaagacttcagcgaaggagccatctgcaggagctggagaggtcctactatccatcagctacctcccggctgccaaccgcctcctggtggtgctgattaaagccaagaacctccactctaaccagtccaaggagctcctggggaaggatgtctctgtcaaggtgaccttgaagcaccaggctcggaagctgaagaagaagcagactaaacgagctaagcacaagatcaaccccgtgtggaacgagatgatcatgtttgagctgcctgacgacctgctgcaggcctccagtgtggagctggaagtgctgggccaggacgattcagggcagagctgtgcgcttggccactgcagcctgggcctgcacacctcgggctctgagcgcagccactgggaggagatgctcaaaaaccctcgccggcagattgccatgtggcaccagctgcacctgtaaccagctgcccagctgcctcccttcttggacagccctgacccgtcctctgcaacctcctttctgtgcccctttcctcattctgacacccagaagacagtgacagatgtgtttgcaaggctgggatggctctctcatcatactcttgtttcttagaaataagcaagacagagcaggaaatggaatatgcgggtcacactgaggaatgcattttgctcatctgtgttattgaaggaggtgcttattaaatacagttcctatgcctgttttataggtggggttaggccagatgcagagaaagctaaatgtgggaatcatggatgcaaagaagaatttggctttttgaaaaacaagcatttcaaaaatgatgaaggaagtgaaagtatcctggatcaactcctagagttagagattgcccaggtggaaagaaaccttagccagcgttcaatcaagctcaccatgcagggcagtcacccggcagttctcaaactttagcatgtgaagagtcaccagcagattcctgggctcgcctggagacattcctagtcggtattcctggtcgaagcccaggagccttcctttttaacaagctgatgtagagggtggagcactgtatgtggagaaattccttctacaatattccacacaggtttttggccacagtccttgatggagtcccaaaaccatggtgcagccagttccaatgctggacacctcaaccatcagggtgaaatctggggcctcagctttttaatttaattattttaattcttaatactttaatttgtgcatttcataagccccctgctcttggactgaattttgtgctttttattgaagaattttattgtttttatcttaaaatcagtttctattatccttggggagaccatccctaacaaagtacaggtgggatctcctgtgagtcattggctgggttctgattgctagatgtcacacccaccagcatcaccaaagtgactctgagatagaccggtcccttctcagcgttccagtcacttcaggaggaatttagttattgacttagtctatgacatctggctacatgtaggtagagaagaaagataattttaaaaaggaaatcaggtcttttgcaactgtgcctccctctgtctgttttcacttgaatgggtaaataaccagcagctaggttttgaattcctaccttgttattctaaacagatgtccacattgttaattaaatctaaattatgagccttgctgagtggatacggtacttacacctgaaccaggattcctgggttctgttgttgacattgcccttcagcacctgtttggccagctgtgtaagataggactaatgactaggaagcctaccccaatgaatgatatactagatgaaatagtgttcaaaacctgtaggcactctctggctaaaaacaaactctgaggccaccagcagatcatctttaagctaagttactatttttcacctttttttttagacggagttttgctctttgttgcccaggctggagtgcagtggcacgatctcggctcactgcaacctccgcctcccaagttcaagcgattctcctctctcagcctcctgggtagctgggattacaggtgcccaccaacatgcctggctaatttttgtacttttagtagagatggggtttcaccatgttggccaggctggtcttcaactccagatctcaggtgatctaccctcctcggcctcccaaagtactgggattacaggcctgagccaccgcgcccggcctatttttcactttaatttggcagctgagaatgcccagaaagtgccagaagcatcgtggcatttccagaaccatggattctgcctttggacccctctctattaatattaaaactctgggccttcagatgtcaccctaatccacttccctaagacagaatttctggacaagatgggtaagggcttcattccttcaacaagtcaagtcatacttggcctctccctgagaatctgagcaggagccttataacctgtggtcattattttttctttctgtacagaaatagaaaagcattagaaataacttctaaccatcctctgaaaaaacagaaaaaatatcgaatccctctttcatgagaagtcttttggataattggaaaccttcatcactgaggttggccagcccctgccaagtgttgtgtaggcaaagcacttgttagtggcttcctatgaaatgttttagagatctcttcaccatactggtttcttctctttggttggtgtgggtaaaagaaaacaaaacatttcctataagctgaaagctgaccagcattctcttcttggtaacatctactactccaatctagaaaatttggattctagaccaaaaatcaggaaacatggctccttataaatctgtgcagctgccttatagtaccatcaaaggaatttcaggtgggctgggcggggccccgatcccagaattatcaactccacccatcatcatttggtcatgaagcatcctttcattcttcttcttcttttttttgggggggcggggcgggggagggatctcaaagttttagtcttccagaatccaaattaaaggttgcccctgatgggggccaggttccgccacagaacatcttagatgtcagccttgacctcacttagcagggattacagaaatgagatacattttgaaggagagttgtctgttatgttcactgtattctaagtgcctgggataaagctgtctcatgggtgctccatatatattcatatatatttgttgagtgaattaatgaattaagagtggctggcagagtaggcagaaaaagacactgcaaatggcataaaaattaaagtcctagctgagttctcaatggtaaaggcatcagatgtcttagcagtcaagctagaaattcatgacaatgagtattactatttgcctaatggcaactcattgctctccatgtaaatgtaatcaacagatgaagagaatataattgctctgcttttccactaaaactccatcttagtgaattttaaattatccagagatgtcaaactgccaaataaaaatatttcagtagtctttgcatcagcttaccttgtaccagaaacatttccaatttactatcaaattatagtaactgagcctgtgtgaagtatctcatcattttcgaaaggaacaccttgtgtgatgccagtgagcatttctaaaaagggtgtgaggtagaggtaaaaataaggtgagagaccatttcagaatgcactgttgctcaaaaaggtgatctggttctttcttcagagatttctacggggatagaaaatcgggagtctgccctcattaatctgtgattccacctcttgcaccaaatcaatatctatttgttgagcacttattgattaagaccttgcatatgtctgtccattttgatttgagatacaactttttgtgtgggttgaatgacaaatcactccaaacaaagctgggcacagagaatcagctaggagaccagttattcagggtccatttctcttggatgtaaaggagtcctgggtaaaatgtggctgtaacctaaaccaactagtccttgtgatttgtttctgccctctgtgtttcctgttgtcaaatgctaagtgtgtgttttgcagtcatgaactaaagcacaaaaagatgcatgagacattgtagtcatatgtctggtgtgacactttggagcaaaaaccttgcagtggtaaataaaaaatttccaacagggt

SEQ ID NO: 188199 - DNA, 557 bp, Homo sapiens
  Payload ID: 17035
  Gene Symbol: SYT13
  Gene Name: synaptotagmin XIII
  ENST ID: ENST00000528101
  CDS Start-End: 1-557
gacaaagcttggcggggaggggacagcagacgcgttggaggacaggtcaaggagtcaaaaagttcaatgttaaaaagtccacggaacctgttcagccccgtgccctcctcaagttcccagacatctatggacccaggccagctgtgacggctccagaggtcatcaactatgcagactattcactgaggtctacggaggagcccactgcacctgccagcccccaacccccgaatgacagtcgcctcaagaggcaggtcacagaggagctgttcatcctccctcagaatggtgtggtggaggatgtctgtgtcatggagacctggaacccagagaaggctgccagttggaaccaggcccccaaactccactactgcctggactatgactgtcagaaggcagaattgtttgtgactcgcctggaagctgtgaccagcaaccacgacggaggctgtgactgctacgtccaagggagtgtggccaataggaccggctctgtggaggctcagacagccctaaagaagcggcagctgcacaccacctgggaggagggcctggtg

SEQ ID NO: 188200 - DNA, 1710 bp, Homo sapiens
  Payload ID: 17035
  Gene Symbol: SYT13
  Gene Name: synaptotagmin XIII
  ENST ID: ENST00000533332
  CDS Start-End: 1-61
cctggagaaggcgaagcccagcttgctcgggtctgcacaacagagcatctgttacatatgaagtttacagaggtggtggccaaagggctttgtgatgtgactgctgaaataatgcaggggccacctacaagaaggaaatctctagcctaaaaaagcaactcagaatgtggagtgggatagcctgcaaatcacttgtcacttaaggtgacggcccagagaggtgaaatgacctgcccaaagtgacccagctccagcggcaggttcaatgttaaaaagtccacggaacctgttcagccccgtgccctcctcaagttcccagacatctatggacccaggccagctgtgacggctccagaggtcatcaactatgcagactattcactgaggtctacggaggagcccactgcacctgccagcccccaacccccgaatgacagtcgcctcaagaggcaggtcacagaggagctgttcatcctccctcagaatggtgtggtggaggatgtctgtgtcatggagacctggaacccagagaaggctgccagttggaaccaggcccccaaactccactactgcctggactatgactgtcagaaggcagaattgtttgtgactcgcctggaagctgtgaccagcaaccacgacggaggctgtgactgctacgtccaagggagtgtggccaataggaccggctctgtggaggctcagacagccctaaagaagcggcagctgcacaccacctgggaggagggcctggtgctccccctggcggaggaggagctccccacagccaccctgacgctgaccttgaggacctgcgaccgcttctcccgtcacagcgtggccggggagctccgcctgggcctggacgggacatctgtgcctctaggggctgcccagtggggcgagctgaagacttcagcgaaggagccatctgcaggagctggagaggtcctactatccatcagctacctcccggctgccaaccgcctcctggtggtgctgattaaagccaagaacctccactctaaccagtccaaggagctcctggggaaggatgtctctgtcaaggtgaccttgaagcaccaggctcggaagctgaagaagaagcagactaaacgagctaagcacaagatcaaccccgtgtggaacgagatgatcatgtttgagctgcctgacgacctgctgcaggcctccagtgtggagctggaagtgctgggccaggacgattcagggcagagctgtgcgcttggccactgcagcctgggcctgcacacctcgggctctgagcgcagccactgggaggagatgctcaaaaaccctcgccggcagattgccatgtggcaccagctgcacctgtaaccagctgcccagctgcctcccttcttggacagccctgacccgtcctctgcaacctcctttctgtgcccctttcctcattctgacacccagaagacagtgacagatgtgtttgcaaggctgggatggctctctcatcatactcttgtttcttagaaataagcaagacagagcaggaaatggaatatgcgggtcacactgaggaatgcattttgctcatctgtgttattgaaggaggtgcttattaaatacagttcctatgcctgttttataggtggggttaggccagatgcagagaaagctaaatgtgggaatcatggatgcaaagaagaatttggctttttgaaaaacaag

SEQ ID NO: 188201 - DNA, 5094 bp, Homo sapiens
  Payload ID: 17036
  Gene Symbol: SYT14
  Gene Name: synaptotagmin XIV
  Uniprot ID: Q8NB59
  ENST ID: ENST00000367015
  CDS Start-End: 292-1845
gtggagtacatgaacttatctgtattagaaaagaatctggaatctgagtgcatgctgatctcccattgacttctgttctattactgtaccccatcagagagatgtgaggagttggttgaaattcaaatcgggaacatatccaaagaccacaacatcctttgacaccaacaactgtctatgcttccttagaaggagccacctgacaactgggtggttcaacaaagtggccccaggaaagtatctccagaggcagttggatttttgtcagctgttggggtgtttattatcttgatgctgctcctttttctctatattaataagaagttctgttttgaaaatgttggcgggtttccagatcttggttcagaatacagtacaaggaagaattcacaagataaaatttataattcctacatggacaaagatgagcatggttcatcctctgaaagtgaagatgaagcgctgggtaaatatcatgaggccttatccagaacacacaattccagactaccactggcagattctagacaaaggaactatgcttgggaaacaaggcagaaatacagtcctctatcggcagagtatgatggatacagtagtgaagcatcaatagatgaaggaaactgcattcagagaatgagaagaacacccccgctggatgaattgcagccaccaccatatcaggatgacagtggttctccccatctgtcatgtacaccctcagaaattggggacagtaaatgtgaattttcccactgcagcaacagtccaagatgctcatataacaagtgcccaagtgaaggaagcacaggtcatgaaatagaaagttttcataataaaggatatgaagaagatgttccaagtgacagcactgcagtcctgagccctgaagatatgtcagctcaaggatcatcttcgcagcttcctaaaccttttgatcctgagccagaagctaaatatggcacactggatgtgacttttgactatgactcacaagaacagaagcttctggtaacagtgacagctgtcacagacatcccaacatataacaggacaggtggcaactcatggcaagtacaccttgttcttctacctataaagaaacagagagcaaaaaccagcatccagagaggaccatgccctgtcttcacagaaacatttaaatttaatcatgttgaatctgagatgattggaaattatgcagttcggtttagactgtatggtgtacatcgcatgaaaaaagaaaagattgtgggggaaaagattttttatttaacaaaattgaatcttcaagggaaaatgtcattgcctgtgatattggaaccttcttacaatcattctggctgtgactcccaaatgagcgtgtcagaaatgtcgtgtagtgaaagtacatcctcatgtcagtctcttgaacatggctcagttccagaaattcttattggcctgctttataatgccacaactggaagactatcagcagaagtgataaaaggcagccacttcaaaaatttggcagcaaacagaccacccaatacatatgttaagttaactctactgaattccatgggtcaagagatgtccaaatgcaagacatccatccgcagagggcagccaaatccagtatataaggaaacttttgtctttcaagtggccctatttcagctttctgatgtgacactcatactgtctgtgtataacaaacgcagcatgaaaagaaaagagatgataggctggatttctttaggtctcaacagctctggagaagaagaactcaatcactggactgaaatgaaagagtcaaaaggacagcaagtatgtagatggcatgcgttgctagagtcatgatgaatagaataagcaagcagttaccatcaaaggcagcatatttccaattccaacattactgtttctaccaagtcccattagaagagctgttctttgaagaatcatattcaaccttctaccaaaatgctttaagttctatggaaagaacgtctcatactgacataaatgaagaaaatatgtgtatctagtagagcttgtttaggaaactgagaaacgtacactatcattgctaaactaacagtcctccagaaatttaataagatgtttttgatttgaagttaattttaatttagcaaaagagccagtcattttatgaaaaatcaaaattataagtgattttaaaaaccagaattttagttgcaatacaattttaatatcaccctacatattatttataaaacatagtttgactggccagtccctggtgtttgtaatgttctttaatatgaaaaagtagttctccaactctatcataagtcatatctaatggtgaagggtttcagtcacattgaaaattgttttatttcaggcatgttccctttgtgcacttaggttcattgtgcctcagttcctctcaaaagcactaaatctaagtgcaaacaagtattcattttcatacaggaatttttttaatatgttatttttttaaaagttcatttttcatttgcctccgctttcgcctgatccaaagagaccaagtcactgtactggtcccttgcaagtcttctagacaggttgtactgtagaactacgtaactttctgttgaaagcacttcctgtattcttgtattccaatgtaggaagctaatagagcaggactttactttcaaatttctttcagtgattgactcttcaaaattgcagtagtgtgaaaatacattttttacaaactgaaaatacagtagataagctgtcgaaaatggaaaacaattcaattttaattttctgctctgagtatttagtaaccaacactgcgtaaagcaggtagcattcaaaataagaaactgttctctctctaaatcttcactcttacttcaatttatatttgtgatatgaagactatccagttctcagtttgaattggaacatcatgttaaaaacagttatgagattccttatgaagtttctagtaacttgtaactagactttatgaaattaacagataaagttcttcaacgtgatgtcatcttgtgcctttcatgtaagttaaatttgctcatacagcttgaacgttgtatttgcaaaattaagccttcgatttttataaatgtaaagattcctcagaacagtgtcgcaagatctttatttcctctgaagtatgtaaaagttgtataatgtgctaactttttaatggcaaggcactttcatttgtttttatatttaggaactctaatcaggaatattataagctgttttctttttaattttgcttcttacctaatatatcattttatgcatatactttatcagagtatgttttatatatattaaaaatagtttcttttttctccttctcatttctagttaaaatagacaaaaacatactatttaccagttactaaaaagcagtatatcattgcttctagtcccaactaagtactatatattattgtaaactagaacttgttattaccataataacaaaacaatgcgtagatattacttcagcttggctgtactgaaaggccttaaaagaaacccaaaaagaccgtgaacttctgtatttttttagtttaaaaaatggcagctctatgcattcatacacatgaattataagaaaaaatacaaatgctatattggatgacatgaggtttgagaatgtgtgttacagggctgcattaaagggaaaaatccatcttttattgttacatcaatgagctttttccaggatttttcaaataaacaagtaagagttagaacctgaatcaaatggcaaaatatctcatttaagtgttttcagcaacagtatgaaaaaagacttgaagaggggatgtagattttactgagaaattggacttaggcatttgaagctataatgaactttttagactttgaaacaactgactgcattgctaacaactgttatcttcctaataaaaagagttatcagtcttatctgtaactgtaacagagcttagtgaaacacattagtaagaccagcttggtgctttcactcttagtgagaaaaagacctaactaattgttatttgttaaatctaccttttttcagactattcccagaattgtgtgtgtgatttgatacatccctagggatttatctggcataagtatcaaatccttcatggcttaaaaattaataaacagttttttaatatttctggaaagaccctacctccaccccagctgccaagtcctcaaagattataaattatctatatgagtgtatgtatctgtatacacacatgcaccattacacatacaacataaatatgtatatgtatattcatttgtaaaggcaaaggtgccctggctttttcagataactgaatagaaaaacatttcatacatttaggattatttttctcctctatgtatttactagatattatatttggtttgggttgctttctgctgctgttctccttcacacacagcaaaatatacatttgtttctgtagattgacacaacttataataattactcccaaaaagttgtctgttcttttagaaaaggattaaataaggctcaggggacccacttcactctactgaatctaatgtacgagacagtactactgcttctttgtgtgcttgaatttgcatgaaagcttaatagcaaaatcttctatctcagtaattatagcaaatagggacctactggtagggagcaggtgttggctcagaaacctgaaaaagacaacccactttcatacagttctattaaaatcccctaagttttctaataaaatgatatagtccaaatatggcaatcgactggcatttatgggagcctctaaacctggaattatggggtttatttttctcccaaatgagctgcaaaagataattattgctgcccagtaaacaaaatgtatgtcaaatcagtaaagaatttgtttagcataatattgccttatctttcagaagctttcttctatattcttgtgtcttcagtacaatccacttttgtttgaaatccatttgcatattatcttactgtgcatttagtgaattctcaataatgttgtatttgctgacaagaataataaattggaccacaattaaaaa

SEQ ID NO: 188202 - DNA, 2997 bp, Homo sapiens
  Payload ID: 17036
  Gene Symbol: SYT14
  Gene Name: synaptotagmin XIV
  Uniprot ID: Q8NB59
  ENST ID: ENST00000367019
  CDS Start-End: 92-1816
ccctctcgctggcggactcagcgcgtcctccgccagccctcgcgtctgctgcccccgccatccagttggtgcggtccatggcgagcgcatcatggcgattgaaggtggagagagaacctgtggagtacatgaacttatctgtattagaaaagtatctccagaggcagttggatttttgtcagctgttggggtgtttattatcttgatgctgctcctttttctctatattaataagaagttctgttttgaaaatgttggcgggtttccagatcttggttcagaatacagtacaaggaagaattcacaagataaaatttataattcctacatggacaaagatgagcatggttcatcctctgaaagtgaagatgaagcgctgggtaaatatcatgaggccttatccagaacacacaattccagactaccactggcagattctagacaaaggaactatgcttgggaaacaaggcagaaatacagtcctctatcggcagagtatgatggatacagtagtgaagcatcaatagatgaaggaaactgcattcagagaatgagaagaacacccccgctggatgaattgcagccaccaccatatcaggatgacagtggttctccccatctgtcatgtacaccctcagaaattggggacagtaaatgtgaattttcccactgcagcaacagtccaagatgctcatataacaagtgcccaagtgaaggaagcacaggtcatgaaatagaaagttttcataataaaggatatgaagaagatgttccaagtgacagcactgcagtcctgagccctgaagatatgtcagctcaaggatcatcttcgcagcttcctaaaccttttgatcctgagccagaagctaaatatggcacactggatgtgacttttgactatgactcacaagaacagaagcttctggtaacagtgacagctgtcacagacatcccaacatataacaggacaggtggcaactcatggcaagtacaccttgttcttctacctataaagaaacagagagcaaaaaccagcatccagagaggaccatgccctgtcttcacagaaacatttaaatttaatcatgttgaatctgagatgattggaaattatgcagttcggtttagactgtatggtgtacatcgcatgaaaaaagaaaagattgtgggggaaaagattttttatttaacaaaattgaatcttcaagggaaaatgtcattgcctgtgatattggaaccttcttacaatcattctggctgtgactcccaaatgagcgtgtcagaaatgtcgtgtagtgaaagtacatcctcatgtcagtctcttgaacatggctcagttccagaaattcttattggcctgctttataatgccacaactggaagactatcagcagaagtgataaaaggcagccacttcaaaaatttggcagcaaacagaccacccaatggactgttctgttgtctaaaacacttgataggtggacaggtttatataatccgagatacatatgttaagttaactctactgaattccatgggtcaagagatgtccaaatgcaagacatccatccgcagagggcagccaaatccagtatataaggaaacttttgtctttcaagtggccctatttcagctttctgatgtgacactcatactgtctgtgtataacaaacgcagcatgaaaagaaaagagatgataggctggatttctttaggtctcaacagctctggagaagaagaactcaatcactggactgaaatgaaagagtcaaaaggacagcaagtatgtagatggcatgcgttgctagagtcatgatgaatagaataagcaagcagttaccatcaaaggcagcatatttccaattccaacattactgtttctaccaagtcccattagaagagctgttctttgaagaatcatattcaaccttctaccaaaatgctttaagttctatggaaagaacgtctcatactgacataaatgaagaaaatatgtgtatctagtagagcttgtttaggaaactgagaaacgtacactatcattgctaaactaacagtcctccagaaatttaataagatgtttttgatttgaagttaattttaatttagcaaaagagccagtcattttatgaaaaatcaaaattataagtgattttaaaaaccagaattttagttgcaatacaattttaatatcaccctacatattatttataaaacatagtttgactggccagtccctggtgtttgtaatgttctttaatatgaaaaagtagttctccaactctatcataagtcatatctaatggtgaagggtttcagtcacattgaaaattgttttatttcaggcatgttccctttgtgcacttaggttcattgtgcctcagttcctctcaaaagcactaaatctaagtgcaaacaagtattcattttcatacaggaatttttttaatatgttatttttttaaaagttcatttttcatttgcctccgctttcgcctgatccaaagagaccaagtcactgtactggtcccttgcaagtcttctagacaggttgtactgtagaactacgtaactttctgttgaaagcacttcctgtattcttgtattccaatgtaggaagctaatagagcaggactttactttcaaatttctttcagtgattgactcttcaaaattgcagtagtgtgaaaatacattttttacaaactgaaaatacagtagataagctgtcgaaaatggaaaacaattcaattttaattttctgctctgagtatttagtaaccaacactgcgtaaagcaggtagcattcaaaataagaaactgttctctctctaaatcttcactcttacttcaatttatatttgtgatatgaagactatccagttctcagtttgaattggaacatcatgttaaaaacagttatgagattccttatgaagtttctagtaacttgtaactagactttatgaaattaacagataaagttcttcaacgtga

SEQ ID NO: 188203 - DNA, 2966 bp, Homo sapiens
  Payload ID: 17036
  Gene Symbol: SYT14
  Gene Name: synaptotagmin XIV
  Uniprot ID: Q8NB59
  ENST ID: ENST00000472886
  CDS Start-End: 15-1682
atggcgagcgcatcatggcgattgaaggtggagagagaacctgtggagtacatgaacttatctgtattagaaaagtatctccagaggcagttggatttttgtcagctgttggggtgtttattatcttgatgctgctcctttttctctatattaataagaagttctgttttgaaaatgttggcgggtttccagatcttggttcagaatacagtacaaggaagaattcacaagataaaatttataattcctacatggacaaagatgagcatggttcatcctctgaaagtgaagatgaagcgctgggtaaatatcatgaggccttatccagaacacacaattccagactaccactggcagattctagacaaaggaactatgcttgggaaacaaggcagaaatacagtcctctatcggcagagtatgatggatacagtagtgaagcatcaatagatgaaggaaactgcattcagagaatgagaagaacacccccgctggatgaattgcagccaccaccatatcaggatgacagtggttctccccatctgtcatgtacaccctcagaaattggggacagtaaatgtgaattttcccactgcagcaacagtccaagatgctcatataacaagtgcccaagtgaaggaagcacaggtcatgaaatagaaagttttcataataaaggatatgaagaagatgttccaagtgacagcactgcagtcctgagccctgaagatatgtcagctcaaggatcatcttcgcagcttcctaaaccttttgatcctgagccagaagctaaatatggcacactggatgtgacttttgactatgactcacaagaacagaagcttctggtaacagtgacagctgtcacagacatcccaacatataacaggacaggtggcaactcatggcaagtacaccttgttcttctacctataaagaaacagagagcaaaaaccagcatccagagaggaccatgccctgtcttcacagaaacatttaaatttaatcatgttgaatctgagatgattggaaattatgcagttcggtttagactgtatggtgtacatcgcatgaaaaaagaaaagattgtgggggaaaagattttttatttaacaaaattgaatcttcaagggaaaatgtcattgcctgtgatattggaaccttcttacaatcattctggctgtgactcccaaatgagcgtgtcagaaatgtcgtgtagtgaaagtacatcctcatgtcagtctcttgaacatggctcagttccagaaattcttattggcctgctttataatgccacaactggaagactatcagcagaagtgataaaaggcagccacttcaaaaatttggcagcaaacagaccacccaatacatatgttaagttaactctactgaattccatgggtcaagagatgtccaaatgcaagacatccatccgcagagggcagccaaatccagtatataaggaaacttttgtctttcaagtggccctatttcagctttctgatgtgacactcatactgtctgtgtataacaaacgcagcatgaaaagaaaagagatgataggctggatttctttaggtctcaacagctctggagaagaagaactcaatcactggactgaaatgaaagagtcaaaaggacagcaagtatgtagatggcatgcgttgctagagtcatgatgaatagaataagcaagcagttaccatcaaaggcagcatatttccaattccaacattactgtttctaccaagtcccattagaagagctgttctttgaagaatcatattcaaccttctaccaaaatgctttaagttctatggaaagaacgtctcatactgacataaatgaagaaaatatgtgtatctagtagagcttgtttaggaaactgagaaacgtacactatcattgctaaactaacagtcctccagaaatttaataagatgtttttgatttgaagttaattttaatttagcaaaagagccagtcattttatgaaaaatcaaaattataagtgattttaaaaaccagaattttagttgcaatacaattttaatatcaccctacatattatttataaaacatagtttgactggccagtccctggtgtttgtaatgttctttaatatgaaaaagtagttctccaactctatcataagtcatatctaatggtgaagggtttcagtcacattgaaaattgttttatttcaggcatgttccctttgtgcacttaggttcattgtgcctcagttcctctcaaaagcactaaatctaagtgcaaacaagtattcattttcatacaggaatttttttaatatgttatttttttaaaagttcatttttcatttgcctccgctttcgcctgatccaaagagaccaagtcactgtactggtcccttgcaagtcttctagacaggttgtactgtagaactacgtaactttctgttgaaagcacttcctgtattcttgtattccaatgtaggaagctaatagagcaggactttactttcaaatttctttcagtgattgactcttcaaaattgcagtagtgtgaaaatacattttttacaaactgaaaatacagtagataagctgtcgaaaatggaaaacaattcaattttaattttctgctctgagtatttagtaaccaacactgcgtaaagcaggtagcattcaaaataagaaactgttctctctctaaatcttcactcttacttcaatttatatttgtgatatgaagactatccagttctcagtttgaattggaacatcatgttaaaaacagttatgagattccttatgaagtttctagtaacttgtaactagactttatgaaattaacagataaagttcttcaacgtgatgtcatcttgtgcctttcatgtaagttaaatttgctcatacagcttgaacgttgtatttgcaaaattaagccttcgatttttataaatgtaaagattcctcag

SEQ ID NO: 188204 - DNA, 5208 bp, Homo sapiens
  Payload ID: 17036
  Gene Symbol: SYT14
  Gene Name: synaptotagmin XIV
  Uniprot ID: Q8NB59
  ENST ID: ENST00000537238
  CDS Start-End: 411-1964
ccctctcgctggcggactcagcgcgtcctccgccagccctcgcgtctgctgcccccgccatccagttggtgcggtccatggcgagcgcatcatggcgattgaaggtggagagagaacctgtggagtacatgaacttatctgtattagaaaagaatctggaatctgagtgcatgctgatctcccattgacttctgttctattactgtaccccatcagagagatgtgaggagttggttgaaattcaaatcgggaacatatccaaagaccacaacatcctttgacaccaacaactgtctatgcttccttagaaggagccacctgacaactgggtggttcaacaaagtggccccaggaaagtatctccagaggcagttggatttttgtcagctgttggggtgtttattatcttgatgctgctcctttttctctatattaataagaagttctgttttgaaaatgttggcgggtttccagatcttggttcagaatacagtacaaggaagaattcacaagataaaatttataattcctacatggacaaagatgagcatggttcatcctctgaaagtgaagatgaagcgctgggtaaatatcatgaggccttatccagaacacacaattccagactaccactggcagattctagacaaaggaactatgcttgggaaacaaggcagaaatacagtcctctatcggcagagtatgatggatacagtagtgaagcatcaatagatgaaggaaactgcattcagagaatgagaagaacacccccgctggatgaattgcagccaccaccatatcaggatgacagtggttctccccatctgtcatgtacaccctcagaaattggggacagtaaatgtgaattttcccactgcagcaacagtccaagatgctcatataacaagtgcccaagtgaaggaagcacaggtcatgaaatagaaagttttcataataaaggatatgaagaagatgttccaagtgacagcactgcagtcctgagccctgaagatatgtcagctcaaggatcatcttcgcagcttcctaaaccttttgatcctgagccagaagctaaatatggcacactggatgtgacttttgactatgactcacaagaacagaagcttctggtaacagtgacagctgtcacagacatcccaacatataacaggacaggtggcaactcatggcaagtacaccttgttcttctacctataaagaaacagagagcaaaaaccagcatccagagaggaccatgccctgtcttcacagaaacatttaaatttaatcatgttgaatctgagatgattggaaattatgcagttcggtttagactgtatggtgtacatcgcatgaaaaaagaaaagattgtgggggaaaagattttttatttaacaaaattgaatcttcaagggaaaatgtcattgcctgtgatattggaaccttcttacaatcattctggctgtgactcccaaatgagcgtgtcagaaatgtcgtgtagtgaaagtacatcctcatgtcagtctcttgaacatggctcagttccagaaattcttattggcctgctttataatgccacaactggaagactatcagcagaagtgataaaaggcagccacttcaaaaatttggcagcaaacagaccacccaatacatatgttaagttaactctactgaattccatgggtcaagagatgtccaaatgcaagacatccatccgcagagggcagccaaatccagtatataaggaaacttttgtctttcaagtggccctatttcagctttctgatgtgacactcatactgtctgtgtataacaaacgcagcatgaaaagaaaagagatgataggctggatttctttaggtctcaacagctctggagaagaagaactcaatcactggactgaaatgaaagagtcaaaaggacagcaagtatgtagatggcatgcgttgctagagtcatgatgaatagaataagcaagcagttaccatcaaaggcagcatatttccaattccaacattactgtttctaccaagtcccattagaagagctgttctttgaagaatcatattcaaccttctaccaaaatgctttaagttctatggaaagaacgtctcatactgacataaatgaagaaaatatgtgtatctagtagagcttgtttaggaaactgagaaacgtacactatcattgctaaactaacagtcctccagaaatttaataagatgtttttgatttgaagttaattttaatttagcaaaagagccagtcattttatgaaaaatcaaaattataagtgattttaaaaaccagaattttagttgcaatacaattttaatatcaccctacatattatttataaaacatagtttgactggccagtccctggtgtttgtaatgttctttaatatgaaaaagtagttctccaactctatcataagtcatatctaatggtgaagggtttcagtcacattgaaaattgttttatttcaggcatgttccctttgtgcacttaggttcattgtgcctcagttcctctcaaaagcactaaatctaagtgcaaacaagtattcattttcatacaggaatttttttaatatgttatttttttaaaagttcatttttcatttgcctccgctttcgcctgatccaaagagaccaagtcactgtactggtcccttgcaagtcttctagacaggttgtactgtagaactacgtaactttctgttgaaagcacttcctgtattcttgtattccaatgtaggaagctaatagagcaggactttactttcaaatttctttcagtgattgactcttcaaaattgcagtagtgtgaaaatacattttttacaaactgaaaatacagtagataagctgtcgaaaatggaaaacaattcaattttaattttctgctctgagtatttagtaaccaacactgcgtaaagcaggtagcattcaaaataagaaactgttctctctctaaatcttcactcttacttcaatttatatttgtgatatgaagactatccagttctcagtttgaattggaacatcatgttaaaaacagttatgagattccttatgaagtttctagtaacttgtaactagactttatgaaattaacagataaagttcttcaacgtgatgtcatcttgtgcctttcatgtaagttaaatttgctcatacagcttgaacgttgtatttgcaaaattaagccttcgatttttataaatgtaaagattcctcagaacagtgtcgcaagatctttatttcctctgaagtatgtaaaagttgtataatgtgctaactttttaatggcaaggcactttcatttgtttttatatttaggaactctaatcaggaatattataagctgttttctttttaattttgcttcttacctaatatatcattttatgcatatactttatcagagtatgttttatatatattaaaaatagtttcttttttctccttctcatttctagttaaaatagacaaaaacatactatttaccagttactaaaaagcagtatatcattgcttctagtcccaactaagtactatatattattgtaaactagaacttgttattaccataataacaaaacaatgcgtagatattacttcagcttggctgtactgaaaggccttaaaagaaacccaaaaagaccgtgaacttctgtatttttttagtttaaaaaatggcagctctatgcattcatacacatgaattataagaaaaaatacaaatgctatattggatgacatgaggtttgagaatgtgtgttacagggctgcattaaagggaaaaatccatcttttattgttacatcaatgagctttttccaggatttttcaaataaacaagtaagagttagaacctgaatcaaatggcaaaatatctcatttaagtgttttcagcaacagtatgaaaaaagacttgaagaggggatgtagattttactgagaaattggacttaggcatttgaagctataatgaactttttagactttgaaacaactgactgcattgctaacaactgttatcttcctaataaaaagagttatcagtcttatctgtaactgtaacagagcttagtgaaacacattagtaagaccagcttggtgctttcactcttagtgagaaaaagacctaactaattgttatttgttaaatctaccttttttcagactattcccagaattgtgtgtgtgatttgatacatccctagggatttatctggcataagtatcaaatccttcatggcttaaaaattaataaacagttttttaatatttctggaaagaccctacctccaccccagctgccaagtcctcaaagattataaattatctatatgagtgtatgtatctgtatacacacatgcaccattacacatacaacataaatatgtatatgtatattcatttgtaaaggcaaaggtgccctggctttttcagataactgaatagaaaaacatttcatacatttaggattatttttctcctctatgtatttactagatattatatttggtttgggttgctttctgctgctgttctccttcacacacagcaaaatatacatttgtttctgtagattgacacaacttataataattactcccaaaaagttgtctgttcttttagaaaaggattaaataaggctcaggggacccacttcactctactgaatctaatgtacgagacagtactactgcttctttgtgtgcttgaatttgcatgaaagcttaatagcaaaatcttctatctcagtaattatagcaaatagggacctactggtagggagcaggtgttggctcagaaacctgaaaaagacaacccactttcatacagttctattaaaatcccctaagttttctaataaaatgatatagtccaaatatggcaatcgactggcatttatgggagcctctaaacctggaattatggggtttatttttctcccaaatgagctgcaaaagataattattgctgcccagtaaacaaaatgtatgtcaaatcagtaaagaatttgtttagcataatattgccttatctttcagaagctttcttctatattcttgtgtcttcagtacaatccacttttgtttgaaatccatttgcatattatcttactgtgcatttagtgaattctcaataatgttgtatttgctgacaagaataataaattggaccacaatt

SEQ ID NO: 188205 - DNA, 3438 bp, Homo sapiens
  Payload ID: 17036
  Gene Symbol: SYT14
  Gene Name: synaptotagmin XIV
  ENST ID: ENST00000534859
  CDS Start-End: 1-1513
ctacatggacaaagatgagcatggttcatcctctgaaagtgaagatgaagcgctgggtaaatatcatgaggccttatccagaacacacaattccagactaccactggcagattctagacaaaggaactatgcttgggaaacaaggcagaaatacagtcctctatcggcagagtatgatggatacagtagtgaagcatcaatagatgaaggaaactgcattcagagaatgagaagaacacccccgctggatgaattgcagccaccaccatatcaggatgacagtggttctccccatctgtcatgtacaccctcagaaattggggacagtaaatgtgaattttcccactgcagcaacagtccaagatgctcatataacaagtgcccaagtgaaggaagcacaggtcatgaaatagaaagttttcataataaaggatatgaagaagatgttccaagtgacagcactgcagtcctgagccctgaagatatgtcagctcaaggatcatcttcgcagcttcctaaaccttttgatcctgagccagaagctaaatatggcacactggatgtgacttttgactatgactcacaagaacagaagcttctggtaacagtgacagctgtcacagacatcccaacatataacaggacaggtggcaactcatggcaagtacaccttgttcttctacctataaagaaacagagagcaaaaaccagcatccagagaggaccatgccctgtcttcacagaaacatttaaatttaatcatgttgaatctgagatgattggaaattatgcagttcggtttagactgtatggtgtacatcgcatgaaaaaagaaaagattgtgggggaaaagattttttatttaacaaaattgaatcttcaagggaaaatgtcattgcctgtgatattggaaccttcttacaatcattctggctgtgactcccaaatgagcgtgtcagaaatgtcgtgtagtgaaagtacatcctcatgtcagtctcttgaacatggctcagttccagaaattcttattggcctgctttataatgccacaactggaagactatcagcagaagtgataaaaggcagccacttcaaaaatttggcagcaaacagaccacccactttccaccccctgttgtcagatggactgttctgttgtctaaaacacttgataggtggacaggtttatataatccgagatacatatgttaagttaactctactgaattccatgggtcaagagatgtccaaatgcaagacatccatccgcagagggcagccaaatccagtatataaggaaacttttgtctttcaagtggccctatttcagctttctgatgtgacactcatactgtctgtgtataacaaacgcagcatgaaaagaaaagagatgataggctggatttctttaggtctcaacagctctggagaagaagaactcaatcactggactgaaatgaaagagtcaaaaggacagcaagtatgtagatggcatgcgttgctagagtcatgatgaatagaataagcaagcagttaccatcaaaggcagcatatttccaattccaacattactgtttctaccaagtcccattagaagagctgttctttgaagaatcatattcaaccttctaccaaaatgctttaagttctatggaaagaacgtctcatactgacataaatgaagaaaatatgtgtatctagtagagcttgtttaggaaactgagaaacgtacactatcattgctaaactaacagtcctccagaaatttaataagatgtttttgatttgaagttaattttaatttagcaaaagagccagtcattttatgaaaaatcaaaattataagtgattttaaaaaccagaattttagttgcaatacaattttaatatcaccctacatattatttataaaacatagtttgactggccagtccctggtgtttgtaatgttctttaatatgaaaaagtagttctccaactctatcataagtcatatctaatggtgaagggtttcagtcacattgaaaattgttttatttcaggcatgttccctttgtgcacttaggttcattgtgcctcagttcctctcaaaagcactaaatctaagtgcaaacaagtattcattttcatacaggaatttttttaatatgttatttttttaaaagttcatttttcatttgcctccgctttcgcctgatccaaagagaccaagtcactgtactggtcccttgcaagtcttctagacaggttgtactgtagaactacgtaactttctgttgaaagcacttcctgtattcttgtattccaatgtaggaagctaatagagcaggactttactttcaaatttctttcagtgattgactcttcaaaattgcagtagtgtgaaaatacattttttacaaactgaaaatacagtagataagctgtcgaaaatggaaaacaattcaattttaattttctgctctgagtatttagtaaccaacactgcgtaaagcaggtagcattcaaaataagaaactgttctctctctaaatcttcactcttacttcaatttatatttgtgatatgaagactatccagttctcagtttgaattggaacatcatgttaaaaacagttatgagattccttatgaagtttctagtaacttgtaactagactttatgaaattaacagataaagttcttcaacgtgatgtcatcttgtgcctttcatgtaagttaaatttgctcatacagcttgaacgttgtatttgcaaaattaagccttcgatttttataaatgtaaagattcctcagaacagtgtcgcaagatctttatttcctctgaagtatgtaaaagttgtataatgtgctaactttttaatggcaaggcactttcatttgtttttatatttaggaactctaatcaggaatattataagctgttttctttttaattttgcttcttacctaatatatcattttatgcatatactttatcagagtatgttttatatatattaaaaatagtttcttttttctccttctcatttctagttaaaatagacaaaaacatactatttaccagttactaaaaagcagtatatcattgcttctagtcccaactaagtactatatattattgtaaactagaacttgttattaccataataacaaaacaatgcgtagatattacttcagcttggctgtactgaaaggccttaaaagaaacccaaaaagaccgtgaacttctgtatttttttagtttaaaaaatggcagctctatgcattcatacacatgaattataagaaaaaatacaaatgctatattggatgacatgaggtttgagaatgtgtgttacagggctgcattaaagggaaaaatccatcttttattgttacatcaatgagctttttccaggatttttcaaataaacaagtaagagttagaacctgaa

SEQ ID NO: 188206 - DNA, 11880 bp, Homo sapiens
  Payload ID: 17036
  Gene Symbol: SYT14
  Gene Name: synaptotagmin XIV
  Uniprot ID: Q8NB59
  ENST ID: ENST00000399639
  CDS Start-End: 325-1122
gcatcatggcgattgaaggtggagagagaacctgtggagtacatgaacttatctgtattagaaaagaatctggaatctgagtgcatgctgatctcccattgacttctgttctattactgtaccccatcagagagatgtgaggagttggttgaaattcaaatcgggaacatatccaaagaccacaacatcctttgacaccaacaactgtctatgcttccttagaaggagccacctgacaactgggtggttcaacaaagtggccccaggaaagtatctccagaggcagttggatttttgtcagctgttggggtgtttattatcttgatgctgctcctttttctctatattaataagaagttctgttttgaaaatgttggcgggtttccagatcttggttcagaatacagtacaaggaagaattcacaagataaaatttataattcctacatggacaaagatgagcatggttcatcctctgaaagtgaagatgaagcgctgggtaaatatcatgaggccttatccagaacacacaattccagactaccactggcagattctagacaaaggaactatgcttgggaaacaaggcagaaatacagtcctctatcggcagagtatgatggatacagtagtgaagcatcaatagatgaaggaaactgcattcagagaatgagaagaacacccccgctggatgaattgcagccaccaccatatcaggatgacagtggttctccccatctgtcatgtacaccctcagaaattggggacagtaaatgtgaattttcccactgcagcaacagtccaagatgctcatataacaagtgcccaagtgaaggaagcacaggtcatgaaatagaaagttttcataataaaggatatgaagaagatgttccaagtgacagcactgcagtcctgagccctgaagatatgtcagctcaaggatcatcttcgcagcttcctaaaccttttgatcctgagccagaagctaaatatggcacactggatgtgacttttgactatgactcacaagaacagaagcttctggtaacagtgacagctgtcacagacatcccaacatataacaggacaggtggcaactcatgggctgtgactcccaaatgagcgtgtcagaaatgtcgtgtagtgaaagtacatcctcatgtcagtctcttgaacatggctcagttccagaaattcttattggcctgctttataatgccacaactggaagactatcagcagaagtgataaaaggcagccacttcaaaaatttggcagcaaacagaccacccaatacatatgttaagttaactctactgaattccatgggtcaagagatgtccaaatgcaagacatccatccgcagagggcagccaaatccagtatataaggaaacttttgtctttcaagtggccctatttcagctttctgatgtgacactcatactgtctgtgtataacaaacgcagcatgaaaagaaaagagatgataggctggatttctttaggtctcaacagctctggagaagaagaactcaatcactggactgaaatgaaagagtcaaaaggacagcaagtatgtagatggcatgcgttgctagagtcatgatgaatagaataagcaagcagttaccatcaaaggcagcatatttccaattccaacattactgtttctaccaagtcccattagaagagctgttctttgaagaatcatattcaaccttctaccaaaatgctttaagttctatggaaagaacgtctcatactgacataaatgaagaaaatatgtgtatctagtagagcttgtttaggaaactgagaaacgtacactatcattgctaaactaacagtcctccagaaatttaataagatgtttttgatttgaagttaattttaatttagcaaaagagccagtcattttatgaaaaatcaaaattataagtgattttaaaaaccagaattttagttgcaatacaattttaatatcaccctacatattatttataaaacatagtttgactggccagtccctggtgtttgtaatgttctttaatatgaaaaagtagttctccaactctatcataagtcatatctaatggtgaagggtttcagtcacattgaaaattgttttatttcaggcatgttccctttgtgcacttaggttcattgtgcctcagttcctctcaaaagcactaaatctaagtgcaaacaagtattcattttcatacaggaatttttttaatatgttatttttttaaaagttcatttttcatttgcctccgctttcgcctgatccaaagagaccaagtcactgtactggtcccttgcaagtcttctagacaggttgtactgtagaactacgtaactttctgttgaaagcacttcctgtattcttgtattccaatgtaggaagctaatagagcaggactttactttcaaatttctttcagtgattgactcttcaaaattgcagtagtgtgaaaatacattttttacaaactgaaaatacagtagataagctgtcgaaaatggaaaacaattcaattttaattttctgctctgagtatttagtaaccaacactgcgtaaagcaggtagcattcaaaataagaaactgttctctctctaaatcttcactcttacttcaatttatatttgtgatatgaagactatccagttctcagtttgaattggaacatcatgttaaaaacagttatgagattccttatgaagtttctagtaacttgtaactagactttatgaaattaacagataaagttcttcaacgtgatgtcatcttgtgcctttcatgtaagttaaatttgctcatacagcttgaacgttgtatttgcaaaattaagccttcgatttttataaatgtaaagattcctcagaacagtgtcgcaagatctttatttcctctgaagtatgtaaaagttgtataatgtgctaactttttaatggcaaggcactttcatttgtttttatatttaggaactctaatcaggaatattataagctgttttctttttaattttgcttcttacctaatatatcattttatgcatatactttatcagagtatgttttatatatattaaaaatagtttcttttttctccttctcatttctagttaaaatagacaaaaacatactatttaccagttactaaaaagcagtatatcattgcttctagtcccaactaagtactatatattattgtaaactagaacttgttattaccataataacaaaacaatgcgtagatattacttcagcttggctgtactgaaaggccttaaaagaaacccaaaaagaccgtgaacttctgtatttttttagtttaaaaaatggcagctctatgcattcatacacatgaattataagaaaaaatacaaatgctatattggatgacatgaggtttgagaatgtgtgttacagggctgcattaaagggaaaaatccatcttttattgttacatcaatgagctttttccaggatttttcaaataaacaagtaagagttagaacctgaatcaaatggcaaaatatctcatttaagtgttttcagcaacagtatgaaaaaagacttgaagaggggatgtagattttactgagaaattggacttaggcatttgaagctataatgaactttttagactttgaaacaactgactgcattgctaacaactgttatcttcctaataaaaagagttatcagtcttatctgtaactgtaacagagcttagtgaaacacattagtaagaccagcttggtgctttcactcttagtgagaaaaagacctaactaattgttatttgttaaatctaccttttttcagactattcccagaattgtgtgtgtgatttgatacatccctagggatttatctggcataagtatcaaatccttcatggcttaaaaattaataaacagttttttaatatttctggaaagaccctacctccaccccagctgccaagtcctcaaagattataaattatctatatgagtgtatgtatctgtatacacacatgcaccattacacatacaacataaatatgtatatgtatattcatttgtaaaggcaaaggtgccctggctttttcagataactgaatagaaaaacatttcatacatttaggattatttttctcctctatgtatttactagatattatatttggtttgggttgctttctgctgctgttctccttcacacacagcaaaatatacatttgtttctgtagattgacacaacttataataattactcccaaaaagttgtctgttcttttagaaaaggattaaataaggctcaggggacccacttcactctactgaatctaatgtacgagacagtactactgcttctttgtgtgcttgaatttgcatgaaagcttaatagcaaaatcttctatctcagtaattatagcaaatagggacctactggtagggagcaggtgttggctcagaaacctgaaaaagacaacccactttcatacagttctattaaaatcccctaagttttctaataaaatgatatagtccaaatatggcaatcgactggcatttatgggagcctctaaacctggaattatggggtttatttttctcccaaatgagctgcaaaagataattattgctgcccagtaaacaaaatgtatgtcaaatcagtaaagaatttgtttagcataatattgccttatctttcagaagctttcttctatattcttgtgtcttcagtacaatccacttttgtttgaaatccatttgcatattatcttactgtgcatttagtgaattctcaataatgttgtatttgctgacaagaataataaattggaccacaattaaaaaaaaagaaaacccaatgagaaaataactacctgattaatatacacatgtttaaatgtaggacctggtaaagcagtttcatccaacctagcgaaaatgcccagggctgtttgttaaatcatttgcttgataccatcatcattttcatttcacttatcaagtgaatcagaagcataatcaataactgcaaagtaagatagtaccaataggagaaagaggtaaaagaattgagagtgtttgtcaatatgaagatgtgtggggatactgaatgatatcatagtctttccagtgaaagaaaaaataggctatgggaagatgtaaatttttgatggagtaagaacagtggtcaccaccaagtatttttcaagatccctctccagctatgaatagaaaggacacaaattcatttgcgtaaaattgccatttgcctacatagactagacaattcacagatttttcacaaagacagttattatatatatagttatttgagttatcactatattatttcacattgatagtttttatttctaattttgtttccattcactgtcctcagttcctctgtggcctacattgaaggtagctgtcagtattattattgtcaaccatatttaatattgaatacaagtttaagcatgctgcaaagcattttctaacgttaattttaaaacattgtctctgccctccaaagtgatggttaacagctataatttactaagatctagcacaataatttattacttgcttgattctcaaaacaatactgtgaggtaagtaatgttatcaacattttattgataaagaaactgcagcatgaagaggttaagcagactttcccaaggtcattcggtaagtaagtagtagaactgggattggaacccaggtgtaaattactctaaaacccatgctatgcatgttgcatttgcctccctgtttgaaaaaaaaactacttaggacattatatttatcaataatcccactcaccttgattgaatggcagaactaagggggaaaaaacagctggggaaagagaaaagactagaaaagaagatcagaaattttttttcttctcaggacacaagtggtggtacttttgtgtcattttgtagatgactttgatttgcaaagatttggaattgatttattctaccagtttagcctatacttatattccaaaagcatattaatcagttctgctccttgaccacttttaggaatccaaggtgttttaattgttacatgacccccttactactctatgaagggcataacctgtgtctagcccatatctcactcatatcagtggtgagacaaaagatttgtcttcctctgtcctctcattgcaatttatttatgttttattctcaattttattaagatttgtcaggaattacagctagtttattacatatgtctctcttccccctaggtaagtagtcaatgccttgttagtatctttctgtacccctttgcttatagtaggcagacagtaaatattgaattgaactaaattccctgtggaagaagccagtcacactattacatgagtcttagtttttatgaatcttgtgttatgtatggatttatttattccttcagttaatatatatttaagagtactagatatgtgccatgtgttgttgttccaagtgctacagatgcagagataataaattggtcgaagtctttgccctcatggggcctacattctaaggtaggaagatggccacagaatgggataatttcaggctagtataatgaagcattaagataggggcatgcatagagtaccgtgggatttagtagaagagtgcaacatggaattcaaaaaaatcttcctggaaaagataatccctgagttgggtcttaaagaacaaatacatgttagactcccatcaaacttgaggacacacgttctttccaagaacaaaatgtaaaataatggtttctaaactgtagtatccttaagaattattttgaaaatttaacttgggccaggcgtggtggcttacgcctgtaatcccaacactttgggaggctgaggtaggcagattacttgagctcaggagtttaagaccagcctgggcaacatagcaaaaccccatctctaccaaaaatttaaaaattagctgagcacggtggtgcatgcctgtggtcccagctactcaggaggcttaggtgggagaatcgctggagcctggcaagtcaaggctgcagtgagccaagatagcgccactgcacttcagcctgggtgacacagaagaccttgtagaaagggaggaagaaaggagggagagagagaggaagggaggaggagaagggaaggaaggaggagacgggaaagaatgaaggagaagggaaagaagggagggaaatttaacttgtattccaaaactccacctccagagattctacttcatttggcctggaagggagcccaataatctacattttattaagctctccaggaaattctgtctgagatctattgatatagaatattaagtgtattacatagtagtattcatgaaatgtttcagtgcctgtagatcagacctttaagtgtgatagtgatagtaatacagagattaagactaggattaatgttattcatctttttcttgtgcttccttaaaaaggaagatatttaatgaaaaaaattaatatttaataatgaatttctgtacattcacattcaacatacatttttcaaagtgtttcttggtataataaatatgttgattttatggcttccaaaaattcctttctatcactgttcaaatatttccttctaagttatctttacaatgatggatataaagtgaagaatggggaggtatttatcaagtaatttctttatcagtatcctaaatgaaataagactgacctttgagcaaatgtgtagtagcagccataggtgctggcatgtttgcattcttgcatacagtaagatttcttgcttccctttatcatcatctaaatggcttcattgtcatcacactcatcagatgaaatgcagtactggattcttctctaaaagcagtgattctgtgactgctgctctaaactctagttccttgattgttttgttcttaggatcctttgtttcaaatagcaagttaatacagcagcctcaggaccttctctttctctcagaataaatgctgtggataaggtacatctgagtttccatttcccctcatttcacatatagccatattttcttctctgatgtaatattttgtattaacacattttacattttgaagttttcttttcccccacaaagatatgtggttatcccacttaaaaatgagcttatttgaatatgtgaaataatgttgtcattgaattaagctgttttgtgactgctgatgtatcactgtgtttgatttggtgacagcttgaggtctggttaatataatcttaaggtaatcagcttgatagactggaattactagtttattatcaaaaaatgaatgtaaaaatattgctcttttctctccctgtttagactagtatgtgcctttttaaaaatactccctttcttcttccctgccttttttccccactcttattcatatacactcaaactagataccagagttagttcatcaaagctgaataatacctatcaaaaagtgataccctgacttttttctcttaatcacctgtactggaccatagggaggaccaaataggctttcttggggactacagaaagagcaaagcgtaatactctttaatcatagcatgtttgttgttgctgtttcggtggtggtggtggtggtggtggtggttgtgtacttaccttgaatagtgtgaagtatcctaaaattatgttgtgtgggctgggagcaggaaggaaactgattattcgtctaacaaaggtttggcataattttattgtaaaatttcaactgtttatgacatgaaaatttctaattaattataagaacaaagtcactgtggtggcaatagttgtacaagatgtttgacattatttctatgtcagtttgatagtctgtgttataaattgtcttattaggacccttcttcaccctcttctttattattctgattatcagtaaatccagtttgtactgttagacatttgagtttgtcttttaaatattgaagactattttaaaaagaaaaaccataacatctttctgtttattacattaacatgtgatctctcacctgacgatgtgtttaaaatgaattaatagataaaatataatactccgttatatactgaaaaaaattttcaaactttgtctatatattcagatattgctagcagttcatattaaatatgactattttgtttaatgagaaaataggaatttttccttatctctgagacttactgcttctctttgccattcacatctggttgaaggtggatggttttgaacctcgtaacgtcacttcactcgtcagtttctgagtgtgccaacctccttctgacggtttaattttcagtaacaatcaaaccatttattcctcaggggttggtcctcctagtgattcctgtccttaacccccattagtgttgatggaagtaatccataagcaccaataggagaaaaggcccataaaggatcagtatcccagaaccctgaaataggacggccgcttcagtacccaaatgtcattgcaattctaatggagtagaagccagcttcttggaagtgaagatttgagatcattatgtcatattctctccttttggtgtcctcccttctccctctagcttgcacattctttttattttaaattttacaggaagccttcttttaaaaacctggtttttaaaatttcacatgttgctgtaaccaggtgatttcaaaacccagaaaactgaagtacataccatacagtcataagaagtttgggggcttttttggtttttatgtttttggtgttttttttttttttttttttttttttttttgtagtgtggggagtggggaggaggaaaagggagaaatcgtgcttgttttggttttgggaagtctttttggataaatattgagaatatttatagtattctgtaattatgtgacatttgttgtgtgaggggagaccagagtagctgttgcacatacatcgactctcttaatattgaagcatatttaaacagttgtttgaagcagagctagaaattaatggtgatacttctaacagcattttgatgttataaatattactttaagtttatcaagagaaaaattccagtagtagcttgcgttataaaattaattgatttattatgtttctgtataattttattgaaattgcttttttgtggtgaatataatatagtggcaacgattttgaggaatctttaaagctgtttggaagagatggccagcctttggctagatttttactagaattttgaaataagaaagtgtataaatatgttttcagttaaattagccttgaggaagaatagttattatatgagttttaagggtcttgataaatgttgggacctactctaaaactcatgaggttcctcactgatcaatactcttgcattgtattttatttctcaaaataatgaaatttttatggaaaagctcaattagtggaatcttttattcaatattcccttactcttctttcttccttccttctttctttcctttcttccttccctccctccttccttcctagttctttcattttttcaggcaagaagcttccttaataatatagtttctacagagctttcttacttatttttctaataatggatataacagtgtgataaagtttaaatgctccgtgagcaaaactcttatcaaacaactgaagaaatacactgctgattaaccttttccttggtcttgaattgtctccagcatatttgctagtgactaaaccattaatggatcttattagtataaacacatgtctgtgtggttatcaacagtgttgtattattgtcacatttatttacatttttggtcaaaaatataaacatgcgtgtgtgaagcagtctgttttatagagtgagcatatatgtaatcgttttcatataattgaaaatgtgctgtgtgttgcattttattctcatgtcgacttttctactatgtatacaccgattgtctcggtgcctttttccttttgtataattgtattacatacagaaattgctgacctctgtgaaaacagtgtaaaaaaagttaaaattattattccgatgagattttaatggcagtttaattttccagagaataaattttgtgtgggttaaaagttatttttcttcacctttatgtaaaaaatctgtttacgttttagtactcacatggaatgggtaaacatctgacttcattgatgatgatacataaacatcagtcctaattcttgtcattgacaaataaatgttaatatgactgttacacaaaataaaataatgtcaattacataaggaaatatcaaatggatatatgtacatgttatttagatcttgggtttgaaaggaatctcatctaaatgtgctataaaatattactctcaaaaggtttgggtcatattattttctttaattgtaagtcaaatctggcttccaaagaaaatagacttacaaatgcaaacatttaaaaatattctcctttaaagttcatataaatcacaaattaaactaaatagctttaaaatgatctcagtatcttcagctggaatatgaactgttacctagtttgttctttcacttaatgtgaatttgttgtcattcatatcagtattgctatcctgtttaacaaaataattttctctttgccaatagtagtttgttgatttttaattctttttcattagctagttgtattgtttccctaagacctggagtttagatatttttcatatttcattaccttgtccattttacttccagcaacaaagatttataacaacagacttaacaagtactattttgcatatgaaaaagaatttaaacgtttggtgctctaaaactgaaagaaattaaagttgctgcatcatctaa

SEQ ID NO: 188207 - DNA, 2549 bp, Homo sapiens
  Payload ID: 17036
  Gene Symbol: SYT14
  Gene Name: synaptotagmin XIV
  Uniprot ID: Q8NB59
  ENST ID: ENST00000629778
  CDS Start-End: 1-1860
atggcgagcgcatcatggcgattgaaggtggagagagaacctgtggagtacatgaacttatctgtattagaaaagatagggtatttctctgtggccaggctggagtacagtggcaccatcttggctcactgcaacttccgcctcctgggttcaaacgattcttctgcctcagcatcccaagtaactgggactacagtatctccagaggcagttggatttttgtcagctgttggggtgtttattatcttgatgctgctcctttttctctatattaataagaagttctgttttgaaaatgttggcgggtttccagatcttggttcagaatacagtacaaggaagaattcacaagataaaatttataattcctacatggacaaagatgagcatggttcatcctctgaaagtgaagatgaagcgctgggtaaatatcatgaggccttatccagaacacacaattccagactaccactggcagattctagacaaaggaactatgcttgggaaacaaggcagaaatacagtcctctatcggcagagtatgatggatacagtagtgaagcatcaatagatgaaggaaactgcattcagagaatgagaagaacacccccgctggatgaattgcagccaccaccatatcaggatgacagtggttctccccatctgtcatgtacaccctcagaaattggggacagtaaatgtgaattttcccactgcagcaacagtccaagatgctcatataacaagtgcccaagtgaaggaagcacaggtcatgaaatagaaagttttcataataaaggatatgaagaagatgttccaagtgacagcactgcagtcctgagccctgaagatatgtcagctcaaggatcatcttcgcagcttcctaaaccttttgatcctgagccagaagctaaatatggcacactggatgtgacttttgactatgactcacaagaacagaagcttctggtaacagtgacagctgtcacagacatcccaacatataacaggacaggtggcaactcatggcaagtacaccttgttcttctacctataaagaaacagagagcaaaaaccagcatccagagaggaccatgccctgtcttcacagaaacatttaaatttaatcatgttgaatctgagatgattggaaattatgcagttcggtttagactgtatggtgtacatcgcatgaaaaaagaaaagattgtgggggaaaagattttttatttaacaaaattgaatcttcaagggaaaatgtcattgcctgtgatattggaaccttcttacaatcattctggctgtgactcccaaatgagcgtgtcagaaatgtcgtgtagtgaaagtacatcctcatgtcagtctcttgaacatggctcagttccagaaattcttattggcctgctttataatgccacaactggaagactatcagcagaagtgataaaaggcagccacttcaaaaatttggcagcaaacagaccacccaatggactgttctgttgtctaaaacacttgataggtggacaggtttatataatccgagatacatatgttaagttaactctactgaattccatgggtcaagagatgtccaaatgcaagacatccatccgcagagggcagccaaatccagtatataaggaaacttttgtctttcaagtggccctatttcagctttctgatgtgacactcatactgtctgtgtataacaaacgcagcatgaaaagaaaagagatgataggctggatttctttaggtctcaacagctctggagaagaagaactcaatcactggactgaaatgaaagagtcaaaaggacagcaagtatgtagatggcatgcgttgctagagtcatgatgaatagaataagcaagcagttaccatcaaaggcagcatatttccaattccaacattactgtttctaccaagtcccattagaagagctgttctttgaagaatcatattcaaccttctaccaaaatgctttaagttctatggaaagaacgtctcatactgacataaatgaagaaaatatgtgtatctagtagagcttgtttaggaaactgagaaacgtacactatcattgctaaactaacagtcctccagaaatttaataagatgtttttgatttgaagttaattttaatttagcaaaagagccagtcattttatgaaaaatcaaaattataagtgattttaaaaaccagaattttagttgcaatacaattttaatatcaccctacatattatttataaaacatagtttgactggccagtccctggtgtttgtaatgttctttaatatgaaaaagtagttctccaactctatcataagtcatatctaatggtgaagggtttcagtcacattgaaaattgttttatttcaggcatgttccctttgtgcacttaggttcattgtgcctcagttcctctcaaaagcactaaatctaagtgcaaacaagtattcattttcatacaggaatttttttaatatgttatttttttaaaagttcatttttcatttgcctccgctttcgcctgatccaa

SEQ ID NO: 188208 - DNA, 1369 bp, Homo sapiens
  Payload ID: 17037
  Gene Symbol: SYT15
  Gene Name: synaptotagmin XV
  Uniprot ID: Q9BQS2
  ENST ID: ENST00000374321
  CDS Start-End: 68-1333
aagagacggcctggcagcccagccccagccgcccagaccggcgagaccagcctgcgggagcagccccatggcggagcagctggccctggtgattgggggcaccatcggggggctgctgctgctgctgttgatcggggcaagctgctgtctgtggagaaggttctgtgccaccctcacctatgaggagctgcctgggacaccagccatggccaccacagctgcctccagtgggcagcgggacaggccctgccagccgcatgctaggacccaactgagcaggccaccagctgtgccattcgtggtgcccccaacccttcaaggccgagattgggtgcccctgcacagtggagagtgggccgatgccccatgggacccctgcccggcatcagagctgctgcctcacacctccagcggcggccttggagatgcatgtatggtgggggccatcaacccagagctgtacaagttcccggaggacaaaagtgagaccgacttccccgacggctgcctggggcggctgtggttctcggtggaatatgagcaggaggctgagcggctgctggtgggcttgatcaaggcacagcacctgcaagccccctcggagacctgcagccccctggtgaagctctacctgctgcccgatgagcggcgcttcctccaatccaagaccaaacgcaaaacctccaacccgcagtttgacgagcacttcatctttcaggtgtccagcaagaccatcacccagagggtgctgaagttctccgtctaccacgtggacaggcagaggaagcaccagctcctgggccaggtgctcttccccttgaagaatgagaccctagtgggggactgccggcgtgtcatctggagagacctggaggccgagagcctggagcccccctcggagtttggcgacctccagttctgcctcagctacaacgactacctgagccgcctgacggtggttgtgctgcgtgccaagggcctccggctccaggaggacagaggcattgtcagtgtgtttgtcaaagtgtctctgatgaaccacaacaagtttgtcaagtgcaagaagacttcagctgtgctgggctccatcaaccctgtgtacaatgagaccttcagcttcaaggccgatgccaccgagctggataccgctagcctcagcctgactgtggtgcagaacatggaaggggacaagagccagcagctgggccgagtggtggtgggcccctacatgtacacccgcggcagagagctggagcactgggacgagatgctcagcaagcccaaggagctggtgaagcgctggcatgcgctctgccgcaccacggagccctgacccttcgcccagcaccgcggttccgctttgggagcc

SEQ ID NO: 188209 - DNA, 6428 bp, Homo sapiens
  Payload ID: 17037
  Gene Symbol: SYT15
  Gene Name: synaptotagmin XV
  ENST ID: ENST00000374323
  CDS Start-End: 589-2013
gttctaataatcaccataataataggcgctgggtgtacagaggggacccaggcgacgctggcctccatccgataaccaccgtaacaggggctgggccgcgccgctcctccgctctaagtgctctttacatgcttcttaagttaccggcaggccagccgcccttacgagagcccctcacggacattaacccaattgagaagactgaacccagcttacgaacgttaagttgtcccaaatcgcagggctggcgagtgaggagcctgaattggaacccaggagcttctggaacccgctccagaattgcgctctcgaccggtttgtccgctgagagcgaacgggtgcgcgagcgccgcatccctgcccaaggccatcaggcaggcagcgctggggccggggacccgcgcggagactccaccccgggatccgggaaggctcccccgagccggggtcggagctgcggctggaggggcctcggcttgaggaggatctgggagggcgggggctcagtcctggccaccaggtgtgaggggtcgggtgcggagccctgtgtcagacgcggcggtgaaggctgtagccctgctctccgggatgggggtggtactctcaccccaccctgccccaagccgcagggagcccctggcgcccctggcgcccgggacccgccctggctggagccctgcggtttccgggagctcacggtcggctctgcgcccctccaccgccgggcctgggcctgggccagggacgggctggggcgggactgcggcctcggggcgctgggtccctgcccctgccgtgcactgcgcggctccccgcgccgcagctgggcaccagcagcaccacggaccgcccctgtgctcgcccgacggcgccccgcggcgctttaagagacggcctggcagcccagccccagccgcccagaccggcgagaccagcctgcgggagcagccccatggcgggccaccagctgtgccattcgtggtgcccccaacccttcaaggccgagattgggtgcccctgcacagtggagagtgggccgatgccccatgggacccctgcccggcatcagagctgctgcctcacacctccagcggcggccttggagatgcatgtatggtgggggccatcaacccagagctgtacaagttcccggaggacaaaagtgagaccgacttccccgacggctgcctggggcggctgtggttctcggtggaatatgagcaggaggctgagcggctgctggtgggcttgatcaaggcacagcacctgcaagccccctcggagacctgcagccccctggtgaagctctacctgctgcccgatgagcggcgcttcctccaatccaagaccaaacgcaaaacctccaacccgcagtttgacgagcacttcatctttcaggtgtccagcaagaccatcacccagagggtgctgaagttctccgtctaccacgtggacaggcagaggaagcaccagctcctgggccaggtgctcttccccttgaagaatgagaccctagtgggggactgccggcgtgtcatctggagagacctggaggccgagagcctggagcccccctcggagtttggcgacctccagttctgcctcagctacaacgactacctgagccgcctgacggtggttgtgctgcgtgccaagggcctccggctccaggaggacagaggcattgtcagtgtgtttgtcaaagtgtctctgatgaaccacaacaagtttgtcaagtgcaagaagacttcagctgtgctgggctccatcaaccctgtgtacaatgagaccttcagcttcaaggccgatgccaccgagctggataccgctagcctcagcctgactgtggtgcagaacatggaaggggacaagagccagcagctgggccgagtggtggtgggcccctacatgtacacccgcggcagagagctggagcactgggacgagatgctcagcaagcccaaggagctggtgaagcgctggcatgcgctctgccgcaccacggagccctgacccttcgcccagcaccgcggttccgctttgggagccgaccatcctcgcagttgcatgtgacagccacagccacacgcatggacgtttcatccaacagctccccgagctgccagccagcccgagccaggaggacgtgagtgctgatatgcaggagagaagaggggacaaagaagccctggcccggtcagcggctctggccatacagccttccgacacactccctcctccttatctgcggggctgcctgggctcggaatcccggctcctggtcctcacagccctgatttggaccagaatctcagatgctcagaagaaagatcctgtttagtgatgacccagctctacctgctgaatggacctgcagggtaaacttgggtgcctccatctgggaaagctgatgatgtgttcatgcagtcgatgaccctcactgctttttcagccagggtttctctgccttctgcctggcagagaaaacacactgctatggggaaaatcacagggagggcgctgtgaccagcgcactcaggcaccaagtgtcggcatggctcactgtgctgggtgaaggcctccccgagcattaggtcctccacggggctgtgtcaaatgccctcccacattgtgtcaagtctgcccatggcccaccctccccacagtccaaaaccacacagccctggttctccagctgttctgctgctgtttctgtgctctccctgattaagagcattcagttcctgggctctccctttgagcaggaaatggtgaaagcatgtggctatggtatagcccacagggctgagattgctgtgttgcagtattgatgtaaaatttgttaagaaggaagtacccacagatcactgccatcaactccccagaagttgcactcaagctagtgagcagcccttgtgcttgtcacagttactgtaacaggtagtgtgtatttgcacctggcatcgtgcagcctgcacgtcaacacgttgttttgtgtaactagaacagcacatggaaccactatctctttctcttttttccttctttttcttttttttttttttattttaattttttgagacggagtttccctcttgtcacccaggctggagtgcaatggcgtgatctcggctcactgcaccctccacctcccaggttcaagcgattctcctgcctcagcctcccaagtagctgggattactggcgcccgccaccatgcctggctaattttttttatttttagtagagacggaattttaccatgttggctaggctggtctcaaattcctggcctcaggtgatccacctgcctcagcctcccaaagtgctgggattacaggcatgagtcaccgcacccagcccgaccagtatctttttcttatgcagtgaaacaactttagcaaaagaggcaatgaatgttatactgagtttctacctctttaactccacctccaatttctgtcaatctacaaacacaagtgtcgcctcgcagtgtttcgtatgaacagaatatcttgtgtttgctttttgtcacttatttcacttgcacattttttgtttgtttgtttgtttgtttgtttgttttttgagatggagtcttgctctgtcgcccaggctggagtgcggtggcgcgatctaggcttactgcaagctccgcctcccgggtttacttacaccactgtcctgcctcagcctccggagtagctgggactacagacacctgccaccacgccctgctaattttttgtattttcaagtagagacggggtttcactgtgttagccaggatggtctcgatctcctgacctcatgatctacccgcctcggcctcccaaagtgctgggattacaggcgtgagccaccacgcccggcccacttgcacattttcaaagtagtccgcaaagctgtagtttctaatagcttcatagctcacatgtaataggggttctctgtgtgtttatagagcaggctactacagtggaactgtttctgtttcatctgacatccggatagatgccagccacccccacattccaaggtgagatttctgactagcagtgacttttctagggccgcttggaaaagttgataagtatccttttctgcaggacagagtagactggtatctctgactcatccctgaaaaatctaaatggcaagagactagctggctctctgctctgatggggaggaggttgttgtttgggctgttctctacagacatagtcagggcaaaaagcatacgcatgcttcccatggaccagagaaacctggcctgggttgtctcaaatcctgtccacaaggcaactccagaagaaagaagccctttacatttccataaaacactttagaatcagctagtcaatttccacaaaataaagtgctagaatttgattggatttaattgattatgtagaacaatttgggggccatttgacatcattaaaatattcaatcttcctattcattaacatggtatatctcttcactttaagtcttttgtatgtttctcagaactatttttgtggttttcagtaaagtgttcttgcacatccttcaatagatttattcttagacgttttatatttgtttatggctagtatatacagattctgttgctacaaaactatgttgaccttgttatccagtgagaggctttgtgacattcatttaaattgtaataatttgcagattatttttgtataatcatgtcctctgtgaatgacagttttatttcttcctttcttaatctttatgccttatttagctcttgccaaactgcagtggctgagcaattggacaagataaagaaataaaagtgatccagatcataaagaaagaagtaaaactatatctgcacatgacataatcttgtctatggaaaatcctaaggaatccacacacaaaaaaactactagagctaataagtttggcaaggttgcaagatataaaattggtatacaaattgcagtggctaggacctccagcagaatgctgactataagtagtgatagtgggtattcttgtctcatcctcaatctcaggggtggtgggtgtggcatgtggagagttgtcaatattcaccatgaagtttgatggttgttataggatttttaatgtactcattaacatatattctcaagctgttaaaaagatttttttaattacaaataaggttaaatttctctcaaatacttactctgcaccttttgaaataattttatttttctcctttattctttggatgtgatgacttatactaattgactgttgaatgtcaaaccaaacttaacattcttgtaatagaaaccagcagggtgtgtacacttttgtgtgtgtgcgcaggtttatacacataaacacaacaatacttggacttatttatttaaaatttagatttattagagggagcatggccataaaataaaataaaataaaatttagatttaagtcgagctcagtggctcacatctattatccccgcactttggaaggccaaggcaggtagattgtctaagctcaggaatttgagaccaacgtggtgaaactcggtctctacaaaaaccacaaaaattagccaggtatggtgtcacatgcctgttgtcccagctacttggagggctggggcaggagtattgcgtgagcccgggaggttaaggctgaagtgagtcatgttcacgccactgcactacagcttggataacaaagcgagactctgtctccaaaaataaaataagtaaataaataaataaataaaatttagatcaatttgctgttatatttttatataaactatgtttatgacataagtataaacaaaaaaataaaataagtaaataaataaataaaatttagattaatttgctgttatatttttatataagctatgtttatgacagactttcctataatattcttatcataatgttcttgcacttgaaagaatgtgcattctgcagttgtgtgcaggtgttatgtgtatttcaactgggtcaagtttgttaatcaggttggtcaaattatctacatctttactgatatttttgtctgtttttctataaattactgagagaggataaagcctgccactgttattatgaatttgtttatttctcctttgagttttgttagtttttgttttatgcatttagaggttgtgttattaggctcatacccatttaaaattgacgttttctggtagagtgaacctttattatgtgaaatggctttctctaccactcacaatggtatttttttcactttcccccttatttttgaattttcaatgttcttataatgatgtcatgtctcttgaatagagttgttttaatcaagtctgtcaaattttgtcttttgtgtatttcgtgaatttacatttattgtaattactgatatagttgtgttcataaataccatcttactacttg

SEQ ID NO: 188210 - DNA, 753 bp, Homo sapiens
  Payload ID: 17037
  Gene Symbol: SYT15
  Gene Name: synaptotagmin XV
  ENST ID: ENST00000374328
  CDS Start-End: 1-543
gacgagcacttcatctttcaggtgtccagcaagaccatcacccagagggtgctgaagttctccgtctaccacgtggacaggcagaggaagcaccagctcctgggccaggtgctcttccccttgaagaatgagaccctagtgggggactgccggcgtgtcatctggagagacctggaggccgagagcctggagcccccctcggagtttggcgacctccagttctgcctcagctacaacgactacctgagccgcctgacggtggttgtgctgcgtgccaagggcctccggctccaggaggacagaggcattgtcagtgtgtttgtcaaagtgtctctgatgaaccacaacaagtttgtcaagtgcaagaagacttcagctgtgctgggctccatcaaccctgtgtacaatgagaccttcagcttcaaggccgatgccaccgagctggataccgctagcctcagcctgactgtggtgcagaacatggaaggggacaagcaggctactacagtggaactgtttctgtttcatctgacatccggatagatgccagccacccccacattccaagattccagttctttgatgaaagtctctattccacccatcaagtctgtgtctgataacaccaatatctgggtcattagtggctccgttttgttgtgtctgttttcccctccttcctgttttgtggtgtgtttgatcacttattgttgaatgctaaccattataataaattttagtggctccaggaaa

SEQ ID NO: 188211 - DNA, 495 bp, Homo sapiens
  Payload ID: 17037
  Gene Symbol: SYT15
  Gene Name: synaptotagmin XV
  ENST ID: ENST00000512997
  CDS Start-End: 86-495
ggcgccccgcggcgctttaagagacggcctggcagcccagccccagccgcccagaccggcgagaccagcctgcgggagcagccccatggcgggagatgcatgtatggtgggggccatcaacccagagctgtacaagttcccggaggacaaaagtgagaccgacttccccgacggctgcctggggcggctgtggttctcggtggaatatgagcaggaggctgagcggctgctggtgggcttgatcaaggcacagcacctgcaagccccctcggagacctgcagccccctggtgaagctctacctgctgcccgatgagcggcgcttcctccaatccaagaccaaacgcaaaacctccaacccgcagtttgacgagcacttcatctttcaggtgtccagcaagaccatcacccagagggtgctgaagttctccgtctaccacgtggacaggcagaggaagcaccagctcctgggccaggtgctcttccccttgaagaa

SEQ ID NO: 188212 - DNA, 1331 bp, Homo sapiens
  Payload ID: 17037
  Gene Symbol: SYT15
  Gene Name: synaptotagmin XV
  Uniprot ID: Q9BQS2
  ENST ID: ENST00000503753
  CDS Start-End: 37-1209
cccagaccggcgagaccagcctgcgggagcagccccatggcggagcagctggccctggtgattgggggcaccatcggggggctgctgctgctgctgttgatcggggcaagctgctgtctgtggagaaggttctgtgccaccctcacctatgaggagctgcctgggacaccagccatggccaccacagctgcctccagtgggcagcgggacaggccctgccagccgcatgctaggacccaactgagcaggccaccagctgtgccattcgtggtgcccccaacccttcaaggccgagattgggtgcccctgcacagtggagagtgggccgatgccccatgggacccctgcccggcatcagagctgctgcctcacacctccagcggcggccttggagatgcatgtatggtgggggccatcaacccagagctgtacaagttcccggaggacaaaagtgagaccgacttccccgacggctgcctggggcggctgtggttctcggtggaatatgagcaggaggctgagcggctgctggtgggcttgatcaaggcacagcacctgcaagccccctcggagacctgcagccccctggtgaagctctacctgctgcccgatgagcggcgcttcctccaatccaagaccaaacgcaaaacctccaacccgcagtttgacgagcacttcatctttcaggtgtccagcaagaccatcacccagagggtgctgaagttctccgtctaccacgtggacaggcagaggaagcaccagctcctgggccaggtgctcttccccttgaagaatgagaccctagtgggggactgccggcgtgtcatctggagagacctggaggccgagagcctggagcccccctcggagtttggcgacctccagttctgcctcagctacaacgactacctgagccgcctgacggtggttgtgctgcgtgccaagggcctccggctccaggaggacagaggcattgtcagtgtgtttgtcaaagtgtctctgatgaaccacaacaagtttgtcaagtgcaagaagacttcagctgtgctgggctccatcaaccctgtgtacaatgagaccttcagcttcaaggccgatgccaccgagctggataccgctagcctcagcctgactgtggtgcagaacatggaaggggacaagcaggctactacagtggaactgtttctgtttcatctgacatccggatagatgccagccacccccacattccaagctcttgccaaactgcagtggctgagcaattggacaagataaagaaataaaagtgatccagatcataaagaaagaagtaaaactatatctgcacatga

SEQ ID NO: 188213 - DNA, 2029 bp, Homo sapiens
  Payload ID: 17038
  Gene Symbol: SYT16
  Gene Name: synaptotagmin XVI
  Uniprot ID: Q17RD7
  ENST ID: ENST00000430451
  CDS Start-End: 416-1027
tgaatcttaaaagaaaaggatatttattagatgtctactgtctgtcaagtcctctactttttacaacatccctacacagaaggaacaggacaggaccaatttgcaggtgccatccggggtctcagagcccatctcaaagtgtggtgacctagatgtcatctttgaatatagagccgccagccagaagctcacagtgaccattgtgagggcacagggcctcccagataaggaccgaagtggtgtcaactcctggcaagttcatgtagtgctgctgcctggtaagaaacacaggggcaggacgaacatacagagagggcccaaccccgtcttcagggagaaggtcacctttgccaagctggagcccagagatgtggctgcctgtgctgtccgcttccgcctgtacgctgcccggaagatgacccgagagagaatgatgggagagaaactattctatctcagccacctgcacccagaaggggaaatgaaagtgactctggttctggagccaagaagtaatataagcagtggagggtctccgctcagcccatctgcggtttctcacagtgatagtacttcatccacgcagtcgctgtctcatggaggggcgccagagctgttggtggggctctcgtacaatgccacaacggggcgattatctgtggaaatgatcaaaggcagccatttccgaaacctcgctgttaaccgagcacctgatacatatggaaaactctttctcctcaattctgtgggtcaagagatgtcccgttgcaagacgtccattcggcgtggtcagcccaatcctgtctataaggagacctttgttttccaggtggccctctttcagctgtctgatgtcacgttgatgatttccgtttataacaggcgtactatgaagcgtaaagagatgattggctggattgccctgggccagaacagcagtggagaggaggaacaagatcactgggaggagatgaaggaaaccaaaggccagcagatctgcagatggcacactttgctggaatcctaggtttgctaacctgcatttgtgtgctgtgtccaccttggttacctgtgttgctgtctactgacactaagtgtcctggcaagggtttcagggtttcaaaaacagattccactaacccctaggacattgtgagtgggagttttgggtttctcaatggtctgatttggatttaaatattgtaattttaaaaacacacatacacagtgaagtgtccgtatggaaaatattataccacaattaagaccactgatgagttaatttgtgccaatagatcattgagttttagttcagggtatggggtgaagcttcttctgctgtctctgtttgcttgaagagtaacctgagattgcaagggagctgttaattgttactatttgcaaccatttaggtggatgaatcagaattttcttaatatggtacaaaaaactccaaaatatagatatgaatcagatgctgagcctcataaaagaatcaaactctaatccataaactcttatttcacatttttctctttatcaaagaaacctatttacctaacgagtaaatattataaacttgcacttttaaaataaatttgtattaattaaatacctcttttatcttatattttgtggtttctatgagatttggttagatgaatcattttgaagcaagaaaagagttcagaaactactgttttaagacaacttgtctccttttgaatatgtaagatttcaaacttgtgactttcaaggtttttatgctgtctttctcacccaataagttcttacagaataagaaaacaaaaaacaagactactgcagtcatagatttattgattttttctgcttctggtgttcttttggattatcctttttctatgttcaattatatatactcatatatgaatattttgaatgtactgcatgtaaaccatgctctttttaaactgagtattttccatcactagagcatagtaaattgtacacagtgagtccttaataaatattgatttgattgactctt

SEQ ID NO: 188214 - DNA, 3219 bp, Homo sapiens
  Payload ID: 17038
  Gene Symbol: SYT16
  Gene Name: synaptotagmin XVI
  Uniprot ID: Q17RD7
  ENST ID: ENST00000555409
  CDS Start-End: 187-1338
tgtaactttaacaggtgtaagtatttctttcctctgtttcagctggaagttttgagagtgaaatattcacagccattaagagacctccaaattaatttctcaacatgcttattctatagttcacattcaatccagagcactgaaggaactgaacaactggacactgtagacatcagatagctggccatggtgttggccatggcgtctcaggatgttcagaacttcttccagcctttctcttcctggatatctcgggtttatgaagctctccagcaagcaggagatatgttatctgcttcgctggttaacataagcaaacaagactctaaattgagtgacaaactagatcaggacttagataatattcagattcaggaaacgtactttgaagatgaagaacaagacaatgattggagtcaagaggatgcaaattccttgtttcttgaagtggatcatttctcatgttgtaatagtgatttgcaggactctgcccaaaattcaagcccaagccttagccaacatgcaaaggactcatgttccacaatgtcccagtggcccaattgggccagtgatgaccgcaagttaccacatgtgctttcttctattgcggaggaagagcatcaccttgaaaagcaaagaagtggccttcaacatggctttgacagccagctccctggtactttagaaactgttaatggaaaaaagcaagtcaacagctttggggatgacgaagagctgtccacatcttctgacagtgacgaggaggtgatcaaacaatttgagatttccgtgtcccggtcccagagtttccgttcagtgacatctgagaaaggaaagcagacaggattggagcagaaaccaaaattcagccgttcgttgttgacacacggagaagatggcacagaagtatctgcctgcgaagatttggatggagccagccaacggcgttattctgagaatctctcctacggtgaagatgaccacatccctgctcactcacagtccccatgtgaaagaggggatgccaaacaccacggcacatctcaccaagagtccagtgtggtccaaagcctcaggcgccaatccacagagggcagcttggagatggagacagcttttaatagccggggatttgaagattcctatgccactgacagctcctccatgtggagtccagaggctaatttgaatcttaaaagaaaaggatatttattagatgtctactgtctgtcaagtcctctactttttacaacatccctacacagaaggaacaggacaggaccaatttgcaggtgccatccggggtctcagagcccatctcaaagtgtggtgacctagatgtcatctttgaatatagagccgccagccagaagctcacagtgaccattgtgagggcacagggcctcccagataaggaccgaagtggtgtcaactcctggcaagttcatgtagtgctgctgcctggtaagaaacacaggggcaggacgaacatacagagagggcccaaccccgtcttcagggagaaggtcacctttgccaagctggagcccagagatgtggctgcctgtgctgtccgcttccgcctgtacgctgcccggaagatgacccgagagagaatgatgggagagaaactattctatctcagccacctgcacccagaaggggaaatgaaagtgactctggttctggagccaagaagtaatataagcagtggagggtctccgctcagcccatctgcggtttctcacagtgatagtacttcatccacgcagtcgctgtctcatggaggggcgccagagctgttggtggggctctcgtacaatgccacaacggggcgattatctgtggaaatgatcaaaggcagccatttccgaaacctcgctgttaaccgagcacctgatacatatggaaaactctttctcctcaattctgtgggtcaagagatgtcccgttgcaagacgtccattcggcgtggtcagcccaatcctgtctataaggagacctttgttttccaggtggccctctttcagctgtctgatgtcacgttgatgatttccgtttataacaggcgtactatgaagcgtaaagagatgattggctggattgccctgggccagaacagcagtggagaggaggaacaagatcactgggaggagatgaaggaaaccaaaggccagcagatctgcagatggcacactttgctggaatcctaggtttgctaacctgcatttgtgtgctgtgtccaccttggttacctgtgttgctgtctactgacactaagtgtcctggcaagggtttcagggtttcaaaaacagattccactaacccctaggacattgtgagtgggagttttgggtttctcaatggtctgatttggatttaaatattgtaattttaaaaacacacatacacagtgaagtgtccgtatggaaaatattataccacaattaagaccactgatgagttaatttgtgccaatagatcattgagttttagttcagggtatggggtgaagcttcttctgctgtctctgtttgcttgaagagtaacctgagattgcaagggagctgttaattgttactatttgcaaccatttaggtggatgaatcagaattttcttaatatggtacaaaaaactccaaaatatagatatgaatcagatgctgagcctcataaaagaatcaaactctaatccataaactcttatttcacatttttctctttatcaaagaaacctatttacctaacgagtaaatattataaacttgcacttttaaaataaatttgtattaattaaatacctcttttatcttatattttgtggtttctatgagatttggttagatgaatcattttgaagcaagaaaagagttcagaaactactgttttaagacaacttgtctccttttgaatatgtaagatttcaaacttgtgactttcaaggtttttatgctgtctttctcacccaataagttcttacagaataagaaaacaaaaaacaagactactgcagtcatagatttattgattttttctgcttctggtgttcttttggattatcctttttctatgttcaattatatatactcatatatgaatattttgaatgtactgcatgtaaaccatgctctttttaaactgagtattttccatcactagagcatagtaaattgtacacagtgagtccttaataaatattgatttgattgactcttcaaa

SEQ ID NO: 188215 - DNA, 13978 bp, Homo sapiens
  Payload ID: 17038
  Gene Symbol: SYT16
  Gene Name: synaptotagmin XVI
  Uniprot ID: Q17RD7
  ENST ID: ENST00000568344
  CDS Start-End: 198-2135
gggtctgaggttgtaactttaacaggtgtaagtatttctttcctctgtttcagctggaagttttgagagtgaaatattcacagccattaagagacctccaaattaatttctcaacatgcttattctatagttcacattcaatccagagcactgaaggaactgaacaactggacactgtagacatcagatagctggccatggtgttggccatggcgtctcaggatgttcagaacttcttccagcctttctcttcctggatatctcgggtttatgaagctctccagcaagcaggagatatgttatctgcttcgctggttaacataagcaaacaagactctaaattgagtgacaaactagatcaggacttagataatattcagattcaggaaacgtactttgaagatgaagaacaagacaatgattggagtcaagaggatgcaaattccttgtttcttgaagtggatcatttctcatgttgtaatagtgatttgcaggactctgcccaaaattcaagcccaagccttagccaacatgcaaaggactcatgttccacaatgtcccagtggcccaattgggccagtgatgaccgcaagttaccacatgtgctttcttctattgcggaggaagagcatcaccttgaaaagcaaagaagtggccttcaacatggctttgacagccagctccctggtactttagaaactgttaatggaaaaaagcaagtcaacagctttggggatgacgaagagctgtccacatcttctgacagtgacgaggaggtgatcaaacaatttgagatttccgtgtcccggtcccagagtttccgttcagtgacatctgagaaaggaaagcagacaggattggagcagaaaccaaaattcagccgttcgttgttgacacacggagaagatggcacagaagtatctgcctgcgaagatttggatggagccagccaacggcgttattctgagaatctctcctacggtgaagatgaccacatccctgctcactcacagtccccatgtgaaagaggggatgccaaacaccacggcacatctcaccaagagtccagtgtggtccaaagcctcaggcgccaatccacagagggcagcttggagatggagacagcttttaatagccggggatttgaagattcctatgccactgacagctcctccatgtggagtccagaggaacaggacaggaccaatttgcaggtgccatccggggtctcagagcccatctcaaagtgtggtgacctagatgtcatctttgaatatagagccgccagccagaagctcacagtgaccattgtgagggcacagggcctcccagataaggaccgaagtggtgtcaactcctggcaagttcatgtagtgctgctgcctggtaagaaacacaggggcaggacgaacatacagagagggcccaaccccgtcttcagggagaaggtcacctttgccaagctggagcccagagatgtggctgcctgtgctgtccgcttccgcctgtacgctgcccggaagatgacccgagagagaatgatgggagagaaactattctatctcagccacctgcacccagaaggggaaatgaaagtgactctggttctggagccaagaagtaatataagcagtggagggtctccgctcagcccatctgcggtttctcacagtgatagtacttcatccacgcagtcgctgtctcatggaggggcgccagagctgttggtggggctctcgtacaatgccacaacggggcgattatctgtggaaatgatcaaaggcagccatttccgaaacctcgctgttaaccgagcacctgatacatatggaaaactctttctcctcaattctgtgggtcaagagatgtcccgttgcaagacgtccattcggcgtggtcagcccaatcctgtctataaggagacctttgttttccaggtggccctctttcagctgtctgatgtcacgttgatgatttccgtttataacaggcgtactatgaagcgtaaagagatgattggctggattgccctgggccagaacagcagtggagaggaggaacaagatcactgggaggagatgaaggaaaccaaaggccagcagatctgcagatggcacactttgctggaatcctaggtttgctaacctgcatttgtgtgctgtgtccaccttggttacctgtgttgctgtctactgacactaagtgtcctggcaagggtttcagggtttcaaaaacagattccactaacccctaggacattgtgagtgggagttttgggtttctcaatggtctgatttggatttaaatattgtaattttaaaaacacacatacacagtgaagtgtccgtatggaaaatattataccacaattaagaccactgatgagttaatttgtgccaatagatcattgagttttagttcagggtatggggtgaagcttcttctgctgtctctgtttgcttgaagagtaacctgagattgcaagggagctgttaattgttactatttgcaaccatttaggtggatgaatcagaattttcttaatatggtacaaaaaactccaaaatatagatatgaatcagatgctgagcctcataaaagaatcaaactctaatccataaactcttatttcacatttttctctttatcaaagaaacctatttacctaacgagtaaatattataaacttgcacttttaaaataaatttgtattaattaaatacctcttttatcttatattttgtggtttctatgagatttggttagatgaatcattttgaagcaagaaaagagttcagaaactactgttttaagacaacttgtctccttttgaatatgtaagatttcaaacttgtgactttcaaggtttttatgctgtctttctcacccaataagttcttacagaataagaaaacaaaaaacaagactactgcagtcatagatttattgattttttctgcttctggtgttcttttggattatcctttttctatgttcaattatatatactcatatatgaatattttgaatgtactgcatgtaaaccatgctctttttaaactgagtattttccatcactagagcatagtaaattgtacacagtgagtccttaataaatattgatttgattgactcttcaaagtgaacatgttataacacctgtgaatggagaaatattttcagcttgtgtggaatgacattaagtttttctttgagcatttgaagtgcctataactgtcatttttttatggcatttgcagcaacatatattagtcactacttgcaatctgggcatgtgccattcagaatactgatcttgtatggttatgagcatgggattttacttatgacttaattttacatatttatgcagtgcatgtttactttccttattcataggtctgggcccttaatttcaattactttaaattggcattaataaaaaaatagggaaagaatgtatgtacatttaatccctgcgctcaatgtgcagctcttctgagcaattgctcagtcacctatttttagtttctatgtttcattgtggactttttcctgtctgtgggaagagtgatagctagtgatggctgtatacagttaaaaacacataactcctcctcagctccacgttttgacagattgtaagcgtaggctgtaacacttgaagaacatatttattccttacagtgtgtaatggttatcctgacaagaccagactagggcacaggataactctactatgctttcagggttcagtctttgaatgaaatgatttcatatggaagaatgagaatttgccaaataaattaataccttaattacttttcaggtcatgggagtttcatatatatggctgctcagttattaggaatatgtaataaaaccatgttcctctgggtttttaccctacctttctttgggagatctcagagtgcttttccagcattatatccattaactgctgagtggtctttgcagcgtggctaagtcattgagtagaactgagtgcgattgattaagtagcagcacaaagaagtggcttttcacatctcttactctttatgccttgtgtttaaagggaagtagaacagcctcgctatgctttcctttatgcagtaacataatagcagcattcattttaaaatttacatttgaaaaaaatctgtatatattgtacagacagccctgaatttttccctctcatattttcctgctgctgcatccttgtttcttggtacccaataatcacctatacttcattttctgttcccaagacccacccatttttaaggttttcggctggtgtagtgaagatatttgtgtgcttgatctgccttccaatggtctgtttatgatacagtttacaggaatgcgcaccattttaagggaaggaatgcctgaaaacattttttatttttataattttactatgttggtgctactcaccaaataggatgcatgtacatcttgaatatacagcaacattcaccctcagctgattgtatacatttaagtgctgaagacaagatatataacaatatgtggctgattttttttacctttatttgaaattctagtttagtaagatcttttgattttgtgcacttaaactcccttattttcttggcaaagtctagacacaaatgcatttaacatgtttttcacttgagcttttacatttggttttcaaaagagttatgaaagataattagttggttctgcagtaaaaaactgcttttgcctatttcttccagctaatgattaatatctcatagggagatttgacattgaagcagcactggtttttgttgcttgagtaggtctttcagcgattttgcctgaagagcatgcttttaaaataatatcgttaagagtaaatgatgcgctgggtttatggaaatctgctttatagtgtgccttcttttagggtgtgagtttacactgaattgagaaatcctgatttcaccaattacggtggtggctgttgtactctctactcccctctgactattgttgaatttttaaatggaccattcaccaggcagccgaacacctgctctccgttccctctccttcactggctcccagtgtgatgcacagttgttttggactctgtttttgctgatgctgcataactgttggaggtgggggtgtcttgccttccctaacataagaagaatttgtaatgtctttggatgtggcattccacctgcatgaaatcaggaaaagaatcatcaccatgtttgtgagagggaaaagagtatggcattgcatagtcattcgctttaggcactattaattctgacatccttcattgaaaattaactgacatcaaatgtcaatattctccatagtcctaggtgccagtgagcctgaaacacagcttctgccttttcaatgtgtagatttcatgatattttacaaattattgttacctcttgtgcagttactgtgctttagatgaccttatctgagaaccaaaattcttttctttccagatgaagtactatttaagtagaaactagcattaggttaaatcaaagtgcttctctgatagccaccaatttgatttaattgatgattcggtgtggacaccactgtgggtttccaaaaaaactggttatccttttgcagcagaggacttagtattttaaaaacagaaaagtaagtaggaaagtattatttgtaaatgtcataaaaccagatggaggcatattctttactgataaagaaacaggactagaacacgcatgtggtatctccttttacttttgaggaaactgtggttaaagaacattctattctatttgatctaagagcaaagcaaatgatggataatcctgaaatggtaaaagtatttttgtcttaaaaattattcatttgggcaaagtcatttacaacaaaataaaaagtcatacagcacacctatggaagaattaaagaatacataaatgtgctggatacatttagcatcctccagtgagttgtatgtaaggagagtaaactaataaaccaaaatacatatcagatcaactagctatcacttttctaaaacttgtagaattctgaaaaatatttaaagatgggagaaacgaaactgtgctaagacaatgagattggcatagcacagtgaagttggcacaaactgtgatcctggcctgggtttacatgaaactctgctgtgtggccttaagaaaattacttagccagcctgtatcctggtttcttcaactggaaaatggaaataatacctacctcattaggtgtcttaaaagatatcagtgaaatcacagatgtaatgtgcctagcatagagccgggcatgtagttagcattccgtagttcctccttacagtcatgcctgaaaaagaaaatatttaagatgtgtcttctttttctagcaaatgttattataacactagagaaaaacaaaaaccaacgttcagatactgtaacaaggataggctcatgaagccaggctggattcgtaaataaaggaggcttcatcaggacagcctaatcagagataagcctggtatgtggaggaaattgagccttaatagagtccaactgtggtagaaccaagtctttgcatttatccccttagtttggagggagtacaaatccttgatggtttgtgtgtacctcttgatcgatcacaaacaaggcctctccttgtctccagttctcttattcataaatggacaaggcatcttgtcgcctttatcaaaagagttggtgacaatggcagtttgactacatatttcaactgtgatccaaaaaagtaaaataaatgatgtgatactatactgagactgttttaaaaatggataacactttctttaaaacctgcattatatatccattttatatcctgatagccaaacattttaaaatactctaataacacagctctcaaaacgtatctgtttgactggaatgtcctgctcagaacaaattatcactgtttcccttatgagatcctaatgaaagaaattcagttgatactactttttaaaatgggttttaagagtggcttgttgatataatagcgcatccacttgttctcaagtgattcaaaccttgagtaaaaaggagagtttctggagaatttagaagaatctttgttgacatttaatctagagaagtcttcaggagcaaaccacttcaagttcagtgtaaccaggtgccatgagtcagtcatgtgctacttgtggttttaaacgaaacatgattctgggatgagaagtgcgaggctacactcctaatataatcaaattgccaaagcactgttttgagtcctcggtatcccaattaaggagaaacatgaagacattggagaatcacttagcttagggcttttagtagggaataattaaacatgtagggaaggtgaaggagttagatgggaggtaagaaggctgaggagatttctagtaacaatgatccaaaagttctaaccagggggatggtgcacactttctcttcttgaccacatggatagatttcagagcatccctctaaatcaagtctggagaattatgtgaaggttgtttctcattaattcaaaatgtattcattgtctagtactatgctatctgggctggcacagaacttaaaatctctttggagtgctatgagtgcacattgaagcagttggtcatcattatacaatgatgcttaccaatatacaactgttaagttagtctaactatgtgccataaacagtagagttccttgttactagtattggaaggtgaaacattggctgaatttattggggcaagtgtctaggaagccttggactggcagtgagtcttggttgcattatatgggaaattggtggggatgggggtgtcatagaatcatcatctttggaagttttttaaaatagaaaaatgtacttgaagtcttggttctgctaaagaagaatgagaggacacccatgaatataccctttataaagttccttctaatatttaggtgtaacgttaaaaaagaatcaacaataacactccaggcctgtcttcttccactttggacattttttccacattgatttttctctgcatcatagaaagttttctctgaagagttcctatttgggttttgtttagggctttggggatgcctgcaggctcagggggagtttcctctcctatggtgctttgactgtttttgtttcccttgggtcacaaaaccatatcctagacacacagacaataatcaccttatttatatccactgtggaacctgtgaaacagctcgaggctttacagaacaagctcataggcagtcatggagatctgaggcctttcttggaatgaagccgctaacttgctaactgctttccattgctcactaatgctgccttaaggtttcttcatgggaatttttacttcatgcctttgagtgacagtgttaccagttttaccttgaggatgatgagaaggctgacttcctattgtattgccatatttatgcattatttttgtttacgtcatttcccccttgaagtatctagttgctggggttttgtttgttttatacaaaatttattcattcaaaaagatctttataggttgggcatggtggctcacacctgtaatcccagaactttgggaggccgaggtgggagaacagcttgcgtccaggatttctagtccagcctgggcaacatagtgagatcttgtctctacaaaataccaaacattcgctgggtatggtggtgtgcgcctatagtcccagctcctcaggaagctgaggtgggaggattgcttgaacctgtgaggtcaaggctgcagtgagccgggatcatgccactgcattcagcctgggtagcagagtgagactctgtctcaaaaaaaccaaaaaacaagacctttttaagtgtaaatgttccagactcagggttaggggttggagaatggcagatggataaaatagtttaagttcaacaatatttttttgttgtttctaaatattctttttaaaaactagagtctgataagaaatctaggtaaataataagatcttttattaaccttgaatttttggcttaatgtatttctgtaattgtctctttccccctttgaaaggcagaagatttagggaaggtgaaagttattaccctgtatctaattaagaaataggtacacttgtttgtcagtctatgctttcattcaaaataaatggatatgttttgtatctgggggaggaaatgcatcattccattccagcagtgaaaagaattatagcatcaaataggatatttagtattcttgacttttataattaaatactgaatgccctttgcaagacagtaagttagatcctggaatgctaggtctgtacaaacttgacacatttcttacaagctctgtgttttaatagtcaaaggcattgctaccctttgctttttgaaagagtgaactggtaacagtagccgccagagaaagaggtgacaatctaaacaaagagccctgcttacctttctgtgactaaaactagtcttaaaaactgaatacatttggggcatccttatgaaataggtaaaggtcaacattgggagtgtccctaccttggcagatagaccaatacttttttcctagactcaacccatttttaaagcaggagtttttccaatggatttattgtttataattctactaaacatgtcttagtccacgcaaattaactcaaaatctttggtggcctgaaaattctgactgaaagcaagtttttcgtgttgcccagttgatagtccataataaaaaatgtacatatcttgtttaaaaaagaccttgatgtttgagaagaaatatcggaagtctgccagtaaaaactctgattaagtgaggaacatgtacattaaaagatattttcatgtaagttattttaagatagttgcattctaggaccatgtttcttttttgagagtgtttctttgtcaagttccttatagccaatgccttgaccaaagcttactaattttgccacatttccttgtgggttatgataatctttattaattcacaactctaccaaattataatacagtcttttattatgccaccatatgaatgcagctgcaaattcaattttgtgaaatacaaagtcctttccagaattttaaaacttaatttcagtatagattttaagtttgtgaataagaaattagtatttgtataccttattatgacagaggtttctgttacaatattttctcttatagtgttgggataggatttgacctgtattttcaggttaaagctggtctttgagatctactttttaagaaattaataaattttattttttagagttttaggttcacagcaaaattgatcctaaaatatagagttctcatatactccaaacacaaccttcttccccgtgaacattttgaacaccacagtgctatatttgttacaactgatgaaccttcattgacataacattatcacccaaagtgcatagttcatattaaggttcactcttggtgttgtgtattttatgggttttgaccaatgcacaatgacgtgtgtccactattgtagtatcatacagaagattttcactgccctaaaaatcctctgtgctctgcctattcattcctccctcccacctaagccctggcatccactggtccttgtactgtccccagagttttgccttttccagaatgtcatacagtatgtagccttttcagattggcttttttttttttcacttagggatagtcatgtaagttttcatgtctttttatggcttgatagttcatttattttaagtgctgaataatatttcattgtctggttgtatcaccatttatgacctatttgctcttatttctagttccagttgctatggcaaattttattaaagtgcgtgctctcaggaaaagctgcatatattttatatgatccatcaaataaaatgtagcaacttccagtctagaataaatttcacctatatgatattgagcttgttttacattgggggaggagatttatgaaaaaatataataatttcataatttatattaccctatctatgagtttttccctccattggaatctaaacagaaagttctgaaggttatgaagacgtgatcccaaatttagtgactctgtagtgtcttttgttgagcaatgagttaaatacctgtcgataaaaagtgttaattatgttattactgattcatgatagaaaatcaccttctgtcgctagtttatatgactttacatttaccactcctgccaagagaaaggaagctttgtgattgtgccccgtcatagttaattgtacaaatcaattaaaaatggtatgtaagcatctggctcacacagcagctctgaattctgaatgaaaagataacccatgctaatgtatatgttgcatgaacaagtagatgggtgttggaaagaaaacactgatagtcactctgggtgaagggggaggcctggccaatgatttgtatctgagaaacattttgagattatttatatgtcttctgactgccctttgctttgtagctacagcaacttgcagaacctggcattattgcagagatgaaggtatagttgtataaagaatattggattaaagttgatgaggcctgtgttctgatatcaaatcttccactaatgagctctaaaatgaatatcaagtcacaattttttcaagccttcattgttgcatctatcagatgggaatagtaatactcattttacctatttttaccaggtggttgtaggaacaggattcattcattccttcattaatataatgaacactttgagaccccactatataacagggccatacatatgacaaggtgatagatggaaagacgttttgcagaatttttgaagacttgcaatgtttttgaagactacaggatagtttgtgatttttatattaaggtcgtatcaactctttatgtcaatatatcaaagtaattgacacttttagagctctgccaatcagtgggccatattcatagaatgtcagtaatctgtctgaatacaagttatagttggtctttagctgttctgtctctgaggagctagaaataaaatattaggttctaatttttttttgttcaaacactgatcatgtaacaaactgcaaatccatgttttcagcaggttcgccaacctttgagttgaatgcagacctttctttagaacaacctaactttgagtacaggcaaagtattaaatggaatagcttttcctcccctacaaagtggatttgaatacagtccttagaaaaattcttcccctgccaaaaaaggtccttcaatctcctttattatttttcttttgaagaatcaaacttgtccatctctcccctcccaagtgactttcctcactcatgtaatcattttcttcataaatgcccttttactatcccacagaaaaagtaaagatttaaaaaatcatttttaaggtacatccaagatttcatagcaatattttatttgtgttcacagtgcaagataaatctgactttctcaatatttttggtcttcatatggcatctgaaacagttgttcacattcacacatttatgtttcaccatatgcatactgtgtacagctctgttgttctaaaatattttattggttttcctttatatctcaacttttgatgggtgtccttgaagaactttcatgaaaaaaatgtaaatgtgaatgattcattcattttgaacatatgtaactattttaggagattttcaggagattttaccctacatggagtacactgttcttagcagggaatgtgctttatattactattctactcacagctggatgctgcagatgtattaacattgtaaacatgtactttttctattctatgcttactttaatacattatttatatgtgctagactgtgctgagttttggtggttgtcaaaggcagtcagtaattttataaatttcacttttgtggatagttaagtataacatggtttagtataaaatctggtcttcctctagatttctaagtcactagaagaatttcttggcaaattgattgttcaaggccagttttgttagttgtaaggtggaagccaccccaatcctctcccagtgtttcataggcattttcagacctggatgctattatagttcctcctctagttttccagtagagaattcgtatgtggtccagaggttcaagagagagagagaaaaaatttctcctcaaaagaattgaacccttactttagaaacttctgacaatcttcagaacattccatgtgggtgtccttgtgtttctcatagtatgacttattgattcatggtgtctcttattaaagaagcatgaatgtatcactagctgttaccagaacaaacagctgtagaatgtaatgacccatcctatttctaaatttacttctatcagtggataatttgtgtataggaaaaggtgtggaaattttttaattgttaaaaactggaatacctttctaccttttgtagtctttaagatttcataatgatggttttaatgtattactatcttactattatgtattgtgtttaaacaagaccaatcagtgaaatattgaatgtcaatactttttgttagaaatgccctctgaaaatgttagaaaatgtaaaactttacctgtgacaaggaataaattcatgattagaagaattatactgtttttcttgtgcaaataatacttaaggcagatgttcagtctcacagtgatgttggaaagcatattttatgcagtctaaacactatttctgtattagatatttaaatgcatgaggataaattctaattgctttttgtttaaaacagaaacatagaagaagcattagccccagtttgtataaaatgtctgctgcaactgaattcatgatagttcatgaaaactgaaaatcattccaattttgtaaaactgctgctactggttttatcaataaagttttagcagatggcttata

SEQ ID NO: 188216 - DNA, 3081 bp, Homo sapiens
  Payload ID: 17039
  Gene Symbol: SYT17
  Gene Name: synaptotagmin XVII
  Uniprot ID: Q9BSW7
  ENST ID: ENST00000355377
  CDS Start-End: 399-1823
ccccggcgtctccggccccgcctgcgctggggtcgctgcagtccccgcagctgccccgggctgcttgcccaggcgccccggccttattccagcctggggagcgcctcggtggggagcacgggacagcgagggaggccgaggcgggggccctgggcgcccgatatctccgaaccggggaggcggccccgattccgagagccggaacgcagggaaaggcaaggacggggcggccggcggaggggcgggcgccgctcatcagccacgccagtcacgtctggggccaccggctgcctttttcttcctttccccctttgctttcttccccctccgctgttggcgagggcaaagtggccgtggcggcgccatgcccgggccggagtgagtgcgcgcgggcgaaaatggcgtacatccagttggaaccattaaacgagggttttctttctagaatctctggtctgctgctgtgcagatggacctgccggcactgctgtcagaagtgctacgagtccagctgttgccagtcaagtgaggatgaagttgaaattctgggacctttccctgctcagacccctccctggctgatggccagccggagcagtgacaaggatggtgactctgtccacacggccagcgaagtcccgctgaccccacggaccaattccccggatggaagacgctcgtcctcagacacatccaagtctacatacagcctgacgcggaggatttcgagtcttgagtcaagacgtcccagctctccactcatcgatattaaacccatcgagtttggcgttctcagcgccaagaaggagcccatccaaccttcggtgctcagacggacctataaccccgacgactatttcaggaagttcgaaccccacctgtactccctcgactccaacagcgacgatgtggactctctgacagacgaggagatcctgtccaagtaccagctgggcatgctgcacttcagcactcagtacgacctgctgcacaaccacctcaccgtgcgcgtgatcgaggccagggacctgccacctcccatctcccacgatggctcgcgccaggacatggcgcactccaacccctacgtcaagatctgtctcctgccagaccagaagaactcaaagcagaccggggtcaaacgcaagacccagaagcccgtgtttgaggagcgctacaccttcgagatccccttcctggaggcccagaggaggaccctgctcctgaccgtggtggattttgataagttctcccgccactgtgtcattgggaaagtttctgtgcctttgtgtgaagttgacctggtcaagggcgggcactggtggaaggcgctgattcccagttctcagaatgaagtggagctgggggagctgcttctgtcactgaattatctcccaagtgctggcagactgaatgttgatgtcattcgagccaagcaacttcttcagacagatgtgagccaaggttcagacccctttgtgaaaatccagctggtgcatggactcaaacttgtgaaaaccaagaagacgtccttcttaaggggcacaattgatcctttctacaatgaatccttcagcttcaaagttccccaagaagaactggaaaatgccagcctagtgtttacagttttcggccacaacatgaagagcagcaatgacttcatcgggaggatcgtcattggccagtactcttcaggcccctctgagaccaaccactggaggcgcatgctcaacacgcaccgcacagccgtggagcagtggcatagcctgaggtcccgagctgagtgtgaccgcgtgtctcctgcctccctggaggtgacctgagggctgcagggaaggcagctttcatttgtttaaaaaaaaaaaaaaaagacggaaaaaaatgtgtcacatactattacatccacacctgcatacacactcgcaacatgtctacacacgtccacacacacagacacacagataccccaaatcctctcagaactgagaggaagctgactattgatcacaaaatggccgccctcagttgagtgaggcctaggaactttccggaagccccatccatagatcacaagctcagtgggctctgccgtgggacttattggcagtgcctgctcttgtcaatactcctgccccaaaatgcactttcaaccctcaggccagagaaaggacctcccaaagggtgccaagctccatcaagactaaatttaccaagagtttggccagtgtgtgggagacttgaacaccccccacttccgaaacacacacctactgggtaacttctgaacaggctgctgttccctggggttcttcaaacctgatacctttctccaaaggtgtaagtatctttgtcttctccgtagtaaatgtgataactagattatgggccatttggagaaaccaaatggcaaccaaaactattccagtgtcagaagcctttcctggcttaacagaattgttcttgtgttagctcatcccagggaacgccctgtgggtatgtatgtgtatgtcctcgtgcatgtgccctcacaggcgaacacgtgtgtgcctatgtgtcctcttggagagcatggcgatgggccaggacctcagccctgagcactgccttctctctgcctctcctgtccagtgagagtccaaccagtgtcctcctgtctgtcagagatcccactttggataaaagtagtgtgtgtgtgtgtgtgtgtgtgtgtgtgtgtgtgtaaagtaaataggatatgatagagcaaaagtaacattttttgaccgaatcatggtgattgtgacccacgaaagacatacaaagacttgatatatggattaaaatggctatcacaccccatccatgatgatcttcttccttaatcatactctgaggatctttctgtgtttttctgtgaacgaatgtcacgtctctcgtgctaaggaattagtgtagttagaatagatctctctctctctctctttctctctctctctttcctctctctctgttggatgcttctgtatctttttccacagcataatgtctggtgtgatggggagctatttattgaaattaaagattatttatttgtgccatgca

SEQ ID NO: 188217 - DNA, 551 bp, Homo sapiens
  Payload ID: 17039
  Gene Symbol: SYT17
  Gene Name: synaptotagmin XVII
  ENST ID: ENST00000566261
  CDS Start-End: 272-551
agtttttccaacccagtttggggagagggctggatgggaaggaccctccctgctgcagacttcatggcaggctgcactgtgtcccctcggctccacggctgccccgggggcgctgctttcgggttttctttctagaatctctggtctgctgctgtgcagatggacctgccggcactgctgtcagaagtgctacgagtccagctgttgccagtcaagtgaggatgaagttgaaattctgggacctttccctgctcagacccctccctggctgatggccagccggagcagtgacaaggatggtgactctgtccacacggccagcgaagtcccgctgaccccacggaccaattccccggatggaagacgctcgtcctcagacacatccaagtctacatacagcctgacgcggaggatttcgagtcttgagtcaagacgtcccagctctccactcatcgatattaaacccatcgagtttggcgttctcagcgccaagaaggagcccatccaaccttcggtgctcagacggacctataaccccgacgactatttca

SEQ ID NO: 188218 - DNA, 1702 bp, Homo sapiens
  Payload ID: 17039
  Gene Symbol: SYT17
  Gene Name: synaptotagmin XVII
  ENST ID: ENST00000562711
  CDS Start-End: 259-1671
gttagctaatcatgtccttttgggttggctacatggctatttctgtataggaaggtttgctcttctcctgaagtgtggctgcattggatagcatgactatctatccgcccgctctgattcataacagcatacggtgcaaatcaaatcgaaatgctaaagtttcccatttatttggtgttggttaaccaggaggctaccagcagccctgaaaatagcaacaccttgttaggatgttaggaagtcagctcccttcccaggatgttggaaccattaaacgagggttttctttctagaatctctggtctgctgctgtgcagatggacctgccggcactgctgtcagaagtgctacgagtccagctgttgccagtcaagtgaggatgaagttgaaattctgggacctttccctgctcagacccctccctggctgatggccagccggagcagtgacaaggatggtgactctgtccacacggccagcgaagtcccgctgaccccacggaccaattccccggatggaagacgctcgtcctcagacacatccaagtctacatacagcctgacgcggaggatttcgagtcttgagtcaagacgtcccagctctccactcatcgatattaaacccatcgagtttggcgttctcagcgccaagaaggagcccatccaaccttcggtgctcagacggacctataaccccgacgactatttcaggaagttcgaaccccacctgtactccctcgactccaacagcgacgatgtggactctctgacagacgaggagatcctgtccaagtaccagctgggcatgctgcacttcagcactcagtacgacctgctgcacaaccacctcaccgtgcgcgtgatcgaggccagggacctgccacctcccatctcccacgatggctcgcgccaggacatggcgcactccaacccctacgtcaagatctgtctcctgccagaccagaagaactcaaagcagaccggggtcaaacgcaagacccagaagcccgtgtttgaggagcgctacaccttcgagatccccttcctggaggcccagaggaggaccctgctcctgaccgtggtggattttgataagttctcccgccactgtgtcattgggaaagtttctgtgcctttgtgtgaagttgacctggtcaagggcgggcactggtggaaggcgctgattcccagttctcagaatgaagtggagctgggggagctgcttctgtcactgaattatctcccaagtgctggcagactgaatgttgatgtcattcgagccaagcaacttcttcagacagatgtgagccaaggttcagacccctttgtgaaaatccagctggtgcatggactcaaacttgtgaaaaccaagaagacgtccttcttaaggggcacaattgatcctttctacaatgaatccttcagcttcaaagttccccaagaagaactggaaaatgccagcctagtgtttacagttttcggccacaacatgaagagcagcaatgacttcatcgggaggatcgtcattggccagtactcttcaggcccctctgagaccaaccactggaggcgcatgctcaacacgcaccgcacagccgtggagcagtggcatagcctgaggtcccgagctgagtgtgaccgcgtgtctcctgcctccctggaggtgacctgagggctgcagggaaggcagctttcatttgttt

SEQ ID NO: 188219 - DNA, 1721 bp, Homo sapiens
  Payload ID: 17039
  Gene Symbol: SYT17
  Gene Name: synaptotagmin XVII
  ENST ID: ENST00000568115
  CDS Start-End: 539-1717
ccggccccgcctgcgctggggtcgctgcagtccccgcagctgccccgggctgcttgcccaggcgccccggccttattccagcctggggagcgcctcggtggggagcacgggacagcgagggaggccgaggcgggggccctgggcgcccgatatctccgaaccggggaggcggccccgattccgagagccggaacgcagggaaaggcaaggacggggcggccggcggaggggcgggcgccgctcatcagccacgccagtcacgtctggggccaccggctgcctttttcttcctttccccctttgctttcttccccctccgctgttggcgagggcaaagtggccgtggcggcgccatgcccgggccggagtgagtgcgcgcgggcgaaaatggcgtacatccagaatctctggtctgctgctgtgcagatggacctgccggcactgctgtcagaagtgctacgagtccagctgttgccagtcaagtgaggatgaagttgaaattctgggacctttccctgctcagacccctccctggctgatggccagccggagcagtgacaaggatggtgactctgtccacacggccagcgaagtcccgctgaccccacggaccaattccccggatggaagacgctcgtcctcagacacatccaagtctacatacagcctgacgcggaggatttcgagtcttgagtcaagacgtcccagctctccactcatcgatattaaacccatcgagtttggcgttctcagcgccaagaaggagcccatccaaccttcggtgctcagacggacctataaccccgacgactatttcaggaagttcgaaccccacctgtactccctcgactccaacagcgacgatgtggactctctgacagacgaggagatcctgtccaagtaccagctgggcatgctgcacttcagcactcagtacgacctgctgcacaaccacctcaccgtgcgcgtgatcgaggccagggacctgccacctcccatctcccacgatggctcgcgccaggacatggcgcactccaacccctacgtcaagatctgtctcctgccagaccagaagaactcaaagcagaccggggtcaaacgcaagacccagaagcccgtgtttgaggagcgctacaccttcgagatccccttcctggaggcccagaggaggaccctgctcctgaccgtggtggattttgataagttctcccgccactgtgtcattgggaaagtttctgtgcctttgtgtgaagttgacctggtcaagggcgggcactggtggaaggcgctgattcccagttctcagaatgaagtggagctgggggagctgcttctgtcactgaattatctcccaagtgctggcagactgaatgttgatgtcattcgagccaagcaacttcttcagacagatgtgagccaaggttcagacccctttgtgaaaatccagctggtgcatggactcaaacttgtgaaaaccaagaagacgtccttcttaaggggcacaattgatcctttctacaatgaatccttcagcttcaaagttccccaagaagaactggaaaatgccagcctagtgtttacaggatccaacagccccataccagcctgcgaactgagtagtcacccagctcatggtatcagtccttggataccctcacctggaaatgaacatttccatggcataaagaagcaagtaaaggcaataaaagtagaatgattga

SEQ ID NO: 188220 - DNA, 5092 bp, Homo sapiens
  Payload ID: 17039
  Gene Symbol: SYT17
  Gene Name: synaptotagmin XVII
  ENST ID: ENST00000562034
  CDS Start-End: 3799-5040
ggggctattgagtagtcgcccaacaaacacttgggcgaccgcctactaagtgctggcactggggatacagtgatgaaaacagcacagttcctgcccctctgggtgcgcaatttagtgagaaatgaacatgattaccggctcctggagttcttaatggccgccttcagcacagagaaattaagtgacttgcccaaggccacatagctgcttaggggtcaaggtgggatctcaagaggggactgtggtagatatgttaagcatctcatatggcgatgacccagtgatgttggttttccttctagaacaaggtgttaaactttgttgtcctgtaaagtgccagatactattttttttctcttggaggctcacatggtctctgtcacaactattccactctgactatagcaccaaaactgctatggacagtagtaaatgagtgggcgtggctgtgttccaataaaactttatttgcaggcaccaaaatttgaattttgtatactttgcacgagtcaagaggcattcatcttttttttttttcaaccttttaaaaactcacaaattattcttagctcaagggctgtagcaaaacaggctgcggggctggttttgatctgcgagccttagtttgccaacctctgtttagaatgcatgggttgtctttcttcctctttctttctggtgtgaattggttctcttccatcggtgtcaaacacgtgagcccaggagacccaatgccagaaagactcagcatgcctgggaatgtcagggcaccctctttcatcttctttgctttctctctgctccttgacactcatcttgcacctgggctttgagaaagttggggaggctgtttttcagcagggccatgaggtgaccttgtctctgttcactttggtttcataaatggcctcttttgaccaccacatgtctaggaaatgcttccctgtattcagaaaatggtcatagattattatgaaaaagtatcactttatcctaacattctaaagcactttttcatgcaagccctatgagggtataatattttgctgttttgtgccctgctgtacctgccgggacaatacccagtgcctactgggttccactaggtcttgacaatcacctaattctcatcacagaaagggtgcattttatttttcagctggaccgcacgcaagtatttgcatagtcagtgtcctgtcccacctcaacagcacgcctttgaggtatagagtagcctttccactaaagaagaggtaaccgaggctcagagaggccccctgtcttgcccaagtcacatgatcagtcgatggtgagactaggactctagtacttcctggctcagcttgttgcgtggcccctcagcacctttgggtcttgttctgtgtatggtttgagttttggctttagagagtttgtgataagtgcctttgactatttcccaagctgttgctattcccttaccacttcgaggatttcaattttttcacaagccacgtaccacctatactatgatgatgatgatgatgatgatgatgatgatgatgattatgattattattttagacagggtctcactctgtcgcccaggctggagtgcagtggtgcgatctcggctcactgcaacctctgcttcccaggttcaagtgattctcctgcctcagcctccccagcagctgggattacaggcgcctgccaccacgcctggctaattttttgtatttttagaaaagagggggtttcaccatgttggccaggctggtctcaaactcctgacctcaggtgatccacccgccttggcctcccaaagtactgtgattataggcatcagccaccacgcccagccctacctatgctattattaacttaattttttttctataaatgggctcatttttatttttactttaaaaaaatcatatgaaaaggaaacattatgtcactaatatcataggaaaccaagatcatgtgacatcgcagaaggcaactagaagaataaacccaatgggaataatgccacattactgaattctaggtggacgtggctgtctccaagcctctggacaagatctactttctttgtttaaaagaaaggggatgggggagggtggaaattggtaagtggtaaaagatgttaacatgtagtggtaccaaattgagactttctcctccttaaaggagaatcggaaaaaagataataactttctccctcttgattcaaagttctgagtttgagtcccacctcagttcacctctgggacatgcccgaggttgggatgcagtacttctaacctatctagcctacttggcccatttggaaaaccaccttaaagagaaggagggagtctgtgccttgagaacccaggagacgaagatggggaggcggggtggggccacaacaggaagggaggacctccttcctcaagaggaccagattagggcttcctttttagttccctctatttgtgggtggtgataggaaacaccccaccatcaccattggagcagaattggaaggtagggcctccgggagggcgggggagccaagtaacatccactgtgtgcctgcctgcatgttagctaatcatgtccttttgggttggctacatggctatttctgtataggaaggtttgctcttctcctgaagtgtggctgcattggatagcatgactatctatccgcccgctctgattcataacagcatacggtgcaaatcaaatcgaaatgctaaagtttcccatttatttggtgttggttaaccaggaggctaccagcagccctgaaaatagcaacaccttgttaggatgttaggaagtcagctcccttcccaggatggtaagtggaaatatgcagggcttttttttttttttgtaaaatttttttgagttgctggaatattgctaaactggtcttgtctctctttctttaaccccttcgttcccttacgcccttggcttcatcgtggatcttaaaagggcagttggaaccattaaacgaggtgggttcatttgatgatttgtttggtctggtttctaatcaagaaatgcctgactttcattttggagtcttatgtggggctgtggggatattgaatattcaacaataacctggtgttaataacggcacagtttccattcctttctaccgaaaggagatcccggttttgaaaagacaccagttgacaagacaagtttccctctccacccctacttattccgtttgattatctctgtctgtttcatgtcaccgagattttttaaaaatattttttcccctgctttcaagaagacacagtaatattcattgtgtttcgaacatatcgtatagcccttatgatgttgtataaaccacccacatgtcaagaaagacgttcacataaactacaaaagaaaatacctgcaaatgttttgcttgctactaacggctccagcgagttgatgtttgctatctttgtgcctgcagttggtaaatagaaatggaaaacattttgttctaagtgctgagcagcagagccagaactcctgaatgtctatttctcatccgagatcggctgcttgtaattttgggtgttgtttctcctcttcctcttccccaccctgcccacctcccctctcccccatccccccgcccacctcccccaatggcctcagggttttctttctagaatctctggtctgctgctgtgcagatggacctgccggcactgctgtcagaagtgctacgagtccagctgttgccagtcaagtgaggatgaagttgaaattctgggacctttccctgctcagacccctccctggctgatggccagccggagcagtgacaaggatggtgactctgtccacacggccagcgaagtcccgctgaccccacggaccaattccccggatggaagacgctcgtcctcagacacatccaagtctacatacagcctgacgcggaggatttcgagtcttgagtcaagacgtcccagctctccactcatcgatattaaacccatcgagtttggcgttctcagcgccaagaaggagcccatccaaccttcggtgctcagacggacctataaccccgacgactatttcaggaagttcgaaccccacctgtactccctcgactccaacagcgacgatgtggactctctgacagacgaggagatcctgtccaagtaccagctgggcatgctgcacttcagcactcagtacgacctgctgcacaaccacctcaccgtgcgcgtgatcgaggccagggacctgccacctcccatctcccacgatggctcgcgccaggacatggcgcactccaacccctacgtcaagatctgtctcctgccagaccagaagaactcaaagcagaccggggtcaaacgcaagacccagaagcccgtgtttgaggagcgctacaccttcgagatccccttcctggaggcccagaggaggaccctgctcctgaccgtggtggattttgataagttctcccgccactgtgtcattgggaaagtttctgtgcctttgtgtgaagttgacctggtcaagggcgggcactggtggaaggcgctgattcccagttctcagaatgaagtggagctgggggagctgcttctgtcactgaattatctcccaagtgctggcagactgaatgttgatgtcattcgagccaagcaacttcttcagacagatgtgagccaaggttcagacccctttgtgaaaatccagctggtgcatggactcaaacttgtgaaaaccaagaagacgtccttcttaaggggcacaattgatcctttctacaatgaatccttcagcttcaaagttccccaagaagaactggaaaatgccagcctagtgtttacagttttcggccacaacatgaagagcagcaatgacttcatcgggaggatcgtcattggccagtactcttcaggcccctctgagaccaaccactggaggcgcatgctcaacacgcaccgcacagccgtggagcagtggcatagcctgaggtcccgagctgagtgtgaccgcgtgtctcctgcctccctggaggtgacctgagggctgcagggaaggcagctttcatttgtttaaaaaaaaaaaaaaaagacgg

SEQ ID NO: 188221 - DNA, 580 bp, Homo sapiens
  Payload ID: 17039
  Gene Symbol: SYT17
  Gene Name: synaptotagmin XVII
  ENST ID: ENST00000570264
  CDS Start-End: 343-580
ctctgcaagcctcaccgcaaccgtgctaggcgcgtcgggtggggcgggaataaagtttttccaacccagtttggggagagggctggatgggaaggaccctccctgctgcagacttcatggcaggctgcactgtgtcccctcggctccacggctgccccgggggcgctgctttcgttggaaccattaaacgagggttttctttctagaatctctggtctgctgctgtgcagatggacctgccggcactgctgtcagaagtgctacgagtccagctgttgccagtcaagtgaggatgaagttgaaattctgggacctttccctgctcagacccctccctggctgatggccagccggagcagtgacaaggatggtgactctgtccacacggccagcgaagtcccgctgaccccacggaccaattccccggatggaagacgctcgtcctcagacacatccaagtctacatacagcctgacgcggaggatttcgagtcttgagtcaagacgtcccagctctccactcatcgatattaaacccatcgagtttggcgttctcagcgccaagaaggagcccatccaac

SEQ ID NO: 188222 - DNA, 531 bp, Homo sapiens
  Payload ID: 17039
  Gene Symbol: SYT17
  Gene Name: synaptotagmin XVII
  ENST ID: ENST00000565183
  CDS Start-End: 1-427
gccagaccagaagaactcaaagcagaccggggtcaaacgcaagacccagaagcccgtgtttgaggagcgctacaccttcgagatccccttcctggaggcccagaggaggaccctgctcctgaccgtggtggattttgataagttctcccgccactgtgtcattgggaaagtttctgtgcctttgtgtgaagttgacctggtcaagggcgggcactggtggaaggcgctgattcccagttctcagaatgaagtggagctgggggagctgcttctgtcactgaattatctcccaagtgctggcagactgaatgttgatgtcattcgagccaagcaacttcttcagacagatgtgagccaaggttcagctggtgcatggactcaaacttgtgaaaaccaagaagacgtccttcttaaggggcacaattgatcctttctacaatgaatccttcagcttcaaagttccccaagaagaactggaaaatgccagcctagtgtttacaggatccaacagccccataccagcctgcgaac

SEQ ID NO: 188223 - DNA, 812 bp, Homo sapiens
  Payload ID: 17039
  Gene Symbol: SYT17
  Gene Name: synaptotagmin XVII
  ENST ID: ENST00000568433
  CDS Start-End: 264-770
atcgggctcttacaagaaaggaaatgaggcctgtttatttgtgacatcgcttccacaagggacgaggtagaagtgggcctgtcacccagttccttctcctgtcttggcttcgattctgtgggggttggataggacagggggtggaacatcgtgctgacaacccctctcggcccgtggtgtggcagcagctcagcctctgtgttgggggctgcactgcttgatcttggatttgtttctggtgctgtgaatatagtagtggacacatgggcactttctttgcctttatggagaaaaagaatgaagtggagctgggggagctgcttctgtcactgaattatctcccaagtgctggcagactgaatgttgatgtcattcgagccaagcaacttcttcagacagatgtgagccaaggttcagacccctttgtgaaaatccagctggtgcatggactcaaacttgtgaaaaccaagaagacgtccttcttaaggggcacaattgatcctttctacaatgaatccttcagcttcaaagttccccaagaagaactggaaaatgccagcctagtgtttacagttttcggccacaacatgaagagcagcaatgacttcatcgggaggatcgtcattggccagtactcttcaggcccctctgagaccaaccactggaggcgcatgctcaacacgcaccgcacagccgtggagcagtggcatagcctgaggtcccgagctgagtgtgaccgcgtgtctcctgcctccctggaggtgacctgagggctgcagggaaggcagctttcatttgtttaaaaaaaaaaa

SEQ ID NO: 188224 - DNA, 1370 bp, Homo sapiens
  Payload ID: 17040
  Gene Symbol:
  Gene Name: Synaptotagmin-15
  ENST ID: ENST00000615923
  CDS Start-End: 1-1333
aagagacggcctggcagcccagccccagccgcccagaccggcgagaccagcctgcgggagcagccccatggcggagcagctggccctggtgattgggggcaccatcggggggctgctgctgctgctgttgatcggggcaagctgctgtctgtggagaaggttctgtgccaccctcacctatgaggagctgcctgggacaccagccatggccaccacagctgcctccagtgggcagcgggacaggccctgccagccgcatgctaggacccaactgagcaggccaccagctgtgccattcgtggtgcccccaacccttcaaggccgagattgggtgcccctgcacagtggagagtgggccgatgccccatgggacccctgcccggcatcagagctgctgcctcacacctccagcggcggccttggagatgcatgtatggtgggggccatcaacccagagctgtacaagttcccagaggacaaaagtgagaccgacttccccgacggctgcctggggcggctgtggttctcggtggaatatgagcaggaggctgagcggctgctggtgggcttgatcaaggcacagcacctgcaagccccctcggagacctgcagccccctggtgaagctctacctgctgcccgatgagcggcgcttcctccaatccaagaccaaacgcaaaacctccaacccgcagtttgacgagcacttcatctttcaggtgtccagcaagaccatcacccagagggtgctgaagttctccgtctaccacgtggacaggcagaggaagcaccagctcctgggccaggtgctcttccccttgaagaatgagaccctagtgggggactgccggcgtgtcatctggagagacctggaggctgagagcctggagcccccctcggagtttggcgacctccagttctgcctcagctacaacgactacctgagccgcctgacggtggttgtgctgcgtgccaagggcctccggctccaggaggacagaggcattgtcagtgtgtttgtcaaagtgtctctgatgaaccacaacaagtttgtcaagtgcaagaagacttcagctgtgctgggctccatcaaccctgtgtacaatgagaccttcagcttcaaggccgatgccaccgagctggataccgctagcctcagcctgactgtggtgcagaacatggaaggggacaagagccagcagctgggccgagtggtggtgggcccctacatgtacacccgcggcagagagctggagcactgggacgagatgctcagcaagcccaaggagctggtgaagcgctggcatgcgctctgccgcaccacggagccctgacccttcgcccagcaccgcggttccgctttgggagccg

SEQ ID NO: 188225 - DNA, 1362 bp, Homo sapiens
  Payload ID: 17040
  Gene Symbol:
  Gene Name: Synaptotagmin-15
  ENST ID: ENST00000622861
  CDS Start-End: 154-1326
actgcgcggctccccgcgccgcagctgggcaccagcagcaccacggaccgcccctgtgctcgcccgacggcgccccgcggcgctttaagagacggcctggcagcccagccccagccgcccagaccggcgagaccagcctgcgggagcagccccatggcggagcagctggccctggtgattgggggcaccatcggggggctgctgctgctgctgttgatcggggcaagctgctgtctgtggagaaggttctgtgccaccctcacctatgaggagctgcctgggacaccagccatggccaccacagctgcctccagtgggcagcgggacaggccctgccagccgcatgctaggacccaactgagcaggccaccagctgtgccattcgtggtgcccccaacccttcaaggccgagattgggtgcccctgcacagtggagagtgggccgatgccccatgggacccctgcccggcatcagagctgctgcctcacacctccagcggcggccttggagatgcatgtatggtgggggccatcaacccagagctgtacaagttcccagaggacaaaagtgagaccgacttccccgacggctgcctggggcggctgtggttctcggtggaatatgagcaggaggctgagcggctgctggtgggcttgatcaaggcacagcacctgcaagccccctcggagacctgcagccccctggtgaagctctacctgctgcccgatgagcggcgcttcctccaatccaagaccaaacgcaaaacctccaacccgcagtttgacgagcacttcatctttcaggtgtccagcaagaccatcacccagagggtgctgaagttctccgtctaccacgtggacaggcagaggaagcaccagctcctgggccaggtgctcttccccttgaagaatgagaccctagtgggggactgccggcgtgtcatctggagagacctggaggctgagagcctggagcccccctcggagtttggcgacctccagttctgcctcagctacaacgactacctgagccgcctgacggtggttgtgctgcgtgccaagggcctccggctccaggaggacagaggcattgtcagtgtgtttgtcaaagtgtctctgatgaaccacaacaagtttgtcaagtgcaagaagacttcagctgtgctgggctccatcaaccctgtgtacaatgagaccttcagcttcaaggccgatgccaccgagctggataccgctagcctcagcctgactgtggtgcagaacatggaaggggacaagcaggctactacagtggaactgtttctgtttcatctgacatccggatagatgccagccacccccacattccaaggtgagatttct

SEQ ID NO: 188226 - DNA, 5321 bp, Homo sapiens
  Payload ID: 17040
  Gene Symbol:
  Gene Name: Synaptotagmin-15
  ENST ID: ENST00000623662
  CDS Start-End: 589-2013
gttctaataatcaccataataataggcgctgggtgtacagaggggacccaggcgacgctggcctccatccgataaccaccgtaacaggggctgggccgcgccgctcctccgctctaagtgttctttacatgcttcttaagttaccggcaggccagccgcccttacgagagcccctcacggacattaacccaattgagaagactgaacccagcatacgaacgttaagttgtcccaaatcgcagggctggcgagtgaggagcctgaattggaacccaggagcttctggaacccgctccagaattgcgctctcgaccggtttgtccgctgagagcgaacgggtgcgcgagcgccgcatccctgcccaaggccatcaggcaggcagcgctggggcccgggacccgcgcggagactccaccccgggatccgggaaggctcccccgagccggggtcggagctgcggctggaggggcctcggcttgaggaggatctgggagggcgggggctcagtcctggccaccaggtgtgaggggtcgggtgcggagccctgtgtcagacgcggcggtgaaggctgtagccctgctctccgggatgggggtggtactctcaccgcaccctgccccaagccgcagggagcccctggcgcccctggcgcccgggacccgccctggctggagccctgcggtttccgggagctcacggtcggctctgcgcccctccaccgccgggcctgggcctgggccagggactggctggggcgggactgcggcctcggggcgctgggtccctgcccctgccgtgcactgcgcggctccccgcgccgcagctgggcaccagcagcaccacggaccgcccctgtgctcgcccgacggcgccccgcggcgctttaagagacggcctggcagcccagccccagccgcccagaccggcgagaccagcctgcgggagcagccccatggcgggccaccagctgtgccattcgtggtgcccccaacccttcaaggccgagattgggtgcccctgcacagtggagagtgggccgatgccccatgggacccctgcccggcatcagagctgctgcctcacacctccagcggcggccttggagatgcatgtatggtgggggccatcaacccagagctgtacaagttcccagaggacaaaagtgagaccgacttccccgacggctgcctggggcggctgtggttctcggtggaatatgagcaggaggctgagcggctgctggtgggcttgatcaaggcacagcacctgcaagccccctcggagacctgcagccccctggtgaagctctacctgctgcccgatgagcggcgcttcctccaatccaagaccaaacgcaaaacctccaacccgcagtttgacgagcacttcatctttcaggtgtccagcaagaccatcacccagagggtgctgaagttctccgtctaccacgtggacaggcagaggaagcaccagctcctgggccaggtgctcttccccttgaagaatgagaccctagtgggggactgccggcgtgtcatctggagagacctggaggctgagagcctggagcccccctcggagtttggcgacctccagttctgcctcagctacaacgactacctgagccgcctgacggtggttgtgctgcgtgccaagggcctccggctccaggaggacagaggcattgtcagtgtgtttgtcaaagtgtctctgatgaaccacaacaagtttgtcaagtgcaagaagacttcagctgtgctgggctccatcaaccctgtgtacaatgagaccttcagcttcaaggccgatgccaccgagctggataccgctagcctcagcctgactgtggtgcagaacatggaaggggacaagagccagcagctgggccgagtggtggtgggcccctacatgtacacccgcggcagagagctggagcactgggacgagatgctcagcaagcccaaggagctggtgaagcgctggcatgcgctctgccgcaccacggagccctgacccttcgcccagcaccgcggttccgctttgggagccgaccatcctcgcagttgcatgtgacagccacagccacacgcatggacgtttcatccaacagctccccgagctgccagccagcccgagccaggaggacgtgagtgctgatatgcaggagagaagaggggacaaagaagccctggcccggtcagcggctctggccatacagccttccgacacactccctcctccttatctgcggggctgcctgggctcggaatcccggctcctggtcctcacagccctgatttggaccagaatctcagatgctcagaagaaagatcctgtttagtgatgacccagctctacctgctgaatggacctgcagggtaaacttgggtgcctccatctgggaaagctgatgatgtgttcatgcagtcgatgaccctcactgctttttcagccagggtttctctgccttctgcctggcagagaaaacacactgctatggggaaaatcacagggagggcgctgtgaccagcgcactcaggcaccaagtgtcggcatggctcactgtgctgggtgaaggcctccccgagcattaggtcctccacggggctgtgtcaaatgccctcccacattgtatcaagtctgcccatggcccaccctccccacagtccaaaaccacacagccctggttctccagctgttctgctgctgtttctgtgctctccctgattaagagcattcagttcctgggctctccctttgagcaggaaatggtgaaagcatgtggctatggtatagcccacagggctgagattgctgtgttgcagtattgatgtaaaatttgttaagaaggaagtacccacagatcactgccatcaactccccagaagttgcactcaagctagtgagcagcccttgtgcttgtcacagttactgtaacaggtagtgtgtatttgcacctggcatcgtgcagcctgcacgtcaacacgttgttttgtgtaactagaacagcacatggaaccactatctctttctcttttttccttctttttcttttttttttttattttaattttttgagacagagtttccctcttgtcacccaggctggagtgcaatggcgtgatctcggctcactgcaccctccacctcccaggttcaagcgattctcctgcctcagcctcccaagtagctgggattactggcgcccgccaccatgcctggctaattttttttatttttagtagagacggaattttaccatgttggctaggctggtctcaaattcctggcctcaggtgatccacctgcctcagcctcccaaagtgctgggattacaggcatgagtcaccgcacccagcccgaccagtatctttttcttatgcagtgaaacaactttagcaaaagaggcaatgaatgttatactgagtttctacctctttaactccacctccaatttctgtcaatctacaaacacaagtgtcgcctcgcagtgtttcgtatgaacagaatatcttgtgtttgctttttgtcacttatttcacttgcacattttttgtttgtttgtttgtttgtttgtttgttttttgagatggagtcttgctctgtcgcccaggctggagtgcggtggcgcgatctaggcttactgcaagctccgcctcccgggtttacttacaccactgtcctgcctcagcctccggagtagctgggactacagacacctgccaccacgccctgctaattttttgtattttcaagtagagacggggtttcactgtgttagccaggatggtctcgatctcctgacctcatgatctacccgcctcggcctcccaaagtgctgggattacaggcgtgagccaccacgcccggcccacttgcacattttcaaagtagtccgcaaagctgtagtttctaatagcttcatagctcacatgtaataggggttctctgtgtgtttatagagcaggctactacagtggaactgtttctgtttcatctgacatccggatagatgccagccacccccacattccaaggtgagatttctgactagcagtgacttttctagggccgcttggaaaagttgataagtatccttttctgcaggacagagtagactggtatctctgactcatccctgaaaaatctaaatggcaagagactagctggctctctgctctgatggggaggaggttgttgtttgggctgttctctacagacatagtcagggcaaaaagcatacgcatgcttcccatggaccagagaaacctggcctgggttgtctcaaatcctgtccacaaggcaactccagaagaaagaagccctttacatttccataaaacactttagaatcagctagtcaatttccacaaaataaagtgctagaatttgattggatttaattgattatgtagaacaatttgggggccatttgacatcattaaaatattcaatcttcctattcattaacatggtatatctcttcactttaagtcttttgtatgtttctcagaactatttttgtggttttcagtaaagtgttcttgcacatccttcaatagatttattcttagacgttttatatttgtttatggctagtatatacagattctgttgctacaaaactatgttgaccttgttatccagtgagaggctttgtgacattcatttaaattgtaataatttgcagattatttttgtataatcatgtcctctgtgaatgacagttttatttcttcctttcttaatctttatgccttatttagctcttgccaaactgcagtggctgagcaattggacaagataaagaaataaaagtgatccagatcataaagaaagaagtaaaactatatctgcacatgacataatcttgtctatggaaaatcctaaggaatccacacacaaaaaaactactagagctaataagtttggcaaggttgcaagatataaaattggtatacaaattgcagtggctaggacctccagcagaatgctgactataagtagtgatagtgggtattcttgtccatcctcaatctcaggggtggtgggtgtggcatgtggagagttgtcaatattcaccatgaagtttgatggttgttataggatttttaatgtactcattaacatatattctcaagctgttaaaaagatttttttaattacaaataaggttaaatttctctcaaatacttactctgcaccttttgaaataattttatttttctcctttattctttggatgtgatgacttatactaattgactgttgaatgtcaaaccaaacttaacattcttgtaatagaaaccagcagggtgtgt

SEQ ID NO: 188227 - DNA, 1900 bp, Homo sapiens
  Payload ID: 17041
  Gene Symbol: SYTL1
  Gene Name: synaptotagmin-like 1
  Uniprot ID: Q8IYJ3
  ENST ID: ENST00000318074
  CDS Start-End: 168-1820
agctgctggctgggctgcctgttgagtcagccttcttccctcacggctcttctcccggtccctgaaactcggctgccaggggagctggagccacctgcgaaggtgtcctcccatactggacccctacaggaagctccgtgtgcccagctggggcacagccccagctgatgccccagaggggccacccatcgcaagaggggctttgggctctgccctccctccccatggcgcatgggccaaagcctgagactgaaggactgttggacctcagcttcctgacagaggaggagcaggaggccattgctggcgtcctccaacgagatgcccgcctgcgccagctggaggaggggcgggtcagcaagctccgggcctcagtggcagaccctgggcagctgaagatcctgacaggggactggttccaggaagcacgctcccagcggcaccacaatgcccacttcggctctgaccttgtccgagcgtctatgcgcaggaagaagagcaccaggggagaccaggctccaggccacgacagggaggctgaggctgctgtgaaagagaaggaagaggggccagagcccaggctcaccattgatgaggcccctcaggagaggctcagggagactgaggcttcagatcctgaggaggcgtcccaggcccaggaagatcctggccaaggagaccaacaggtctgtgccgaggaggctgacccggagctggagcccgcgtcggggggagagcaggagccgcggccccagcaagcccagaccaaggccgcgtcccagatcctggagaatggggaggaggccccggggcccgacccctctctcgaccgcatgctcagcagcagctcctcggtgtccagccttaactcctccacgctgagcggcagccagatgagcctgtcaggcgacgcggaggcggtgcaggtccgcggctccgtgcacttcgcgctgcactacgagccgggcgccgccgagctgcgcgtgcacgtgatccagtgccagggcctggccgccgcccggcgccgccgctcggacccctacgtcaaaagctacctcctcccggataagcagagcaagcgcaagacggcggtgaagaaacggaatctgaatccggttttcaacgagactctccggtactccgtcccgcaggccgagcttcagggccgcgtgctgagcctgtctgtgtggcaccgcgaaagcctgggtcgcaacatctttctgggcgaagttgaagtgcccctggacacgtgggactggggctctgagcccacctggctccccctgcagccccgggtcccaccctctcccgacgaccttccgagccgcgggttactcgccctgtccctcaagtacgtccccgccggctccgagggcgcaggactgcccccgagcggggagctgcacttctgggtgaaggaggctcgggacctcctgccgctgcgggcaggatccctggacacttacgtacaatgcttcgtgctgcctgatgacagccaggccagccgccagcgtacaagggttgtgcgacgcagcctcagccctgtgttcaatcacaccatggtgtacgatggctttgggcctgctgacctgcgccaggcttgtgccgagctctccctctgggaccatggggccctggccaaccgccagctggggggcacacgcctcagcctgggcaccggcagcagctatgggctgcaggtgccctggatggattccacacctgaggagaagcagctgtggcaagccctcctggagcagccgtgcgaatgggtggatggccttctacccctcagaaccaacctggcccccaggacgtagccccaccaagcctctctctctggacccccatctcagggcctgcccttggctaaagtcaataaagtctattctaagagcaa

SEQ ID NO: 188228 - DNA, 312 bp, Homo sapiens
  Payload ID: 17041
  Gene Symbol: SYTL1
  Gene Name: synaptotagmin-like 1
  ENST ID: ENST00000473280
  CDS Start-End: 84-312
tgcccctcagcgctgggcaaatgctttctttccggagtcactgtggaagctccgtgtgcccagctggggcacagccccagctgatgccccagaggggccacccatcgcaagaggggctttgggctctgccctccctccccatggcgcatgggccaaagcctgagactgaaggactgttggacctcagcttcctgacagaggaggagcaggaggccattgctggcgtcctccaacgagatgcccgcctgcgccagctggaggaggggcgggtcagcaagctccgggcctcagtggcagaccctgggcagctga

SEQ ID NO: 188229 - DNA, 2229 bp, Homo sapiens
  Payload ID: 17041
  Gene Symbol: SYTL1
  Gene Name: synaptotagmin-like 1
  Uniprot ID: Q8IYJ3
  ENST ID: ENST00000543823
  CDS Start-End: 463-2151
gtgtgtgcatgtctctcgtgggcatgggtccgggtctgtgtctgcagagggccctttctgggggaacagctgtgcatgcgcctgtctttatgcaggtgtctgtgtgcatgtgcgaccatatctatgcctacatggacccgcgtgtgcacatgtgtctgtgtgttccatcgctgcagtcctgtgtggccctacctcagggtgtgtgcatgtgtgtctcttgcttcttccactgtgtctccaagtgtgttcaagggctagtgtatgcatgtgtgcatgagtgtctctcaccccaccttgagctcagccatcctggggtggcaccctacccatacccggccaagtgtttggggagaaaagggctgttggttctaggatgtgccaagcatttgtgcagggcttgacctgaccctcggtctgcccccaggaagctccgtgtgcccagctggggcacagccccagctgatgccccagaggggccacccatcgcaagaggggctttgggctctgccctccctccccatggcgcatgggccaaagcctgagactgaaggactgttggacctcagcttcctgacagaggaggagcaggaggccattgctggcgtcctccaacgagatgcccgcctgcgccagctggaggaggggcgggtcagcaagctccgggcctcagtggcagaccctgggcagctgaagatcctgacaggggactggttccaggaagcacgctcccagcggcaccacaatgcccacttcggctctgaccttgtccgagcgtctatgcgcaggaagaagagcaccaggggagaccaggctccaggccacgacagggaggctgaggctgctgtgaaagagaaggaagaggggccagagcccaggctcaccattgatgaggcccctcaggagaggctcagggagactgagggacctgatttcccatcgccttctgtccccctaaaggcttcagatcctgaggaggcgtcccaggcccaggaagatcctggccaaggagaccaacaggtctgtgccgaggaggctgacccggagctggagcccgcgtcggggggagagcaggagccgcggccccagcaagcccagaccaaggccgcgtcccagatcctggagaatggggaggaggccccggggcccgacccctctctcgaccgcatgctcagcagcagctcctcggtgtccagccttaactcctccacgctgagcggcagccagatgagcctgtcaggcgacgcggaggcggtgcaggtccgcggctccgtgcacttcgcgctgcactacgagccgggcgccgccgagctgcgcgtgcacgtgatccagtgccagggcctggccgccgcccggcgccgccgctcggacccctacgtcaaaagctacctcctcccggataagcagagcaagcgcaagacggcggtgaagaaacggaatctgaatccggttttcaacgagactctccggtactccgtcccgcaggccgagcttcagggccgcgtgctgagcctgtctgtgtggcaccgcgaaagcctgggtcgcaacatctttctgggcgaagttgaagtgcccctggacacgtgggactggggctctgagcccacctggctccccctgcagccccgggtcccaccctctcccgacgaccttccgagccgcgggttactcgccctgtccctcaagtacgtccccgccggctccgagggcgcaggactgcccccgagcggggagctgcacttctgggtgaaggaggctcgggacctcctgccgctgcgggcaggatccctggacacttacgtacaatgcttcgtgctgcctgatgacagccaggccagccgccagcgtacaagggttgtgcgacgcagcctcagccctgtgttcaatcacaccatggtgtacgatggctttgggcctgctgacctgcgccaggcttgtgccgagctctccctctgggaccatggggccctggccaaccgccagctggggggcacacgcctcagcctgggcaccggcagcagctatgggctgcaggtgccctggatggattccacacctgaggagaagcagctgtggcaagccctcctggagcagccgtgcgaatgggtggatggccttctacccctcagaaccaacctggcccccaggacgtagccccaccaagcctctctctctggacccccatctcagggcctgcccttggctaaagtcaataaagtctattctaagagc

SEQ ID NO: 188230 - DNA, 1878 bp, Homo sapiens
  Payload ID: 17041
  Gene Symbol: SYTL1
  Gene Name: synaptotagmin-like 1
  Uniprot ID: Q8IYJ3
  ENST ID: ENST00000616558
  CDS Start-End: 149-1837
tgttgagtcagccttcttccctcacggctcttctcccggtccctgaaactcggctgccaggggagctggagccacctgcgaaggtgtcctcccatactggacccctacaggaagctccgtgtgcccagctggggcacagccccagctgatgccccagaggggccacccatcgcaagaggggctttgggctctgccctccctccccatggcgcatgggccaaagcctgagactgaaggactgttggacctcagcttcctgacagaggaggagcaggaggccattgctggcgtcctccaacgagatgcccgcctgcgccagctggaggaggggcgggtcagcaagctccgggcctcagtggcagaccctgggcagctgaagatcctgacaggggactggttccaggaagcacgctcccagcggcaccacaatgcccacttcggctctgaccttgtccgagcgtctatgcgcaggaagaagagcaccaggggagaccaggctccaggccacgacagggaggctgaggctgctgtgaaagagaaggaagaggggccagagcccaggctcaccattgatgaggcccctcaggagaggctcagggagactgagggacctgatttcccatcgccttctgtccccctaaaggcttcagatcctgaggaggcgtcccaggcccaggaagatcctggccaaggagaccaacaggtctgtgccgaggaggctgacccggagctggagcccgcgtcggggggagagcaggagccgcggccccagcaagcccagaccaaggccgcgtcccagatcctggagaatggggaggaggccccggggcccgacccctctctcgaccgcatgctcagcagcagctcctcggtgtccagccttaactcctccacgctgagcggcagccagatgagcctgtcaggcgacgcggaggcggtgcaggtccgcggctccgtgcacttcgcgctgcactacgagccgggcgccgccgagctgcgcgtgcacgtgatccagtgccagggcctggccgccgcccggcgccgccgctcggacccctacgtcaaaagctacctcctcccggataagcagagcaagcgcaagacggcggtgaagaaacggaatctgaatccggttttcaacgagactctccggtactccgtcccgcaggccgagcttcagggccgcgtgctgagcctgtctgtgtggcaccgcgaaagcctgggtcgcaacatctttctgggcgaagttgaagtgcccctggacacgtgggactggggctctgagcccacctggctccccctgcagccccgggtcccaccctctcccgacgaccttccgagccgcgggttactcgccctgtccctcaagtacgtccccgccggctccgagggcgcaggactgcccccgagcggggagctgcacttctgggtgaaggaggctcgggacctcctgccgctgcgggcaggatccctggacacttacgtacaatgcttcgtgctgcctgatgacagccaggccagccgccagcgtacaagggttgtgcgacgcagcctcagccctgtgttcaatcacaccatggtgtacgatggctttgggcctgctgacctgcgccaggcttgtgccgagctctccctctgggaccatggggccctggccaaccgccagctggggggcacacgcctcagcctgggcaccggcagcagctatgggctgcaggtgccctggatggattccacacctgaggagaagcagctgtggcaagccctcctggagcagccgtgcgaatgggtggatggccttctacccctcagaaccaacctggcccccaggacgtagccccaccaagcctctctctctggacccccatctcagggcct

SEQ ID NO: 188231 - DNA, 1712 bp, Homo sapiens
  Payload ID: 17041
  Gene Symbol: SYTL1
  Gene Name: synaptotagmin-like 1
  ENST ID: ENST00000618673
  CDS Start-End: 170-1663
gcagctgctggctgggctgcctgttgagtcagccttcttccctcacggctcttctcccggtccctgaaactcggctgccaggggagctggagccacctgcgaaggtgtcctcccatactggacccctacaggaagctccgtgtgcccagctggggcacagccccagctgatgccccagaggggccacccatcgcaagaggggctttgggctctgccctccctccccatggcgcatgggccaaagcctgagactgaaggactgttggacctcagcttcctgacagaggaggagcaggaggccattgctggcgtcctccaacgagatgcccgcctgcgccagctggaggaggggcgggtcagcaagctccgggcctcagtggcagaccctgggcagctgaagatcctgacaggggactggttccaggaagcacgctcccagcggcaccacaatgcccacttcggctctgaccttgtccgagcgtctatgcgcaggaagaagagcaccaggggagaccaggctccaggccacgacagggaggctgaggctgctgtgaaagagaaggaagaggggccagagcccaggctcaccattgatgaggcccctcaggagaggctcagggagactgaggcttcagatcctgaggaggcgtcccaggcccaggaagatcctggccaaggagaccaacaggtctgtgccgaggaggctgacccggagctggagcccgcgtcggggggagagcaggagccgcggccccagcaagcccagaccaaggccgcgtcccagatcctggagaatggggaggaggccccggggcccgacccctctctcgaccgcatgctcagcagcagctcctcggtgtccagccttaactcctccacgctgagcggcagccagatgagcctgtcaggcgacgcggaggcggtgcaggtccgcggctccgtgcacttcgcgctgcactacgagccgggcgccgccgagctgcgcgtgcacgtgatccagtgccagggcctggccgccgcccggcgccgccgctcggacccctacgtcaaaagctacctcctcccggataagcagagcaagcgcaagacggcggtgaagaaacggaatctgaatccggttttcaacgagactctccgggtcccaccctctcccgacgaccttccgagccgcgggttactcgccctgtccctcaagtacgtccccgccggctccgagggcgcaggactgcccccgagcggggagctgcacttctgggtgaaggaggctcgggacctcctgccgctgcgggcaggatccctggacacttacgtacaatgcttcgtgctgcctgatgacagccaggccagccgccagcgtacaagggttgtgcgacgcagcctcagccctgtgttcaatcacaccatggtgtacgatggctttgggcctgctgacctgcgccaggcttgtgccgagctctccctctgggaccatggggccctggccaaccgccagctggggggcacacgcctcagcctgggcaccggcagcagctatgggctgcaggtgccctggatggattccacacctgaggagaagcagctgtggcaagccctcctggagcagccgtgcgaatgggtggatggccttctacccctcagaaccaacctggcccccaggacgtagccccaccaagcctctctctctggacccccatctcagggcctgcccttgg

SEQ ID NO: 188232 - DNA, 4293 bp, Homo sapiens
  Payload ID: 17042
  Gene Symbol: SYTL2
  Gene Name: synaptotagmin-like 2
  Uniprot ID: Q9HCH5
  ENST ID: ENST00000316356
  CDS Start-End: 566-3373
cacccgggccgtgccgccagcgtccgtcgggagagtgaaggctcgcaacgccttgcccgggggaaggtaacgcgccgcgcccggggctgcgcggtttgcaccgccaggccgagggctgggggccagaagacaagagagacggcgaggcgcgctccctgcccggcagcgactcggaggtaggtgatgctctgatgctgctgcctcttatgaattgacgacaggtgcagagagagaataaactgtgtctaagactggaccagagagtgagtgtgctggaagccaccataggaacaagcgacctgtttggcaaggaatacagcatccttctgagagcctcttctcgacactatcccacagaccaggacttcctcatgggaaagagcacttaggatcttgctatcagctgccctaaacttttgctgagccaaaataagactttgatgcagaactgaacaagatatttcatttttgtgtgttttaatcttcctggttgcagtcttagttgttcagccctgagaattttgagccacatttgttgctattatttttgcatgcacttttcaaaatgattgacttaagcttcctgactgaagaggaacaagaggccatcatgaaggttttgcagcgggatgctgctctgaagagggccgaagaagagagagtcagacatttgcctgaaaaaattaaggatgaccagcagctgaagaatatgagtggccaatggttttatgaagccaaggcaaaaaggcacagggacaaaatccatggcgcagatatcatcagagcatctatgagaaagaagaggccccagatagcagctgagcagagtaaagacagagaaaatggggcaaaggaaagctgggtgaataatgtcaacaaagatgctttccttcctccagagctggctggcgttgtagaagagccagaagaagatgcagcaccagcaagcccgagttccagtgtggtaaatccagcttccagtgtgattgatatgtcccaggaaaacacaaggaaaccaaatgtgtctccagagaagcagaggaagaatccgtttaatagctccaagttgccagaaggtcactcatcacaacaaactaaaaatgaacagtcaaaaaatggaagaactggtttatttcagacttcaaaagaggatgaattgtcagagtcaaaagaaaagtcaactgtcgcagatacttcaatccaaaagttagagaaatcaaagcagactttgccaggcctttcaaatgggtcccaaatcaaggctccaatccccaaagccaggaagatgatctacaaatcaactgatttaaacaaagatgataaccagtcttttcctagacaaaggacagactccctgaaagcgagaggggctccgagagggatcctcaagcgcaactccagttccagtagcacagactcagaaacccttcgttataatcacaactttgaacccaaaagcaaaattgtgtcacctggcctaaccatccatgagagaatttctgagaaggagcattctttagaagacaactcttccccaaactccctggagccattaaagcatgtgagattctctgcagtgaaggatgagcttccacagagtcctgggctaatccatggtcgggaagtaggagaatttagtgttttagaatctgacagattgaaaaatggaatggaagatgcaggggacacagaagagtttcagagtgaccctaagccttctcaatacagaaagccttcgctttttcatcaatcaacctcaagcccatatgtatcaaaaagtgaaacacatcagccaatgacttctggttcttttccaattaatgggctgcattctcattcagaagttttaactgcaagaccacagtctatggagaattcaccaaccatcaatgaacccaaagataaatcatcagaattaacaaggcttgaatctgtattacccagaagccctgctgatgaactgtctcattgtgttgagcctgagccatctcaggtgccaggtggcagttctagagaccgtcagcaaggttcagaagaagaacccagtcctgttttgaaaactttggaaaggagtgccgctaggaaaatgccttccaaaagtctagaagacatttcatcagattcatcaaatcaagcaaaagtagataatcagccagaagaattagtgcgtagtgctgaagatgtttccacagtgcctacacaacctgataatccattttctcaccctgacaaactcaaaaggatgagcaagtctgttccagcatttctccaagatgagagtgatgacagagaaacagatacagcatcagaaagcagttaccagctcagcagacacaagaagagcccgagctctttaaccaatcttagcagctcctctggcatgacgtccttgtcttctgtgagtggcagtgtgatgagtgtttatagtggagactttggcaatctggaagttaaaggaaatattcagtttgcaattgaatatgtggagtcactgaaggagttgcatgtttttgtggcccagtgtaaggacttagcagcagcggatgtaaaaaaacagcgttcagacccatatgtaaaggcctatttgctaccagacaaaggcaaaatgggcaagaagaaaacactcgtagtgaagaaaaccttgaatcctgtgtataacgaaatactgcggtataaaattgaaaaacaaatcttaaagacacagaaattgaacctgtccatttggcatcgggatacatttaagcgcaatagtttcctaggggaggtggaacttgatttggaaacatgggactgggataacaaacagaataaacaattgagatggtaccctctgaagcggaagacagcaccagttgcccttgaagcagaaaacagaggtgaaatgaaactagctctccagtatgtcccagagccagtccctggtaaaaagcttcctacaactggagaagtgcacatctgggtgaaggaatgccttgatctaccactgctaaggggaagtcatctaaattcttttgttaaatgtaccatccttccagatacaagtaggaaaagtcgccagaagacaagagctgtagggaaaaccaccaaccctatcttcaaccacactatggtgtatgatgggttcaggcctgaagatctgatggaagcctgtgtagagcttactgtctgggaccattacaaattaaccaaccaatttttgggaggtcttcgtattggctttggaacaggtaaaagttatgggactgaagtggactggatggactctacttcagaggaagttgctctctgggagaagatggtaaactcccccaatacttggattgaagcaacactgcctctcagaatgcttttgattgccaagatttccaaatgagcccaaattccactggctcctccactgaaaactactaaaccggtggaatctgatcttgaaaatctgagtaggtggacaaatatcctcactttctatctattgcacctaaggaatactacacagcatgtaaaagtcaatctgcatgtgcttctttgattacaaggcccaagggatttaaatataacaaaatgtgtaatttgtgactctaatattaaataagatatttgaacaagctaggaaaattgaatttctgctgctgcttcaaagaaaaagctgccccagagcattaaacatggggtattgttaagaagcaaaatgttcttgtttgccatcatgtgtttcacaccacaattctgtgccacagttaagagggtctggtacccttgcaggacctttgtaggttgtgggaaaaagtcgcagaaagatactcaaagtggagcagggaatggagacagacatcagtgatgataaaaaaaaaaatggaccttaagaaactatttactctgtaatctctaataaaatatggaattccatattagggcaatgagactgaaactactggtgtttttctgccttgagaaaacaaacagttaaaacaagcctcaaatgtattttagtgccacccactggccataggtacaattcagttgttggcttgttttgacttaattctaaaataggtctcaagcctgtatttttatgagtttatttttttaaaaccctgcatatatatgattgtttttcttataactttactatatgaaagcagcataagagtagtcacaaacatgttttgcaacaaagttttaattagaatgtaagttgctcagttatactgttcttcttatgtatgtaaaattttcgtattttgtaaaaacccttagaataaattatcatttgatttaaattgtattagaaaa

SEQ ID NO: 188233 - DNA, 4123 bp, Homo sapiens
  Payload ID: 17042
  Gene Symbol: SYTL2
  Gene Name: synaptotagmin-like 2
  Uniprot ID: Q9HCH5
  ENST ID: ENST00000359152
  CDS Start-End: 345-3152
gtgcagagagagaataaactgtgtctaagactggaccagagagtgagtgtgctggaagccaccataggaacaagcgacctgtttggcaaggaatacagcatccttctgagagcctcttctcgacactatcccacagaccaggacttcctcatgggaaagagcacttaggatcttgctatcagctgccctaaacttttgctgagccaaaataagactttgatgcagaactgaacaagatatttcatttttgtgtgttttaatcttcctggttgcagtcttagttgttcagccctgagaattttgagccacatttgttgctattatttttgcatgcacttttcaaaatgattgacttaagcttcctgactgaagaggaacaagaggccatcatgaaggttttgcagcgggatgctgctctgaagagggccgaagaagagagagtcagacatttgcctgaaaaaattaaggatgaccagcagctgaagaatatgagtggccaatggttttatgaagccaaggcaaaaaggcacagggacaaaatccatggcgcagatatcatcagagcatctatgagaaagaagaggccccagatagcagctgagcagagtaaagacagagaaaatggggcaaaggaaagctgggtgaataatgtcaacaaagatgctttccttcctccagagctggctggcgttgtagaagagccagaagaagatgcagcaccagcaagcccgagttccagtgtggtaaatccagcttccagtgtgattgatatgtcccaggaaaacacaaggaaaccaaatgtgtctccagagaagcagaggaagaatccgtttaatagctccaagttgccagaaggtcactcatcacaacaaactaaaaatgaacagtcaaaaaatggaagaactggtttatttcagacttcaaaagaggatgaattgtcagagtcaaaagaaaagtcaactgtcgcagatacttcaatccaaaagttagagaaatcaaagcagactttgccaggcctttcaaatgggtcccaaatcaaggctccaatccccaaagccaggaagatgatctacaaatcaactgatttaaacaaagatgataaccagtcttttcctagacaaaggacagactccctgaaagcgagaggggctccgagagggatcctcaagcgcaactccagttccagtagcacagactcagaaacccttcgttataatcacaactttgaacccaaaagcaaaattgtgtcacctggcctaaccatccatgagagaatttctgagaaggagcattctttagaagacaactcttccccaaactccctggagccattaaagcatgtgagattctctgcagtgaaggatgagcttccacagagtcctgggctaatccatggtcgggaagtaggagaatttagtgttttagaatctgacagattgaaaaatggaatggaagatgcaggggacacagaagagtttcagagtgaccctaagccttctcaatacagaaagccttcgctttttcatcaatcaacctcaagcccatatgtatcaaaaagtgaaacacatcagccaatgacttctggttcttttccaattaatgggctgcattctcattcagaagttttaactgcaagaccacagtctatggagaattcaccaaccatcaatgaacccaaagataaatcatcagaattaacaaggcttgaatctgtattacccagaagccctgctgatgaactgtctcattgtgttgagcctgagccatctcaggtgccaggtggcagttctagagaccgtcagcaaggttcagaagaagaacccagtcctgttttgaaaactttggaaaggagtgccgctaggaaaatgccttccaaaagtctagaagacatttcatcagattcatcaaatcaagcaaaagtagataatcagccagaagaattagtgcgtagtgctgaagatgtttccacagtgcctacacaacctgataatccattttctcaccctgacaaactcaaaaggatgagcaagtctgttccagcatttctccaagatgagagtgatgacagagaaacagatacagcatcagaaagcagttaccagctcagcagacacaagaagagcccgagctctttaaccaatcttagcagctcctctggcatgacgtccttgtcttctgtgagtggcagtgtgatgagtgtttatagtggagactttggcaatctggaagttaaaggaaatattcagtttgcaattgaatatgtggagtcactgaaggagttgcatgtttttgtggcccagtgtaaggacttagcagcagcggatgtaaaaaaacagcgttcagacccatatgtaaaggcctatttgctaccagacaaaggcaaaatgggcaagaagaaaacactcgtagtgaagaaaaccttgaatcctgtgtataacgaaatactgcggtataaaattgaaaaacaaatcttaaagacacagaaattgaacctgtccatttggcatcgggatacatttaagcgcaatagtttcctaggggaggtggaacttgatttggaaacatgggactgggataacaaacagaataaacaattgagatggtaccctctgaagcggaagacagcaccagttgcccttgaagcagaaaacagaggtgaaatgaaactagctctccagtatgtcccagagccagtccctggtaaaaagcttcctacaactggagaagtgcacatctgggtgaaggaatgccttgatctaccactgctaaggggaagtcatctaaattcttttgttaaatgtaccatccttccagatacaagtaggaaaagtcgccagaagacaagagctgtagggaaaaccaccaaccctatcttcaaccacactatggtgtatgatgggttcaggcctgaagatctgatggaagcctgtgtagagcttactgtctgggaccattacaaattaaccaaccaatttttgggaggtcttcgtattggctttggaacaggtaaaagttatgggactgaagtggactggatggactctacttcagaggaagttgctctctgggagaagatggtaaactcccccaatacttggattgaagcaacactgcctctcagaatgcttttgattgccaagatttccaaatgagcccaaattccactggctcctccactgaaaactactaaaccggtggaatctgatcttgaaaatctgagtaggtggacaaatatcctcactttctatctattgcacctaaggaatactacacagcatgtaaaagtcaatctgcatgtgcttctttgattacaaggcccaagggatttaaatataacaaaatgtgtaatttgtgactctaatattaaataagatatttgaacaagctaggaaaattgaatttctgctgctgcttcaaagaaaaagctgccccagagcattaaacatggggtattgttaagaagcaaaatgttcttgtttgccatcatgtgtttcacaccacaattctgtgccacagttaagagggtctggtacccttgcaggacctttgtaggttgtgggaaaaagtcgcagaaagatactcaaagtggagcagggaatggagacagacatcagtgatgataaaaaaaaaaatggaccttaagaaactatttactctgtaatctctaataaaatatggaattccatattagggcaatgagactgaaactactggtgtttttctgccttgagaaaacaaacagttaaaacaagcctcaaatgtattttagtgccacccactggccataggtacaattcagttgttggcttgttttgacttaattctaaaataggtctcaagcctgtatttttatgagtttatttttttaaaaccctgcatatatatgattgtttttcttataactttactatatgaaagcagcataagagtagtcacaaacatgttttgcaacaaagttttaattagaatgtaagttgctcagttatactgttcttcttatgtatgtaaaattttcgtattttgtaaaaacccttagaataaattatcatttgatttaaattgtattagaaaattagcgtgacttctcattttaaataaaatattttaggaattctaaacatct

SEQ ID NO: 188234 - DNA, 1943 bp, Homo sapiens
  Payload ID: 17042
  Gene Symbol: SYTL2
  Gene Name: synaptotagmin-like 2
  Uniprot ID: Q9HCH5
  ENST ID: ENST00000389958
  CDS Start-End: 377-1474
acagaagaatagagaggctgttgcagccccgtgctttctcctgctgctggccgattgcttgctctgaactaaccctctaacccttgggagtctgtgtgcagcagtgatgtgagctgcatccgggctgaaatgggagctcccgctatggcactggctcaaggagctaatctaaagagaaagtattttggggaagacatcttggttgcacccctcattgcatcttgactaattgcttccaactccgggggcttccagggacaatctcattgttcttttctctccaagggtcagccatgttaaccatttgttaatttcttctgaacagatcaagcaaaagtagataatcagccagaagaattagtgcgtagtgctgaagatgagtgatgacagagaaacagatacagcatcagaaagcagttaccagctcagcagacacaagaagagcccgagctctttaaccaatcttagcagctcctctggcatgacgtccttgtcttctgtgagtggcagtgtgatgagtgtttatagtggagactttggcaatctggaagttaaaggaaatattcagtttgcaattgaatatgtggagtcactgaaggagttgcatgtttttgtggcccagtgtaaggacttagcagcagcggatgtaaaaaaacagcgttcagacccatatgtaaaggcctatttgctaccagacaaaggcaaaatgggcaagaagaaaacactcgtagtgaagaaaaccttgaatcctgtgtataacgaaatactgcggtataaaattgaaaaacaaatcttaaagacacagaaattgaacctgtccatttggcatcgggatacatttaagcgcaatagtttcctaggggaggtggaacttgatttggaaacatgggactgggataacaaacagaataaacaattgagatggtaccctctgaagcggaagacagcaccagttgcccttgaagcagaaaacagaggtgaaatgaaactagctctccagtatgtcccagagccagtccctggtaaaaagcttcctacaactggagaagtgcacatctgggtgaaggaatgccttgatctaccactgctaaggggaagtcatctaaattcttttgttaaatgtaccatccttccagatacaagtaggaaaagtcgccagaagacaagagctgtagggaaaaccaccaaccctatcttcaaccacactatggtgtatgatgggttcaggcctgaagatctgatggaagcctgtgtagagcttactgtctgggaccattacaaattaaccaaccaatttttgggaggtcttcgtattggctttggaacaggtaaaagttatgggactgaagtggactggatggactctacttcagaggaagttgctctctgggagaagatggtaaactcccccaatacttggattgaagcaacactgcctctcagaatgcttttgattgccaagatttccaaatgagcccaaattccactggctcctccactgaaaactactaaaccggtggaatctgatcttgaaaatctgagtaggtggacaaatatcctcactttctatctattgcacctaaggaatactacacagcatgtaaaagtcaatctgcatgtgcttctttgattacaaggcccaagggatttaaatataacaaaatgtgtaatttgtgactctaatattaaataagatatttgaacaagctaggaaaattgaatttctgctgctgcttcaaagaaaaagctgccccagagcattaaacatggggtattgttaagaagcaaaatgttcttgtttgccatcatgtgtttcacaccacaattctgtgccacagttaagagggtctggtacccttgcaggacctttgtaggttgtgggaaaaagtcgcagaaagatactcaaagtggagcagggaatggagacagacatcagtgatgat

SEQ ID NO: 188235 - DNA, 4299 bp, Homo sapiens
  Payload ID: 17042
  Gene Symbol: SYTL2
  Gene Name: synaptotagmin-like 2
  Uniprot ID: Q9HCH5
  ENST ID: ENST00000389960
  CDS Start-End: 596-3328
acgccgctctgcgttgacagtgccgggcgacacccgggccgtgccgccagcgtccgtcgggagagtgaaggctcgcaacgccttgcccgggggaaggtaacgcgccgcgcccggggctgcgcggtttgcaccgccaggccgagggctgggggccagaagacaagagagacggcgaggcgcgctccctgcccggcagcgactcggaggtaggtgatgctctgatgctgctgcctcttatgaattgacgacaggtgcagagagagaataaactgtgtctaagactggaccagagagtgagtgtgctggaagccaccataggaacaagcgacctgtttggcaaggaatacagcatccttctgagagcctcttctcgacactatcccacagaccaggacttcctcatgggaaagagcacttaggatcttgctatcagctgccctaaacttttgctgagccaaaataagactttgatgcagaactgaacaagatatttcatttttgtgtgttttaatcttcctggttgcagtcttagttgttcagccctgagaattttgagccacatttgttgctattatttttgcatgcacttttcaaaatgattgacttaagcttcctgactgaagaggaacaagaggccatcatgaaggttttgcagcgggatgctgctctgaagagggccgaagaagagagagtcagacatttgcctgaaaaaattaaggatgaccagcagctgaagaatatgagtggccaatggttttatgaagccaaggcaaaaaggcacagggacaaaatccatggcgcagatatcatcagagcatctatgagaaagaagaggccccagatagcagctgagcagagtaaagacagagaaaatggggcaaaggaaagctgggtgaataatgtcaacaaagatgctttccttcctccagagctggctggcgttgtagaagagccagaagaagatgcagcaccagcaagcccgagttccagtgtggtaaatccagcttccagtgtgattgatatgtcccaggaaaacacaaggaaaccaaatgtgtctccagagaagaggaagaatccgtttaatagctccaagttgccagaaggtcactcatcacaacaaactaaaaatgaacagtcaaaaaatggaagaactggtttatttcagacttcaaaagaggatgaattgtcagagtcaaaagaaaagtcaactgtcgcagatacttcaatccaaaagttagagaaatcaaagcagactttgccaggcctttcaaatgggtcccaaatcaaggctccaatccccaaagccaggaagatgatctacaaatcaactgatttaaacaaagatgataaccagtcttttcctagacaaaggacagactccctgaaagcgagaggggctccgagagggatcctcaagcgcaactccagttccagtagcacagactcagaaacccttcgttataatcacaactttgaacccaaaagcaaaattgtgtcacctggcctaaccatccatgagagaatttctgagaaggagcattctttagaagacaactcttccccaaactccctggagccattaaagcatgtgagattctctgcagtgaaggatgagcttccacagagtcctgggctaatccatggtcgggaagtaggagaatttagtgttttagaatctgacagattgaaaaatggaatggaagatgcaggggacacagaagagtttcagagtgaccctaagccttctcaatacagaaagccttcgctttttcatcaatcaacctcaagcccatatgtatcaaaaagtgaaacacatcagccaatgacttctggttcttttccaattaatgggctgcattctcattcagaagttttaactgcaagaccacagtctatggagaattcaccaaccatcaatgaacccaaagataaatcatcagaattaacaaggcttgaatctgtattacccagaagccctgctgatgaactgtctcattgtgttgagcctgagccatctcaggtgccaggtggcagttctagagaccgtcagcaaggttcagaagaagaacccagtcctgttttgaaaactttggaaaggagtgccgctaggaaaatgccttccaaaagtctagaagacatttcatcagattcatcaaatcaagcaaaagtagataatcagccagaagaattagtgcgtagtgctgaagatgatgagaaaccagatcagaagccagttacaaatgaatgcgtaccaagaatttccacagtgcctacacaacctgataatccattttctcaccctgacaaactcaaaaggatgagcaagtctgttccagcatttctccaagatgaggtgagtggcagtgtgatgagtgtttatagtggagactttggcaatctggaagttaaaggaaatattcagtttgcaattgaatatgtggagtcactgaaggagttgcatgtttttgtggcccagtgtaaggacttagcagcagcggatgtaaaaaaacagcgttcagacccatatgtaaaggcctatttgctaccagacaaaggcaaaatgggcaagaagaaaacactcgtagtgaagaaaaccttgaatcctgtgtataacgaaatactgcggtataaaattgaaaaacaaatcttaaagacacagaaattgaacctgtccatttggcatcgggatacatttaagcgcaatagtttcctaggggaggtggaacttgatttggaaacatgggactgggataacaaacagaataaacaattgagatggtaccctctgaagcggaagacagcaccagttgcccttgaagcagaaaacagaggtgaaatgaaactagctctccagtatgtcccagagccagtccctggtaaaaagcttcctacaactggagaagtgcacatctgggtgaaggaatgccttgatctaccactgctaaggggaagtcatctaaattcttttgttaaatgtaccatccttccagatacaagtaggaaaagtcgccagaagacaagagctgtagggaaaaccaccaaccctatcttcaaccacactatggtgtatgatgggttcaggcctgaagatctgatggaagcctgtgtagagcttactgtctgggaccattacaaattaaccaaccaatttttgggaggtcttcgtattggctttggaacaggtaaaagttatgggactgaagtggactggatggactctacttcagaggaagttgctctctgggagaagatggtaaactcccccaatacttggattgaagcaacactgcctctcagaatgcttttgattgccaagatttccaaatgagcccaaattccactggctcctccactgaaaactactaaaccggtggaatctgatcttgaaaatctgagtaggtggacaaatatcctcactttctatctattgcacctaaggaatactacacagcatgtaaaagtcaatctgcatgtgcttctttgattacaaggcccaagggatttaaatataacaaaatgtgtaatttgtgactctaatattaaataagatatttgaacaagctaggaaaattgaatttctgctgctgcttcaaagaaaaagctgccccagagcattaaacatggggtattgttaagaagcaaaatgttcttgtttgccatcatgtgtttcacaccacaattctgtgccacagttaagagggtctggtacccttgcaggacctttgtaggttgtgggaaaaagtcgcagaaagatactcaaagtggagcagggaatggagacagacatcagtgatgataaaaaaaaaaatggaccttaagaaactatttactctgtaatctctaataaaatatggaattccatattagggcaatgagactgaaactactggtgtttttctgccttgagaaaacaaacagttaaaacaagcctcaaatgtattttagtgccacccactggccataggtacaattcagttgttggcttgttttgacttaattctaaaataggtctcaagcctgtatttttatgagtttatttttttaaaaccctgcatatatatgattgtttttcttataactttactatatgaaagcagcataagagtagtcacaaacatgttttgcaacaaagttttaattagaatgtaagttgctcagttatactgttcttcttatgtatgtaaaattttcgtattttgtaaaaacccttagaataaattatcatttgatttaaattgtattagaaaattagcgtgacttctcattttaaataaaatattttaggaattctaaacatct

SEQ ID NO: 188236 - DNA, 3536 bp, Homo sapiens
  Payload ID: 17042
  Gene Symbol: SYTL2
  Gene Name: synaptotagmin-like 2
  Uniprot ID: Q9HCH5
  ENST ID: ENST00000528231
  CDS Start-End: 279-3083
ggaacaagcgacctgtttggcaaggaatacagcatccttctgagagcctcttctcgacactatcccacagaccaggacttcctcatgggaaagagcacttaggatcttgctatcagctgccctaaacttttgctgagccaaaataagactttgatgcagaactgaacaagatatttcatttttgtgtgttttaatcttcctggttgcagtcttagttgttcagccctgagaattttgagccacatttgttgctattatttttgcatgcacttttcaaaatgattgacttaagcttcctgactgaagaggaacaagaggccatcatgaaggttttgcagcgggatgctgctctgaagagggccgaagaagagagagtcagacatttgcctgaaaaaattaaggatgaccagcagctgaagaatatgagtggccaatggttttatgaagccaaggcaaaaaggcacagggacaaaatccatggcgcagatatcatcagagcatctatgagaaagaagaggccccagatagcagctgagcagagtaaagacagagaaaatggggcaaaggaaagctgggtgaataatgtcaacaaagatgctttccttcctccagagctggctggcgttgtagaagagccagaagaagatgcagcaccagcaagcccgagttccagtgtggtaaatccagcttccagtgtgattgatatgtcccaggaaaacacaaggaaaccaaatgtgtctccagagaagaggaagaatccgtttaatagctccaagttgccagaaggtcactcatcacaacaaactaaaaatgaacagtcaaaaaatggaagaactggtttatttcagacttcaaaagaggatgaattgtcagagtcaaaagaaaagtcaactgtcgcagatacttcaatccaaaagttagagaaatcaaagcagactttgccaggcctttcaaatgggtcccaaatcaaggctccaatccccaaagccaggaagatgatctacaaatcaactgatttaaacaaagatgataaccagtcttttcctagacaaaggacagactccctgaaagcgagaggggctccgagagggatcctcaagcgcaactccagttccagtagcacagactcagaaacccttcgttataatcacaactttgaacccaaaagcaaaattgtgtcacctggcctaaccatccatgagagaatttctgagaaggagcattctttagaagacaactcttccccaaactccctggagccattaaagcatgtgagattctctgcagtgaaggatgagcttccacagagtcctgggctaatccatggtcgggaagtaggagaatttagtgttttagaatctgacagattgaaaaatggaatggaagatgcaggggacacagaagagtttcagagtgaccctaagccttctcaatacagaaagccttcgctttttcatcaatcaacctcaagcccatatgtatcaaaaagtgaaacacatcagccaatgacttctggttcttttccaattaatgggctgcattctcattcagaagttttaactgcaagaccacagtctatggagaattcaccaaccatcaatgaacccaaagataaatcatcagaattaacaaggcttgaatctgtattacccagaagccctgctgatgaactgtctcattgtgttgagcctgagccatctcaggtgccaggtggcagttctagagaccgtcagcaaggttcagaagaagaacccagtcctgttttgaaaactttggaaaggagtgccgctaggaaaatgccttccaaaagtctagaagacatttcatcagattcatcaaatcaagcaaaagtagataatcagccagaagaattagtgcgtagtgctgaagatgtttccacagtgcctacacaacctgataatccattttctcaccctgacaaactcaaaaggatgagcaagtctgttccagcatttctccaagatgagagtgatgacagagaaacagatacagcatcagaaagcagttaccagctcagcagacacaagaagagcccgagctctttaaccaatcttagcagctcctctggcatgacgtccttgtcttctgtgagtggcagtgtgatgagtgtttatagtggagactttggcaatctggaagttaaaggaaatattcagtttgcaattgaatatgtggagtcactgaaggagttgcatgtttttgtggcccagtgtaaggacttagcagcagcggatgtaaaaaaacagcgttcagacccatatgtaaaggcctatttgctaccagacaaaggcaaaatgggcaagaagaaaacactcgtagtgaagaaaaccttgaatcctgtgtataacgaaatactgcggtataaaattgaaaaacaaatcttaaagacacagaaattgaacctgtccatttggcatcgggatacatttaagcgcaatagtttcctaggggaggtggaacttgatttggaaacatgggactgggataacaaacagaataaacaattgagatggtaccctctgaagcggaagacagcaccagttgcccttgaagcagaaaacagaggtgaaatgaaactagctctccagtatgtcccagagccagtccctggtaaaaagcttcctacaactggagaagtgcacatctgggtgaaggaatgccttgatctaccactgctaaggggaagtcatctaaattcttttgttaaatgtaccatccttccagatacaagtaggaaaagtcgccagaagacaagagctgtagggaaaaccaccaaccctatcttcaaccacactatggtgtatgatgggttcaggcctgaagatctgatggaagcctgtgtagagcttactgtctgggaccattacaaattaaccaaccaatttttgggaggtcttcgtattggctttggaacaggtaaaagttatgggactgaagtggactggatggactctacttcagaggaagttgctctctgggagaagatggtaaactcccccaatacttggattgaagcaacactgcctctcagaatgcttttgattgccaagatttccaaatgagcccaaattccactggctcctccactgaaaactactaaaccggtggaatctgatcttgaaaatctgagtaggtggacaaatatcctcactttctatctattgcacctaaggaatactacacagcatgtaaaagtcaatctgcatgtgcttctttgattacaaggcccaagggatttaaatataacaaaatgtgtaatttgtgactctaatattaaataagatatttgaacaagctaggaaaattgaatttctgctgctgcttcaaagaaaaagctgccccagagcattaaacatggggtattgttaagaagcaaaatgttcttgtttgccatcatgtgtttcacaccacaattctgtgccacagttaagagggtctggtacccttgcaggacctttgtaggttgtgggaaaaagtcgcagaaagatactcaaagtggagcagggaatggagac

SEQ ID NO: 188237 - DNA, 583 bp, Homo sapiens
  Payload ID: 17042
  Gene Symbol: SYTL2
  Gene Name: synaptotagmin-like 2
  ENST ID: ENST00000532221
  CDS Start-End: 375-583
ataaaccctaggcactgggggtatgaagataatgatacacatgtctaccctcagggccacaatattttaaataataatttcccaacagtctttggatatgctaatagggcttaatgaggaaagcagctaaacggaggagccattagatagaaaaccaatgtgctgatggctaaaagtcagtgacatgtagtgggaaacctgaaactttgcttatgaggtcctcctgccagcagtgaaggtgctgaactttggcacatgacttgacaaattcttaagaactgcctaggaaagaagagagtccaggcttcagctctttttccacagtgcctacacaacctgataatccattttctcaccctgacaaactcaaaaggatgagcaagtctgttccagcatttctccaagatgagagtgatgacagagaaacagatacagcatcagaaagcagttaccagctcagcagacacaagaagagcccgagctctttaaccaatcttagcagctcctctggcatgacgtccttgtcttctgtgagtggcagtgtgatgagtgtttatagtggagactttggcaatctggaagt

SEQ ID NO: 188238 - DNA, 633 bp, Homo sapiens
  Payload ID: 17042
  Gene Symbol: SYTL2
  Gene Name: synaptotagmin-like 2
  ENST ID: ENST00000524911
  CDS Start-End: 444-633
gcagaactctttgtaaaggcaggaagagtggagtgaattcctgggttaagttattcttctgtttgattctcaagtctcagcatttagatctctctgggcacaactggtaaaatcttaaattcaaaggaaagagtcccagaacaagggtgggaaatcgtgcctctgcttatataaataactaaatatagacagagggtgaagttgattctgaatataatggagccagaagatcttgaagcttgtcagtggatcagatgagaaaccagatcagaagccagttacaaatgaatgcgtaccaagaatgaaggtgctgaactttggcacatgacttgacaaattcttaagaactgcctaggaaagaagagagtccaggcttcagctctttttccacagtgcctacacaacctgataatccattttctcaccctgacaaactcaaaaggatgagcaagtctgttccagcatttctccaagatgagagtgatgacagagaaacagatacagcatcagaaagcagttaccagctcagcagacacaagaagagcccgagctctttaaccaatcttagcagctcctctggcatgacgtccttgtcttctgtgagtggcagtgtgatgagtgtttatagtggag

SEQ ID NO: 188239 - DNA, 711 bp, Homo sapiens
  Payload ID: 17042
  Gene Symbol: SYTL2
  Gene Name: synaptotagmin-like 2
  ENST ID: ENST00000529534
  CDS Start-End: 246-711
ctcaagtctcagcatttagatctctctgggcacaactggtaaaatcttaaattcaaaggaaagagtcccagaacaagggtgggaaatcgtgcctctgcttatataaataactaaatatagacagagggtgaagttgattctgaatataatggagccagaagatcttgaagcttgtcagtggatcagtttccacagtgcctacacaacctgataatccattttctcaccctgacaaactcaaaaggatgagcaagtctgttccagcatttctccaagatgagagtgatgacagagaaacagatacagcatcagaaagcagttaccagctcagcagacacaagaagagcccgagctctttaaccaatcttagcagctcctctggcatgacgtccttgtcttctgtgagtggcagtgtgatgagtgtttatagtggagactttggcaatctggaagttaaaggaaatattcagtttgcaattgaatatgtggagtcactgaaggagttgcatgtttttgtggcccagtgtaaggacttagcagcagcggatgtaaaaaaacagcgttcagacccatatgtaaaggcctatttgctaccagacaaaggcaaaatgggcaagaagaaaacactcgtagtgaagaaaaccttgaatcctgtgtataacgaaatactgcggtataaaattgaaaaacaaatcttaaagacacagaaat

SEQ ID NO: 188240 - DNA, 1441 bp, Homo sapiens
  Payload ID: 17042
  Gene Symbol: SYTL2
  Gene Name: synaptotagmin-like 2
  Uniprot ID: Q9HCH5
  ENST ID: ENST00000533892
  CDS Start-End: 271-1281
aaccctctaacccttgggagtctgtgtgcagcagtgatgtgagctgcatccgggctgaaatgggagctcccgctatggcactggctcaaggagctaatctaaagagaaaatcaagcaaaagtagataatcagccagaagaattagtgcgtagtgctgaagatgatgagaaaccagatcagaagccagttacaaatgaatgcgtaccaagaatttccacagtgcctacacaacctgataatccattttctcaccctgacaaactcaaaaggatgagcaagtctgttccagcatttctccaagatgaggtgagtggcagtgtgatgagtgtttatagtggagactttggcaatctggaagttaaaggaaatattcagtttgcaattgaatatgtggagtcactgaaggagttgcatgtttttgtggcccagtgtaaggacttagcagcagcggatgtaaaaaaacagcgttcagacccatatgtaaaggcctatttgctaccagacaaaggcaaaatgggcaagaagaaaacactcgtagtgaagaaaaccttgaatcctgtgtataacgaaatactgcggtataaaattgaaaaacaaatcttaaagacacagaaattgaacctgtccatttggcatcgggatacatttaagcgcaatagtttcctaggggaggtggaacttgatttggaaacatgggactgggataacaaacagaataaacaattgagatggtaccctctgaagcggaagacagcaccagttgcccttgaagcagaaaacagaggtgaaatgaaactagctctccagtatgtcccagagccagtccctggtaaaaagcttcctacaactggagaagtgcacatctgggtgaaggaatgccttgatctaccactgctaaggggaagtcatctaaattcttttgttaaatgtaccatccttccagatacaagtaggaaaagtcgccagaagacaagagctgtagggaaaaccaccaaccctatcttcaaccacactatggtgtatgatgggttcaggcctgaagatctgatggaagcctgtgtagagcttactgtctgggaccattacaaattaaccaaccaatttttgggaggtcttcgtattggctttggaacaggtaaaagttatgggactgaagtggactggatggactctacttcagaggaagttgctctctgggagaagatggtaaactcccccaatacttggattgaagcaacactgcctctcagaatgcttttgattgccaagatttccaaatgagcccaaattccactggctcctccactgaaaactactaaaccggtggaatctgatcttgaaaatctgagtaggtggacaaatatcctcactttctatctattgcacctaaggaatactacacagcatgtaaaagtcaatctgcatgtgcttctttgattac

SEQ ID NO: 188241 - DNA, 2727 bp, Homo sapiens
  Payload ID: 17042
  Gene Symbol: SYTL2
  Gene Name: synaptotagmin-like 2
  Uniprot ID: Q9HCH5
  ENST ID: ENST00000525702
  CDS Start-End: 690-1820
tttaaccattctaactttgccttgggatattgaaaattctgaatcagtgaggtatctaaataatttatattttcaaaaaataatgtttattttataattctgagtgtaaaacactatcagaaaagtaatcctcatgctcactaaacaaacctactctaagacactcaacaaccagaacagttttattattgagttgtgtacaaaaatcttgactgtccagatgaaatagtttttcagcctgcagtgtgttagtgatatatctcaaggagatgaaccaataaagtacagactttgtggtctgaagctctgttgtgaaaaaataagctaaaccaattcacactgacagtataatttgattcaagtgcagctccagttcaataaaaactaatgtttttaaaattaactttgttttgtatttggttcaactccttgctagttctctctctatataatttataaaaactgcatgttgctaatctcatgatcctgtgcatgtggactactctgcctttaacttttttacaaaaacatgtttgttcatagattaaataaaagtatgttttcaacttaatgtctaatgttttctgacaattgtaagaataattttgaaatggaaatgctgctgtttagtttccacagtgcctacacaacctgataatccattttctcaccctgacaaactcaaaaggatgagcaagtctgttccagcatttctccaagatgagagtgatgacagagaaacagatacagcatcagaaagcagttaccagctcagcagacacaagaagagcccgagctctttaaccaatcttagcagctcctctggcatgacgtccttgtcttctgtgagtggcagtgtgatgagtgtttatagtggagactttggcaatctggaagttaaaggaaatattcagtttgcaattgaatatgtggagtcactgaaggagttgcatgtttttgtggcccagtgtaaggacttagcagcagcggatgtaaaaaaacagcgttcagacccatatgtaaaggcctatttgctaccagacaaaggcaaaatgggcaagaagaaaacactcgtagtgaagaaaaccttgaatcctgtgtataacgaaatactgcggtataaaattgaaaaacaaatcttaaagacacagaaattgaacctgtccatttggcatcgggatacatttaagcgcaatagtttcctaggggaggtggaacttgatttggaaacatgggactgggataacaaacagaataaacaattgagatggtaccctctgaagcggaagacagcaccagttgcccttgaagcagaaaacagaggtgaaatgaaactagctctccagtatgtcccagagccagtccctggtaaaaagcttcctacaactggagaagtgcacatctgggtgaaggaatgccttgatctaccactgctaaggggaagtcatctaaattcttttgttaaatgtaccatccttccagatacaagtaggaaaagtcgccagaagacaagagctgtagggaaaaccaccaaccctatcttcaaccacactatggtgtatgatgggttcaggcctgaagatctgatggaagcctgtgtagagcttactgtctgggaccattacaaattaaccaaccaatttttgggaggtcttcgtattggctttggaacaggtaaaagttatgggactgaagtggactggatggactctacttcagaggaagttgctctctgggagaagatggtaaactcccccaatacttggattgaagcaacactgcctctcagaatgcttttgattgccaagatttccaaatgagcccaaattccactggctcctccactgaaaactactaaaccggtggaatctgatcttgaaaatctgagtaggtggacaaatatcctcactttctatctattgcacctaaggaatactacacagcatgtaaaagtcaatctgcatgtgcttctttgattacaaggcccaagggatttaaatataacaaaatgtgtaatttgtgactctaatattaaataagatatttgaacaagctaggaaaattgaatttctgctgctgcttcaaagaaaaagctgccccagagcattaaacatggggtattgttaagaagcaaaatgttcttgtttgccatcatgtgtttcacaccacaattctgtgccacagttaagagggtctggtacccttgcaggacctttgtaggttgtgggaaaaagtcgcagaaagatactcaaagtggagcagggaatggagacagacatcagtgatgataaaaaaaaaaatggaccttaagaaactatttactctgtaatctctaataaaatatggaattccatattagggcaatgagactgaaactactggtgtttttctgccttgagaaaacaaacagttaaaacaagcctcaaatgtattttagtgccacccactggccataggtacaattcagttgttggcttgttttgacttaattctaaaataggtctcaagcctgtatttttatgagtttatttttttaaaaccctgcatatatatgattgtttttcttataactttactatatgaaagcagcataagagtagtcacaaacatgttttgcaacaaagttttaattagaatgtaagttgctcagttatactgttcttcttatgtatgtaaaattttcgtattttgtaaaaacccttagaataaattatcatttgatttaaa

SEQ ID NO: 188242 - DNA, 3049 bp, Homo sapiens
  Payload ID: 17042
  Gene Symbol: SYTL2
  Gene Name: synaptotagmin-like 2
  Uniprot ID: Q9HCH5
  ENST ID: ENST00000527523
  CDS Start-End: 232-2940
agtgccgggcgacacccgggccgtgccgccagcgtccgtcgggagagtgaaggctcgcaacgccttgcccgggggaaggtaacgcgccgcgcccggggctgcgcggtttgcaccgccaggccgagggctgggggccagaagacaagagagacggcgaggcgcgctccctgcccggcagcgactcggagacatttgcctgaaaaaattaaggatgaccagcagctgaagaatatgagtggccaatggttttatgaagccaaggcaaaaaggcacagggacaaaatccatggcgcagatatcatcagagcatctatgagaaagaagaggccccagatagcagctgagcagagtaaagacagagaaaatggggcaaaggaaagctgggtgaataatgtcaacaaagatgctttccttcctccagagctggctggcgttgtagaagagccagaagaagatgcagcaccagcaagcccgagttccagtgtggtaaatccagcttccagtgtgattgatatgtcccaggaaaacacaaggaaaccaaatgtgtctccagagaagaggaagaatccgtttaatagctccaagttgccagaaggtcactcatcacaacaaactaaaaatgaacagtcaaaaaatggaagaactggtttatttcagacttcaaaagaggatgaattgtcagagtcaaaagaaaagtcaactgtcgcagatacttcaatccaaaagttagagaaatcaaagcagactttgccaggcctttcaaatgggtcccaaatcaaggctccaatccccaaagccaggaagatgatctacaaatcaactgatttaaacaaagatgataaccagtcttttcctagacaaaggacagactccctgaaagcgagaggggctccgagagggatcctcaagcgcaactccagttccagtagcacagactcagaaacccttcgttataatcacaactttgaacccaaaagcaaaattgtgtcacctggcctaaccatccatgagagaatttctgagaaggagcattctttagaagacaactcttccccaaactccctggagccattaaagcatgtgagattctctgcagtgaaggatgagcttccacagagtcctgggctaatccatggtcgggaagtaggagaatttagtgttttagaatctgacagattgaaaaatggaatggaagatgcaggggacacagaagagtttcagagtgaccctaagccttctcaatacagaaagccttcgctttttcatcaatcaacctcaagcccatatgtatcaaaaagtgaaacacatcagccaatgacttctggttcttttccaattaatgggctgcattctcattcagaagttttaactgcaagaccacagtctatggagaattcaccaaccatcaatgaacccaaagataaatcatcagaattaacaaggcttgaatctgtattacccagaagccctgctgatgaactgtctcattgtgttgagcctgagccatctcaggtgccaggtggcagttctagagaccgtcagcaaggttcagaagaagaacccagtcctgttttgaaaactttggaaaggagtgccgctaggaaaatgccttccaaaagtctagaagacatttcatcagattcatcaaatcaagcaaaagtagataatcagccagaagaattagtgcgtagtgctgaagatgatgagaaaccagatcagaagccagttacaaatgaatgcgtaccaagaatttccacagtgcctacacaacctgataatccattttctcaccctgacaaactcaaaaggatgagcaagtctgttccagcatttctccaagatgagagtgatgacagagaaacagatacagcatcagaaagcagttaccagctcagcagacacaagaagagcccgagctctttaaccaatcttagcagctcctctggcatgacgtccttgtcttctgtgagtggcagtgtgatgagtgtttatagtggagactttggcaatctggaagttaaaggaaatattcagtttgcaattgaatatgtggagtcactgaaggagttgcatgtttttgtggcccagtgtaaggacttagcagcagcggatgtaaaaaaacagcgttcagacccatatgtaaaggcctatttgctaccagacaaaggcaaaatgggcaagaagaaaacactcgtagtgaagaaaaccttgaatcctgtgtataacgaaatactgcggtataaaattgaaaaacaaatcttaaagacacagaaattgaacctgtccatttggcatcgggatacatttaagcgcaatagtttcctaggggaggtggaacttgatttggaaacatgggactgggataacaaacagaataaacaattgagatggtaccctctgaagcggaagacagcaccagttgcccttgaagcagaaaacagaggtgaaatgaaactagctctccagtatgtcccagagccagtccctggtaaaaagcttcctacaactggagaagtgcacatctgggtgaaggaatgccttgatctaccactgctaaggggaagtcatctaaattcttttgttaaatgtaccatccttccagatacaagtaggaaaagtcgccagaagacaagagctgtagggaaaaccaccaaccctatcttcaaccacactatggtgtatgatgggttcaggcctgaagatctgatggaagcctgtgtagagcttactgtctgggaccattacaaattaaccaaccaatttttgggaggtcttcgtattggctttggaacaggtaaaagttatgggactgaagtggactggatggactctacttcagaggaagttgctctctgggagaagatggtaaactcccccaatacttggattgaagcaacactgcctctcagaatgcttttgattgccaagatttccaaatgagcccaaattccactggctcctccactgaaaactactaaaccggtggaatctgatcttgaaaatctgagtaggtggacaaatatcctcactttctatctattgcacctaa

SEQ ID NO: 188243 - DNA, 740 bp, Homo sapiens
  Payload ID: 17042
  Gene Symbol: SYTL2
  Gene Name: synaptotagmin-like 2
  ENST ID: ENST00000526999
  CDS Start-End: 431-740
cctgcacgctcccttccaaatactgatacccactctcacactagcctgccaagattccacttagcagctggtccccagttacatctcttcagttgacttcccaagcaagcctcccagaggcatatgtgaatgatgatgcacacacacaaatatttgttaatgaccatgggtttgggaaggtgttagtcatggctagcatcataccctttacagaagaatagagaggctgttgcagccccgtgctttctcctgctgctggccgattgcttgctctgaactaaccctctaacccttgggagtctgtgtgcagcagtgatatcaagcaaaagtagataatcagccagaagaattagtgcgtagtgctgaagatgtttccacagtgcctacacaacctgataatccattttctcaccctgacaaactcaaaaggatgagcaagtctgttccagcatttctccaagatgagagtgatgacagagaaacagatacagcatcagaaagcagttaccagctcagcagacacaagaagagcccgagctctttaaccaatcttagcagctcctctggcatgacgtccttgtcttctgtgagtggcagtgtgatgagtgtttatagtggagactttggcaatctggaagttaaaggaaatattcagtttgcaattgaatatgtggagtcactgaaggagttgcatgtttttgtggcccagtgtaaggacttagcagcagcggatgtaaaaa

SEQ ID NO: 188244 - DNA, 585 bp, Homo sapiens
  Payload ID: 17042
  Gene Symbol: SYTL2
  Gene Name: synaptotagmin-like 2
  ENST ID: ENST00000533577
  CDS Start-End: 565-585
tgttgcagccccgtgctttctcctgctgctggccgattgcttgctctgaactaaccctctaacccttgggagtctgtgtgcagcagtgatgtgagctgcatccgggctgaaatgggagctcccgctatggcactggctcaaggagctaatctaaagagaaagtattttggggaagacatcttggttgcacccctcattgcatcttgactaattgcttccaactccgggggcttccagggacaatctcattgttcttttctctccaagggtcagccatgttaaccatttgttaatttcttctgaacagatcaagcaaaagtagataatcagccagaagaattagtgcgtagtgctgaagatgatgagaaaccagatcagaagccagttacaaatgaatgcgtaccaagaatatgattttgagtattggatctcttgtggcctctgtacgaaactgtagatgtgaattcatttataacttatttggacctatgaaagaactgttagatttccacagtgcctacacaacctgataatccattttctcaccctgacaaactcaaaaggatgagcaagtctgttccagca

SEQ ID NO: 188245 - DNA, 2733 bp, Homo sapiens
  Payload ID: 17042
  Gene Symbol: SYTL2
  Gene Name: synaptotagmin-like 2
  Uniprot ID: Q9HCH5
  ENST ID: ENST00000524452
  CDS Start-End: 1-2733
atgattgacttaagcttcctgactgaagaggaacaagaggccatcatgaaggttttgcagcgggatgctgctctgaagagggccgaagaagagagagtcagacatttgcctgaaaaaattaaggatgaccagcagctgaagaatatgagtggccaatggttttatgaagccaaggcaaaaaggcacagggacaaaatccatggcgcagatatcatcagagcatctatgagaaagaagaggccccagatagcagctgagcagagtaaagacagagaaaatggggcaaaggaaagctgggtgaataatgtcaacaaagatgctttccttcctccagagctggctggcgttgtagaagagccagaagaagatgcagcaccagcaagcccgagttccagtgtggtaaatccagcttccagtgtgattgatatgtcccaggaaaacacaaggaaaccaaatgtgtctccagagaagaggaagaatccgtttaatagctccaagttgccagaaggtcactcatcacaacaaactaaaaatgaacagtcaaaaaatggaagaactggtttatttcagacttcaaaagaggatgaattgtcagagtcaaaagaaaagtcaactgtcgcagatacttcaatccaaaagttagagaaatcaaagcagactttgccaggcctttcaaatgggtcccaaatcaaggctccaatccccaaagccaggaagatgatctacaaatcaactgatttaaacaaagatgataaccagtcttttcctagacaaaggacagactccctgaaagcgagaggggctccgagagggatcctcaagcgcaactccagttccagtagcacagactcagaaacccttcgttataatcacaactttgaacccaaaagcaaaattgtgtcacctggcctaaccatccatgagagaatttctgagaaggagcattctttagaagacaactcttccccaaactccctggagccattaaagcatgtgagattctctgcagtgaaggatgagcttccacagagtcctgggctaatccatggtcgggaagtaggagaatttagtgttttagaatctgacagattgaaaaatggaatggaagatgcaggggacacagaagagtttcagagtgaccctaagccttctcaatacagaaagccttcgctttttcatcaatcaacctcaagcccatatgtatcaaaaagtgaaacacatcagccaatgacttctggttcttttccaattaatgggctgcattctcattcagaagttttaactgcaagaccacagtctatggagaattcaccaaccatcaatgaacccaaagataaatcatcagaattaacaaggcttgaatctgtattacccagaagccctgctgatgaactgtctcattgtgttgagcctgagccatctcaggtgccaggtggcagttctagagaccgtcagcaaggttcagaagaagaacccagtcctgttttgaaaactttggaaaggagtgccgctaggaaaatgccttccaaaagtctagaagacatttcatcagattcatcaaatcaagcaaaagtagataatcagccagaagaattagtgcgtagtgctgaagatgatgagaaaccagatcagaagccagttacaaatgaatgcgtaccaagaatttccacagtgcctacacaacctgataatccattttctcaccctgacaaactcaaaaggatgagcaagtctgttccagcatttctccaagatgaggtgagtggcagtgtgatgagtgtttatagtggagactttggcaatctggaagttaaaggaaatattcagtttgcaattgaatatgtggagtcactgaaggagttgcatgtttttgtggcccagtgtaaggacttagcagcagcggatgtaaaaaaacagcgttcagacccatatgtaaaggcctatttgctaccagacaaaggcaaaatgggcaagaagaaaacactcgtagtgaagaaaaccttgaatcctgtgtataacgaaatactgcggtataaaattgaaaaacaaatcttaaagacacagaaattgaacctgtccatttggcatcgggatacatttaagcgcaatagtttcctaggggaggtggaacttgatttggaaacatgggactgggataacaaacagaataaacaattgagatggtaccctctgaagcggaagacagcaccagttgcccttgaagcagaaaacagaggtgaaatgaaactagctctccagtatgtcccagagccagtccctggtaaaaagcttcctacaactggagaagtgcacatctgggtgaaggaatgccttgatctaccactgctaaggggaagtcatctaaattcttttgttaaatgtaccatccttccagatacaagtaggaaaagtcgccagaagacaagagctgtagggaaaaccaccaaccctatcttcaaccacactatggtgtatgatgggttcaggcctgaagatctgatggaagcctgtgtagagcttactgtctgggaccattacaaattaaccaaccaatttttgggaggtcttcgtattggctttggaacaggtaaaagttatgggactgaagtggactggatggactctacttcagaggaagttgctctctgggagaagatggtaaactcccccaatacttggattgaagcaacactgcctctcagaatgcttttgattgccaagatttccaaatga

SEQ ID NO: 188246 - DNA, 1910 bp, Homo sapiens
  Payload ID: 17042
  Gene Symbol: SYTL2
  Gene Name: synaptotagmin-like 2
  Uniprot ID: Q9HCH5
  ENST ID: ENST00000529581
  CDS Start-End: 311-1441
gtgctttctcctgctgctggccgattgcttgctctgaactaaccctctaacccttgggagtctgtgtgcagcagtgatgtgagctgcatccgggctgaaatgggagctcccgctatggcactggctcaaggagctaatctaaagagaaaatcaagcaaaagtagataatcagccagaagaattagtgcgtagtgctgaagatgatgagaaaccagatcagaagccagttacaaatgaatgcgtaccaagaatttccacagtgcctacacaacctgataatccattttctcaccctgacaaactcaaaaggatgagcaagtctgttccagcatttctccaagatgagagtgatgacagagaaacagatacagcatcagaaagcagttaccagctcagcagacacaagaagagcccgagctctttaaccaatcttagcagctcctctggcatgacgtccttgtcttctgtgagtggcagtgtgatgagtgtttatagtggagactttggcaatctggaagttaaaggaaatattcagtttgcaattgaatatgtggagtcactgaaggagttgcatgtttttgtggcccagtgtaaggacttagcagcagcggatgtaaaaaaacagcgttcagacccatatgtaaaggcctatttgctaccagacaaaggcaaaatgggcaagaagaaaacactcgtagtgaagaaaaccttgaatcctgtgtataacgaaatactgcggtataaaattgaaaaacaaatcttaaagacacagaaattgaacctgtccatttggcatcgggatacatttaagcgcaatagtttcctaggggaggtggaacttgatttggaaacatgggactgggataacaaacagaataaacaattgagatggtaccctctgaagcggaagacagcaccagttgcccttgaagcagaaaacagaggtgaaatgaaactagctctccagtatgtcccagagccagtccctggtaaaaagcttcctacaactggagaagtgcacatctgggtgaaggaatgccttgatctaccactgctaaggggaagtcatctaaattcttttgttaaatgtaccatccttccagatacaagtaggaaaagtcgccagaagacaagagctgtagggaaaaccaccaaccctatcttcaaccacactatggtgtatgatgggttcaggcctgaagatctgatggaagcctgtgtagagcttactgtctgggaccattacaaattaaccaaccaatttttgggaggtcttcgtattggctttggaacaggtaaaagttatgggactgaagtggactggatggactctacttcagaggaagttgctctctgggagaagatggtaaactcccccaatacttggattgaagcaacactgcctctcagaatgcttttgattgccaagatttccaaatgagcccaaattccactggctcctccactgaaaactactaaaccggtggaatctgatcttgaaaatctgagtaggtggacaaatatcctcactttctatctattgcacctaaggaatactacacagcatgtaaaagtcaatctgcatgtgcttctttgattacaaggcccaagggatttaaatataacaaaatgtgtaatttgtgactctaatattaaataagatatttgaacaagctaggaaaattgaatttctgctgctgcttcaaagaaaaagctgccccagagcattaaacatggggtattgttaagaagcaaaatgttcttgtttgccatcatgtgtttcacaccacaattctgtgccacagttaagagggtctggtacccttgcaggacctttgtaggttgtgggaaaaagtcgcagaaagatactcaaagtggagcagggaatggagacagacatcagtgatgat

SEQ ID NO: 188247 - DNA, 699 bp, Homo sapiens
  Payload ID: 17042
  Gene Symbol: SYTL2
  Gene Name: synaptotagmin-like 2
  ENST ID: ENST00000533057
  CDS Start-End: 328-699
ggagtctgtgtgcagcagtgatgtgagctgcatccgggctgaaatgggagctcccgctatggcactggctcaaggagctaatctaaagagaaagtattttggggaagacatcttggttgcacccctcattgcatcttgactaattgcttccaactccgggggcttccagggacaatctcattgttcttttctctccaagggtcagccatgttaaccatttgttaatttcttctgaacagatcaagcaaaagtagataatcagccagaagaattagtgcgtagtgctgaagatgatgagaaaccagatcagaagccagttacaaatgaatgcgtaccaagaagatgagcaagtctgttccagcatttctccaagatgagtgtaaggacttagcagcagcggatgtaaaaaaacagcgttcagacccatatgtaaaggcctatttgctaccagacaaaggcaaaatgggcaagaagaaaacactcgtagtgaagaaaaccttgaatcctgtgtataacgaaatactgcggtataaaattgaaaaacaaatcttaaagacacagaaattgaacctgtccatttggcatcgggatacatttaagcgcaatagtttcctaggggaggtggaacttgatttggaaacatgggactgggataacaaacagaataaacaattgagatggtaccctctgaagcggaag

SEQ ID NO: 188248 - DNA, 2437 bp, Homo sapiens
  Payload ID: 17042
  Gene Symbol: SYTL2
  Gene Name: synaptotagmin-like 2
  ENST ID: ENST00000532995
  CDS Start-End: 394-696
gtgtgcagcagtgatgtgagctgcatccgggctgaaatgggagctcccgctatggcactggctcaaggagctaatctaaagagaaagtattttggggaagacatcttggttgcacccctcattgcatcttgactaattgcttccaactccgggggcttccagggacaatctcattgttcttttctctccaagggtcagccatgttaaccatttgttaatttcttctgaacagatcaagcaaaagtagataatcagccagaagaattagtgcgtagtgctgaagatgatgagaaaccagatcagaagccagttacaaatgaatgcgtaccaagaatttccacagtgcctacacaacctgataatccattttctcaccctgacaaactcaaaaggatgagcaagtctgttccagcatttctccaagatgaggtgagtggcagtgtgatgagtgtttatagtggagactttggcaatctggaagttaaaggaaatattcagtttgcaattgaatatgtggagtcactgaaggagttgcatgtttttgtggcccagtgtaaggacttagcagcagcggatgtaaaaaaacagcgttcagacccgtggagtttcactgttgttgcccaggctggcacgatctcagctcacagcaaccttcgcctcccgggttcaagcgattctcctgcctcagcctcctgactagctggaattacagatatgtaaaggcctatttgctaccagacaaaggcaaaatgggcaagaagaaaacactcgtagtgaagaaaaccttgaatcctgtgtataacgaaatactgcggtataaaattgaaaaacaaatcttaaagacacagaaattgaacctgtccatttggcatcgggatacatttaagcgcaatagtttcctaggggaggtggaacttgatttggaaacatgggactgggataacaaacagaataaacaattgagatggtaccctctgaagcggaagacagcaccagttgcccttgaagcagaaaacagaggtgaaatgaaactagctctccagtatgtcccagagccagtccctggtaaaaagcttcctacaactggagaagtgcacatctgggtgaaggaatgccttgatctaccactgctaaggggaagtcatctaaattcttttgttaaatgtaccatccttccagatacaagtaggaaaagtcgccagaagacaagagctgtagggaaaaccaccaaccctatcttcaaccacactatggtgtatgatgggttcaggcctgaagatctgatggaagcctgtgtagagcttactgtctgggaccattacaaattaaccaaccaatttttgggaggtcttcgtattggctttggaacaggtaaaagttatgggactgaagtggactggatggactctacttcagaggaagttgctctctgggagaagatggtaaactcccccaatacttggattgaagcaacactgcctctcagaatgcttttgattgccaagatttccaaatgagcccaaattccactggctcctccactgaaaactactaaaccggtggaatctgatcttgaaaatctgagtaggtggacaaatatcctcactttctatctattgcacctaaggaatactacacagcatgtaaaagtcaatctgcatgtgcttctttgattacaaggcccaagggatttaaatataacaaaatgtgtaatttgtgactctaatattaaataagatatttgaacaagctaggaaaattgaatttctgctgctgcttcaaagaaaaagctgccccagagcattaaacatggggtattgttaagaagcaaaatgttcttgtttgccatcatgtgtttcacaccacaattctgtgccacagttaagagggtctggtacccttgcaggacctttgtaggttgtgggaaaaagtcgcagaaagatactcaaagtggagcagggaatggagacagacatcagtgatgataaaaaaaaaaatggaccttaagaaactatttactctgtaatctctaataaaatatggaattccatattagggcaatgagactgaaactactggtgtttttctgccttgagaaaacaaacagttaaaacaagcctcaaatgtattttagtgccacccactggccataggtacaattcagttgttggcttgttttgacttaattctaaaataggtctcaagcctgtatttttatgagtttatttttttaaaaccctgcatatatatgattgtttttcttataactttactatatgaaagcagcataagagtagtcacaaacatgttttgcaacaaagttttaattagaatgtaagttgctcagttatactgttcttcttatgtatgtaaaattttcgtattttgtaaaaacccttagaataaattatcatttgatttaaattgtattagaaaa

SEQ ID NO: 188249 - DNA, 683 bp, Homo sapiens
  Payload ID: 17042
  Gene Symbol: SYTL2
  Gene Name: synaptotagmin-like 2
  ENST ID: ENST00000527794
  CDS Start-End: 204-683
atatttgttaatgaccatgggtttgggaaggtgttagtcatgatcaagcaaaagtagataatcagccagaagaattagtgcgtagtgctgaagatgatgagaaaccagatcagaagccagttacaaatgaatgcgtaccaagaatttccacagtgcctacacaacctgataatccattttctcaccctgacaaactcaaaaggatgagcaagtctgttccagcatttctccaagatgaggtgagtggcagtgtgatgagtgtttatagtggagactttggcaatctggaagttaaaggaaatattcagtttgcaattgaatatgtggagtcactgaaggagttgcatgtttttgtggcccagtgtaaggacttagcagcagcggatgtaaaaaaacagcgttcagacccatatgtaaaggcctatttgctaccagacaaaggcaaaatgggcaagaagaaaacactcgtagtgaagaaaaccttgaatcctgtgtataacgaaatactgcggtataaaattgaaaaacaaatcttaaagacacagaaattgaacctgtccatttggcatcgggatacatttaagcgcaatagtttcctaggggaggtggaacttgatttggaaacatgggactgggataacaaacagaataaacaattgagatggtaccctctgaagcggaag

SEQ ID NO: 188250 - DNA, 2425 bp, Homo sapiens
  Payload ID: 17042
  Gene Symbol: SYTL2
  Gene Name: synaptotagmin-like 2
  ENST ID: ENST00000530351
  CDS Start-End: 1-1956
gaaacagtagaaaaggccgaggctccgttaataactgagagtgcttttgatgctggttttgagaaacttcttaaagaaataactgaagctcctccttatcagccccaggtgtcagtgagagaagaaactcacgagaaggagtcctcacagtcagagcagaccaggttcttggggacagtgccccatttttacagggcagcctcacagacctctgaaatgaaggataaaagtaatggtttggaatctcaagtcaaccaatgtgataaaatgttgggaggagacgcacttgtgactgatttattggtagatttttgtggttccagaagtggagttgagatccctagaaccccacaactttatgtggctcatgaaatagggaccattaaaactgtaacccccccagaggacagggacagtgaaagtggggttgcagggggacaagggactcttcaggaacctggctttggagaggcttctgaagcaattagtgtgtccagaaataggcaacccattcctctcctgatgaacaaagaaaactctacaaaaacaagtaaagttgaattgactctagcatcgccatatatgaaacaagagaaagaggaagaaaaagaaggtttctctgagtctgatttttcagatggaaacaccagttctaatgcagagagctggagaaatccttccagttcagaagaagaacccagtcctgttttgaaaactttggaaaggagtgccgctaggaaaatgccttccaaaagtctagaagacatttcatcagattcatcaaatcaagcaaaagtagataatcagccagaagaattagtgcgtagtgctgaagatgatgagaaaccagatcagaagccagttacaaatgaatgcgtaccaagaatttccacagtgcctacacaacctgataatccattttctcaccctgacaaactcaaaaggatgagcaagtctgttccagcatttctccaagatgaggtgagtggcagtgtgatgagtgtttatagtggagactttggcaatctggaagttaaaggaaatattcagtttgcaattgaatatgtggagtcactgaaggagttgcatgtttttgtggcccagtgtaaggacttagcagcagcggatgtaaaaaaacagcgttcagacccatatgtaaaggcctatttgctaccagacaaaggcaaaatgggcaagaagaaaacactcgtagtgaagaaaaccttgaatcctgtgtataacgaaatactgcggtataaaattgaaaaacaaatcttaaagacacagaaattgaacctgtccatttggcatcgggatacatttaagcgcaatagtttcctaggggaggtggaacttgatttggaaacatgggactgggataacaaacagaataaacaattgagatggtaccctctgaagcggaagacagcaccagttgcccttgaagcagaaaacagaggtgaaatgaaactagctctccagtatgtcccagagccagtccctggtaaaaagcttcctacaactggagaagtgcacatctgggtgaaggaatgccttgatctaccactgctaaggggaagtcatctaaattcttttgttaaatgtaccatccttccagatacaagtaggaaaagtcgccagaagacaagagctgtagggaaaaccaccaaccctatcttcaaccacactatggtgtatgatgggttcaggcctgaagatctgatggaagcctgtgtagagcttactgtctgggaccattacaaattaaccaaccaatttttgggaggtcttcgtattggctttggaacaggtaaaagttatgggactgaagtggactggatggactctacttcagaggaagttgctctctgggagaagatggtaaactcccccaatacttggattgaagcaacactgcctctcagaatgcttttgattgccaagatttccaaatgagcccaaattccactggctcctccactgaaaactactaaaccggtggaatctgatcttgaaaatctgagtaggtggacaaatatcctcactttctatctattgcacctaaggaatactacacagcatgtaaaagtcaatctgcatgtgcttctttgattacaaggcccaagggatttaaatataacaaaatgtgtaatttgtgactctaatattaaataagatatttgaacaagctaggaaaattgaatttctgctgctgcttcaaagaaaaagctgccccagagcattaaacatggggtattgttaagaagcaaaatgttcttgtttgccatcatgtgtttcacaccacaattctgtgccacagttaagagggtctggtacccttgcaggacctttgtaggttgtgggaaaaagtcgcagaaagatactcaaagtggagcagggaatggagacagacatcagtgatgat

SEQ ID NO: 188251 - DNA, 4751 bp, Homo sapiens
  Payload ID: 17042
  Gene Symbol: SYTL2
  Gene Name: synaptotagmin-like 2
  ENST ID: ENST00000354566
  CDS Start-End: 1-3831
ctaaaagaaagaatggatgaacccaatgcagaacaggtctataatccctctcagtttgagaatttgagaaagttttgggacttagaagctaattcaaacagtaaggataatgacaagaatattaccaccacaagccaaaaaaattctgcaccttttaataggcagaaacacaaggaattcagcgacattaaattatcaggtaaaaatacccatgaagcagaggtgcttctaagcccaaaaaaagttatggcaagagaggaaatggagaaattaaattcaaagggcatactccaggtgctaccagatgaaatcacatttcctttgagtccacttagaaagtatacttatcagttgccaggaaatgagtcatcaaaggaaaatgtggaaaagaatacggaagggattgttactccagtgtttaaggaagaaaaggattactcagaacaagagattcaagaatccataataaaaaccaatgttttgtctaaagactgcaaagacacttttaatgacagcttgcagaaactgctttcagaaacctcaacaccagcaattcaaccctctggtggaaaagttcatggaaaacaagtgcttgaaccaagtgtttctgaaaataggacatggcctcaaaaaacagattttgctgatactgaggaagaagtcaaaggacctgagaagatcattaatgagcatgttgacaaaacagtagttcatccaaaggttaaacggaactctttgactgctagtctagacaaactcctgaaggaagcaactggaacttcaccctctcccttgcaagccaagttggcgcctgttatcactggaaccaactctaagctggaagaggggagattttttggaaaagggatagaacagagtcacaatacttcagctgataagagagaaatactagctccttttccagtgagagatgaaacttttggaaatacagctctcctcaagaaagctgaaagtggtgagtgccagctaagcacacagaatttgattcagatggctgcagaagattctcatccattggatccaacttcccagctttccagaaagggttcttttggggatgtggccagccctccccaagatatgctttttccccaggatgctcatcttgttccccaggctagggtacacccttctcaaacggaaatttcggagactgtagagaaagtcattcttccacccagacctgtattgaatgatgtaagtgctgcattacagaagctgtgtggagaagtatggttaagttatccagctggaagggaagtaggtcctggagaagtgaacccagaatttcctgaagcagtacagccagtatgtagccccctaaatcctccaggagtgatatcaccatgggctacgatggacaccatagttccagacaggaaggatttttattcctccaatgtagttcctgataaaactcatgaagttggatcttatttagctgcccaaatgtctccatcagaccagacgcttagctcatttgcttccattgttgctcaatatggcaaaggcctccctcaggaagtggaagaaattgtgagggaaacaattgttcaacccaaatcagagttcctcgaattcagtgctggcttagaaaaactactgaaggaagaaactgaaaccttcccctcaaaatatgaaagtgatacagggaatctttctccatcaaagttaataggtagtacagaggagcccaggcgagccacttctgaatgccatcctgaggaattaaaagaaacagtagaaaaggccgaggctccgttaataactgagagtgcttttgatgctggttttgagaaacttcttaaagaaataactgaagctcctccttatcagccccaggtgtcagtgagagaagaaactcacgagaaggagtcctcacagtcagagcagaccaggttcttggggacagtgccccatttttacagggcagcctcacagacctctgaaatgaaggataaaagtaatggtttggaatctcaagtcaaccaatgtgataaaatgttgggaggagacgcacttgtgactgatttattggtagatttttgtggttccagaagtggagttgagatccctagaaccccacaactttatgtggctcatgaaatagggaccattaaaactgtaacccccccagaggacagggacagtgaaagtggggttgcagggggacaagggactcttcaggaacctggctttggagaggcttctgaagcaattagtgtgtccagaaataggcaacccattcctctcctgatgaacaaagaaaactctacaaaaacaagtaaagttgaattgactctagcatcgccatatatgaaacaagagaaagaggaagaaaaagaaggtttctctgagtctgatttttcagatggaaacaccagttctaatgcagagagctggagaaatccttccagttcagaagaagaacccagtcctgttttgaaaactttggaaaggagtgccgctaggaaaatgccttccaaaagtctagaagacatttcatcagattcatcaaatcaagcaaaagtagataatcagccagaagaattagtgcgtagtgctgaagatgatgagaaaccagatcagaagccagttacaaatgaatgcgtaccaagaatttccacagtgcctacacaacctgataatccattttctcaccctgacaaactcaaaaggatgagcaagtctgttccagcatttctccaagatgagagtgatgacagagaaacagatacagcatcagaaagcagttaccagctcagcagacacaagaagagcccgagctctttaaccaatcttagcagctcctctggcatgacgtccttgtcttctgtgagtggcagtgtgatgagtgtttatagtggagactttggcaatctggaagttaaaggaaatattcagtttgcaattgaatatgtggagtcactgaaggagttgcatgtttttgtggcccagtgtaaggacttagcagcagcggatgtaaaaaaacagcgttcagacccatatgtaaaggcctatttgctaccagacaaaggcaaaatgggcaagaagaaaacactcgtagtgaagaaaaccttgaatcctgtgtataacgaaatactgcggtataaaattgaaaaacaaatcttaaagacacagaaattgaacctgtccatttggcatcgggatacatttaagcgcaatagtttcctaggggaggtggaacttgatttggaaacatgggactgggataacaaacagaataaacaattgagatggtaccctctgaagcggaagacagcaccagttgcccttgaagcagaaaacagaggtgaaatgaaactagctctccagtatgtcccagagccagtccctggtaaaaagcttcctacaactggagaagtgcacatctgggtgaaggaatgccttgatctaccactgctaaggggaagtcatctaaattcttttgttaaatgtaccatccttccagatacaagtaggaaaagtcgccagaagacaagagctgtagggaaaaccaccaaccctatcttcaaccacactatggtgtatgatgggttcaggcctgaagatctgatggaagcctgtgtagagcttactgtctgggaccattacaaattaaccaaccaatttttgggaggtcttcgtattggctttggaacaggtaaaagttatgggactgaagtggactggatggactctacttcagaggaagttgctctctgggagaagatggtaaactcccccaatacttggattgaagcaacactgcctctcagaatgcttttgattgccaagatttccaaatgagcccaaattccactggctcctccactgaaaactactaaaccggtggaatctgatcttgaaaatctgagtaggtggacaaatatcctcactttctatctattgcacctaaggaatactacacagcatgtaaaagtcaatctgcatgtgcttctttgattacaaggcccaagggatttaaatataacaaaatgtgtaatttgtgactctaatattaaataagatatttgaacaagctaggaaaattgaatttctgctgctgcttcaaagaaaaagctgccccagagcattaaacatggggtattgttaagaagcaaaatgttcttgtttgccatcatgtgtttcacaccacaattctgtgccacagttaagagggtctggtacccttgcaggacctttgtaggttgtgggaaaaagtcgcagaaagatactcaaagtggagcagggaatggagacagacatcagtgatgataaaaaaaaaaatggaccttaagaaactatttactctgtaatctctaataaaatatggaattccatattagggcaatgagactgaaactactggtgtttttctgccttgagaaaacaaacagttaaaacaagcctcaaatgtattttagtgccacccactggccataggtacaattcagttgttggcttgttttgacttaattctaaaataggtctcaagcctgtatttttatgagtttatttttttaaaaccctgcatatatatgattgtttttcttataactttactatatgaaagcagcataagagtagtcacaaacatgttttgcaacaaagttttaattagaatgtaagttgctcagttatactgttcttcttatgtatgtaaaattttcgtattttgtaaaaacccttagaataaattatcatttgatttaaattgtattagaaaa

SEQ ID NO: 188252 - DNA, 6672 bp, Homo sapiens
  Payload ID: 17042
  Gene Symbol: SYTL2
  Gene Name: synaptotagmin-like 2
  ENST ID: ENST00000634661
  CDS Start-End: 1-6672
atgattgacttaagcttcctgactgaagaggaacaagaggccatcatgaaggttttgcagcgggatgctgctctgaagagggccgaagaagagagagtcagacatttgcctgaaaaaattaaggatgaccagcagctgaagaatatgagtggccaatggttttatgaagccaaggcaaaaaggcacagggacaaaatccatggcgcagatatcatcagagcatctatgagaaagaagaggccccagatagcagctgagcagagtaaagacagagaaaatggggcaaaggaaagctgggtgaataatgtcaacaaagatgctttccttcctccagagctggctggcgttgtagaagagccagaagaagatgcagcaccagcaagcccgagttccagtgtggtaaatccagcttccagtgtgattgatatgtcccaggaaaacacaaggaaaccaaatgtgtctccagagaagcagaggaagaatccgtttaatagctccaagttgccagaaggtcactcatcacaacaaactaaaaatgaacagtcaaaaaatggaagaactggtttatttcagacttcaaaagaggatgaattgtcagagtcaaaagaaaagtcaactgtcgcagatacttcaatccaaaagttagagaaatcaaagcagactttgccaggcctttcaaatgggtcccaaatcaaggctccaatccccaaagccaggaagatgatctacaaatcaactgatttaaacaaagatgataaccagtcttttcctagacaaaggacagactccctgaaagcgagaggggctccgagagggatcctcaagcgcaactccagttccagtagcacagactcagaaacccttcgttataatcacaactttgaacccaaaagcaaaattgtgtcacctggcctaaccatccatgagagaatttctgagaaggagcattctttagaagacaactcttccccaaactccctggagccattaaagcatgtgagattctctgcagtgaaggatgagcttccacagagtcctgggctaatccatggtcgggaagtaggagaatttagtgttttagaatctgacagattgaaaaatggaatggaagatgcaggggacacagaagagtttcagagtgaccctaagccttctcaatacagaaagccttcgctttttcatcaatcaacctcaagcccatatgtatcaaaaagtgaaacacatcagccaatgacttctggttcttttccaattaatgggctgcattctcattcagaagttttaactgcaagaccacagtctatggagaattcaccaaccatcaatgaacccaaagataaatcatcagaattaacaaggcttgaatctgtattacccagaagccctgctgatgaactgtctcattgtgttgagcctgagccatctcaggtgccaggtggcagttctagagaccgtcagcaaggtaagccccctcctctcccggctctaaaagctaagacatcttcacgttctggtccatatgccactgagataaagaagtcaactgatgattccatatttaaagttctagactggtttaaccgaagttcttattcagatgacaataagtcattcctccaacatccccgaggaatagagtccaaagaaaaaacagactcaaaatcacaggttgctgttgacttggtgacagatgacactactttaagagaaaatggctcaaagaccctatcacccagcaaaattgaattgaagcctgtgagatctgactcaccattccaagcagagggagatatgctggtttctgaaagttgccaagataataatgtgaatatcaaatccaaattcatgaatttgtcccaaaaaggcaccccaaaggaaggcccaggtatattgcaaccatttgaaagctatggcaccccaagtcaagggagtaaaaatatggactatagccaagattcaaaaagcccaggaaaagggaatggggcatctccttcaaatagtaactattcctacagtgttctcaaggaatctgatgcagaaaaccaagttccatgcaacactaataatattggcaacttgggtgaagaagaacccaagtttcatgctcatgaagaaaatagaggacactcagaagtgaattttgactcttcaacagttgtcaaagaaccaggtttgaaagataacatgaatgcagagagaaagagcaaagtaggaaatacctatatcctgaaagcctccttagagccagagaatattaagtcaacacctggggttgccaacaatggctctccttggaagaagcctgaggtccaattccagcaagaagctggtgaggttcccaagaaccaagtgcagagagagaaatacaaaagagtgagtgacagaatatccttttgggaaggagagaaagctggtgctaagataactcatgaaaaacccacatcttcatgtagccaggaacaaccttctgctaaagcatatcagcctgtgaagaagtcacagggtgtatcatccatggacagtttatctacagaccagagtgaatataatcaggccattcccaaacgagtggtcttagatgaggatgatcaagcatcccagctctccaattcttattcctcaaataaatctaaagagaccaagccacaaatagcaggtccatccagatactatctttcagctgagcaatcagataaagtgtctctgtttcagaataagaaaaatgagcctataaaaagatcacaagtggcagacagtttgccttctagaagaaacattactttaccagcactgcaacctccctcaaatgtcgggagtgaacgacatgctccattggagaaagacagacctctagttcgtgaatcaaatgccaactttaaagttatgtccctaaaagaaagaatggatgaacccaatgcagaacaggtctataatccctctcagtttgagaatttgagaaagttttgggacttagaagctaattcaaacagtaaggataatgacaagaatattaccaccacaagccaaaaaaattctgcaccttttaataggcagaaacacaaggaattcagcgacattaaattatcaggtaaaaatacccatgaagcagaggtgcttctaagcccaaaaaaagttatggcaagagaggaaatggagaaattaaattcaaagggcatactccaggtgctaccagatgaaatcacatttcctttgagtccacttagaaagtatacttatcagttgccaggaaatgagtcatcaaaggaaaatgtggaaaagaatacggaagggattgttactccagtgtttaaggaagaaaaggattactcagaacaagagattcaagaatccataataaaaaccaatgttttgtctaaagactgcaaagacacttttaatgacagcttgcagaaactgctttcagaaacctcaacaccagcaattcaaccctctggtggaaaagttcatggaaaacaagtgcttgaaccaagtgtttctgaaaataggacatggcctcaaaaaacagattttgctgatactgaggaagaagtcaaaggacctgagaagatcattaatgagcatgttgacaaaacagtagttcatccaaaggttaaacggaactctttgactgctagtctagacaaactcctgaaggaagcaactggaacttcaccctctcccttgcaagccaagttggcgcctgttatcactggaaccaactctaagctggaagaggggagattttttggaaaagggatagaacagagtcacaatacttcagctgataagagagaaatactagctccttttccagtgagagatgaaacttttggaaatacagctctcctcaagaaagctgaaagtggtgagtgccagctaagcacacagaatttgattcagatggctgcagaagattctcatccattggatccaacttcccagctttccagaaagggttcttttggggatgtggccagccctccccaagatatgctttttccccaggatgctcatcttgttccccaggctagggtacacccttctcaaacggaaatttcggagactgtagagaaagtcattcttccacccagacctgtattgaatgatgtaagtgctgcattacagaagctgtgtggagaagtatggttaagttatccagctggaagggaagtaggtcctggagaagtgaacccagaatttcctgaagcagtacagccagtatgtagccccctaaatcctccaggagtgatatcaccatgggctacgatggacaccatagttccagacaggaaggatttttattcctccaatgtagttcctgataaaactcatgaagttggatcttatttagctgcccaaatgtctccatcagaccagacgcttagctcatttgcttccattgttgctcaatatggcaaaggcctccctcaggaagtggaagaaattgtgagggaaacaattgttcaacccaaatcagagttcctcgaattcagtgctggcttagaaaaactactgaaggaagaaactgaaaccttcccctcaaaatatgaaagtgatacagggaatctttctccatcaaagttaataggtagtacagaggagcccaggcgagccacttctgaatgccatcctgaggaattaaaagaaacagtagaaaaggccgaggctccgttaataactgagagtgcttttgatgctggttttgagaaacttcttaaagaaataactgaagctcctccttatcagccccaggtgtcagtgagagaagaaactcacgagaaggagtcctcacagtcagagcagaccaggttcttggggacagtgccccatttttacagggcagcctcacagacctctgaaatgaaggataaaagtaatggtttggaatctcaagtcaaccaatgtgataaaatgttgggaggagacgcacttgtgactgatttattggtagatttttgtggttccagaagtggagttgagatccctagaaccccacaactttatgtggctcatgaaatagggaccattaaaactgtaacccccccagaggacagggacagtgaaagtggggttgcagggggacaagggactcttcaggaacctggctttggagaggcttctgaagcaattagtgtgtccagaaataggcaacccattcctctcctgatgaacaaagaaaactctacaaaaacaagtaaagttgaattgactctagcatcgccatatatgaaacaagagaaagaggaagaaaaagaaggtttctctgagtctgatttttcagatggaaacaccagttctaatgcagagagctggagaaatccttccagttcagaagaagaacccagtcctgttttgaaaactttggaaaggagtgccgctaggaaaatgccttccaaaagtctagaagacatttcatcagattcatcaaatcaagcaaaagtagataatcagccagaagaattagtgcgtagtgctgaagatgtttccacagtgcctacacaacctgataatccattttctcaccctgacaaactcaaaaggatgagcaagtctgttccagcatttctccaagatgagagtgatgacagagaaacagatacagcatcagaaagcagttaccagctcagcagacacaagaagagcccgagctctttaaccaatcttagcagctcctctggcatgacgtccttgtcttctgtgagtggcagtgtgatgagtgtttatagtggagactttggcaatctggaagttaaaggaaatattcagtttgcaattgaatatgtggagtcactgaaggagttgcatgtttttgtggcccagtgtaaggacttagcagcagcggatgtaaaaaaacagcgttcagacccatatgtaaaggcctatttgctaccagacaaaggcaaaatgggcaagaagaaaacactcgtagtgaagaaaaccttgaatcctgtgtataacgaaatactgcggtataaaattgaaaaacaaatcttaaagacacagaaattgaacctgtccatttggcatcgggatacatttaagcgcaatagtttcctaggggaggtggaacttgatttggaaacatgggactgggataacaaacagaataaacaattgagatggtaccctctgaagcggaagacagcaccagttgcccttgaagcagaaaacagaggtgaaatgaaactagctctccagtatgtcccagagccagtccctggtaaaaagcttcctacaactggagaagtgcacatctgggtgaaggaatgccttgatctaccactgctaaggggaagtcatctaaattcttttgttaaatgtaccatccttccagatacaagtaggaaaagtcgccagaagacaagagctgtagggaaaaccaccaaccctatcttcaaccacactatggtgtatgatgggttcaggcctgaagatctgatggaagcctgtgtagagcttactgtctgggaccattacaaattaaccaaccaatttttgggaggtcttcgtattggctttggaacaggtaaaagttatgggactgaagtggactggatggactctacttcagaggaagttgctctctgggagaagatggtaaactcccccaatacttggattgaagcaacactgcctctcagaatgcttttgattgccaagatttccaaatga

SEQ ID NO: 188253 - DNA, 4931 bp, Homo sapiens
  Payload ID: 17042
  Gene Symbol: SYTL2
  Gene Name: synaptotagmin-like 2
  ENST ID: ENST00000389959
  CDS Start-End: 1-2601
ctaaaagaaagaatggatgaacccaatgcagaacaggtctataatccctctcagtttgagaatttgagaaagttttgggacttagaagctaattcaaacagtaaggataatgacaagaatattaccaccacaagccaaaaaaattctgcaccttttaataggcagaaacacaaggaattcagcgacattaaattatcaggtaaaaatacccatgaagcagaggtgcttctaagcccaaaaaaagttatggcaagagaggaaatggagaaattaaattcaaagggcatactccaggtgctaccagatgaaatcacatttcctttgagtccacttagaaagtatacttatcagttgccaggaaatgagtcatcaaaggaaaatgtggaaaagaatacggaagggattgttactccagtgtttaaggaagaaaaggattactcagaacaagagattcaagaatccataataaaaaccaatgttttgtctaaagactgcaaagacacttttaatgacagcttgcagaaactgctttcagaaacctcaacaccagcaattcaaccctctggtggaaaagttcatggaaaacaagtgcttgaaccaagtgtttctgaaaataggacatggcctcaaaaaacagattttgctgatactgaggaagaagtcaaaggacctgagaagatcattaatgagcatgttgacaaaacagtagttcatccaaaggttaaacggaactctttgactgctagtctagacaaactcctgaaggaagcaactggaacttcaccctctcccttgcaagccaagttggcgcctgttatcactggaaccaactctaagctggaagaggggagattttttggaaaagggatagaacagagtcacaatacttcagctgataagagagaaatactagctccttttccagtgagagatgaaacttttggaaatacagctctcctcaagaaagctgaaagtggtgagtgccagctaagcacacagaatttgattcagatggctgcagaagattctcatccattggatccaacttcccagctttccagaaagggttcttttggggatgtggccagccctccccaagatatgctttttccccaggatgctcatcttgttccccaggctagggtacacccttctcaaacggaaatttcggagactgtagagaaagtcattcttccacccagacctgtattgaatgatgtaagtgctgcattacagaagctgtgtggagaagtatggttaagttatccagctggaagggaagtaggtcctggagaagtgaacccagaatttcctgaagcagtacagccagtatgtagccccctaaatcctccaggagtgatatcaccatgggctacgatggacaccatagttccagacaggaaggatttttattcctccaatgtagttcctgataaaactcatgaagttggatcttatttagctgcccaaatgtctccatcagaccagacgcttagctcatttgcttccattgttgctcaatatggcaaaggcctccctcaggaagtggaagaaattgtgagggaaacaattgttcaacccaaatcagagttcctcgaattcagtgctggcttagaaaaactactgaaggaagaaactgaaaccttcccctcaaaatatgaaagtgatacagggaatctttctccatcaaagttaataggtagtacagaggagcccaggcgagccacttctgaatgccatcctgaggaattaaaagaaacagtagaaaaggccgaggctccgttaataactgagagtgcttttgatgctggttttgagaaacttcttaaagaaataactgaagctcctccttatcagccccaggtgtcagtgagagaagaaactcacgagaaggagtcctcacagtcagagcagaccaggttcttggggacagtgccccatttttacagggcagcctcacagacctctgaaatgaaggataaaagtaatggtttggaatctcaagtcaaccaatgtgataaaatgttgggaggagacgcacttgtgactgatttattggtagatttttgtggttccagaagtggagttgagatccctagaaccccacaactttatgtggctcatgaaatagggaccattaaaactgtaacccccccagaggacagggacagtgaaagtggggttgcagggggacaagggactcttcaggaacctggctttggagaggcttctgaagcaattagtgtgtccagaaataggcaacccattcctctcctgatgaacaaagaaaactctacaaaaacaagtaaagttgaattgactctagcatcgccatatatgaaacaagagaaagaggaagaaaaagaaggtttctctgagtctgatttttcagatggaaacaccagttctaatgcagagagctggagaaatccttccagttcagaagaagaacccagtcctgttttgaaaactttggaaaggagtgccgctaggaaaatgccttccaaaagtctagaagacatttcatcagattcatcaaatcaagcaaaagtagataatcagccagaagaattagtgcgtagtgctgaagatgatttttagttgaacaggagaccttaaagaggctaatgaagaagagtcacagtgaggaatggatgaaagcaagatgaaaacctgtcagatgtattctgctgtctcagttgtgaaactgacatttgagctttactttcatgtctctttaatccttctgttaaaatggtatttattctcaatgttgccctcctgagtagatgagaaaccagatcagaagccagttacaaatgaatgcgtaccaagaatttccacagtgcctacacaacctgataatccattttctcaccctgacaaactcaaaaggatgagcaagtctgttccagcatttctccaagatgagagtgatgacagagaaacagatacagcatcagaaagcagttaccagctcagcagacacaagaagagcccgagctctttaaccaatcttagcagctcctctggcatgacgtccttgtcttctgtgagtggcagtgtgatgagtgtttatagtggagactttggcaatctggaagttaaaggaaatattcagtttgcaattgaatatgtggagtcactgaaggagttgcatgtttttgtggcccagtgtaaggacttagcagcagcggatgtaaaaaaacagcgttcagacccatatgtaaaggcctatttgctaccagacaaaggcaaaatgggcaagaagaaaacactcgtagtgaagaaaaccttgaatcctgtgtataacgaaatactgcggtataaaattgaaaaacaaatcttaaagacacagaaattgaacctgtccatttggcatcgggatacatttaagcgcaatagtttcctaggggaggtggaacttgatttggaaacatgggactgggataacaaacagaataaacaattgagatggtaccctctgaagcggaagacagcaccagttgcccttgaagcagaaaacagaggtgaaatgaaactagctctccagtatgtcccagagccagtccctggtaaaaagcttcctacaactggagaagtgcacatctgggtgaaggaatgccttgatctaccactgctaaggggaagtcatctaaattcttttgttaaatgtaccatccttccagatacaagtaggaaaagtcgccagaagacaagagctgtagggaaaaccaccaaccctatcttcaaccacactatggtgtatgatgggttcaggcctgaagatctgatggaagcctgtgtagagcttactgtctgggaccattacaaattaaccaaccaatttttgggaggtcttcgtattggctttggaacaggtaaaagttatgggactgaagtggactggatggactctacttcagaggaagttgctctctgggagaagatggtaaactcccccaatacttggattgaagcaacactgcctctcagaatgcttttgattgccaagatttccaaatgagcccaaattccactggctcctccactgaaaactactaaaccggtggaatctgatcttgaaaatctgagtaggtggacaaatatcctcactttctatctattgcacctaaggaatactacacagcatgtaaaagtcaatctgcatgtgcttctttgattacaaggcccaagggatttaaatataacaaaatgtgtaatttgtgactctaatattaaataagatatttgaacaagctaggaaaattgaatttctgctgctgcttcaaagaaaaagctgccccagagcattaaacatggggtattgttaagaagcaaaatgttcttgtttgccatcatgtgtttcacaccacaattctgtgccacagttaagagggtctggtacccttgcaggacctttgtaggttgtgggaaaaagtcgcagaaagatactcaaagtggagcagggaatggagacagacatcagtgatgataaaaaaaaaaatggaccttaagaaactatttactctgtaatctctaataaaatatggaattccatattagggcaatgagactgaaactactggtgtttttctgccttgagaaaacaaacagttaaaacaagcctcaaatgtattttagtgccacccactggccataggtacaattcagttgttggcttgttttgacttaattctaaaataggtctcaagcctgtatttttatgagtttatttttttaaaaccctgcatatatatgattgtttttcttataactttactatatgaaagcagcataagagtagtcacaaacatgttttgcaacaaagttttaattagaatgtaagttgctcagttatactgttcttcttatgtatgtaaaattttcgtattttgtaaaaacccttagaataaattatcatttgattt

SEQ ID NO: 188254 - DNA, 2292 bp, Homo sapiens
  Payload ID: 17043
  Gene Symbol: SYTL3
  Gene Name: synaptotagmin-like 3
  Uniprot ID: Q4VX76
  ENST ID: ENST00000297239
  CDS Start-End: 195-2027
ggaacctggatctaaggagggaagaggcgttgcccctgctggcatagtcaggtaccagcccagccaggtattgaacgggctgagcttttcatgatggttcctgctgacctggaaacatcttaaatggaagggcgtgagcgcttggtccatgcagtgaagctcttccaacctgggtcaacgaaaacggagaagaaatggcccaagaaatagatctgagtgctctcaaggagttagaacgcgaggccattctccaggtcctgtaccgagaccaggcggttcaaaacacagaggaggagaggacacggaaactgaaaacacacctgcagcatctccggtggaaaggagcgaagaacacggactgggagcacaaagagaagtgctgtgcgcgctgccagcaggtgctggggttcctgctgcaccggggcgccgtgtgccggggctgcagccaccgcgtgtgtgcccagtgccgagtgttcctgagggggacccatgcctggaagtgcacggtgtgcttcgaggacaggaatgtcaaaataaaaactggagaatggttctatgaggaacgagccaagaaatttccaactggaggcaaacatgagacagttggagggcagctcttgcaatcttatcagaagctgagcaaaatttctgtggttcctcctactccacctcctgtcagcgagagccagtgcagccgcagtcctggcaggttacaggaatttggtcagtttagaggatttaataagtccgtggaaaatttgtttctgtctcttgctacccacgtgaaaaagctctccaaatcccagaatgatatgacttctgagaagcatcttctcgccacgggccccaggcagtgtgtgggacagacagagagacggagccagtctgacactgcggtcaacgtcaccaccaggaaggtcagtgcaccagatattctgaaacctctcaatcaagaggatcccaaatgctctactaaccctattttgaagcaacagaatctcccatccagtccggcacccagtaccatattctctggaggttttagacacggaagtttaattagcattgacagcacctgtacagagatgggcaattttgacaatgctaatgtcactggagaaatagaatttgccattcattattgcttcaaaacccattctttagaaatatgcatcaaggcctgtaagaaccttgcctatggagaagaaaagaagaaaaagtgcaatccgtatgtgaagacctacctgttgcccgacagatcctcccagggaaagcgcaagactggagtccaaaggaacaccgtggacccgacctttcaggagaccttgaagtatcaggtggcccctgcccagctggtgacccggcagctgcaggtctcggtgtggcatctgggcacgctggcccggagagtgtttcttggagaagtgatcattcctctggccacgtgggactttgaagacagcacaacacagtccttccgctggcatccgctccgggccaaggcggagaaatacgaagacagcgttcctcagagtaatggagagctcacagtccgggctaagctggttctcccttcacggcccagaaaactccaagaggctcaagaagggacagatcagccatcacttcatggtcaactttgtttggtagtgctaggagccaagaatttacctgtgcggccagatggcaccttgaactcatttgttaagggctgtctcactctgccagaccaacaaaaactgagactgaagtcgccagtcctgaggaagcaggcttgcccccagtggaaacactcatttgtcttcagtggcgtaaccccagctcagctgaggcagtcaagcttggagttaactgtctgggatcaggccctctttggaatgaacgaccgcttgcttggaggaaccagacttggttcaaagggagacacagctgttggcggggatgcatgctcactatcgaagctccagtggcagaaagtcctttccagccccaatctatggacagacatgactcttgtcctgcactgacatgaaggcctcaaggttccaggttgcagcaggcgtgaggcactgtgcgtctgcagaggggctacgaaccaggtgcagggtcccagctggagacccctttgaccttgagcagtctccatctgcggccctgtcccatggcttaaccgcctattggtatctgtgtatatttacgttaaacacaattatgttacctaagcctctggtgggttatctcctctttgagatgtagaaaatggccagattttaataaacgttgttacccatg

SEQ ID NO: 188255 - DNA, 2504 bp, Homo sapiens
  Payload ID: 17043
  Gene Symbol: SYTL3
  Gene Name: synaptotagmin-like 3
  Uniprot ID: Q4VX76
  ENST ID: ENST00000360448
  CDS Start-End: 400-2232
aagaagaattgacttccttctctgcagagccggctctggtctcttctcttgaagcagatgcgaaggctccccgaatgagaaagaatactcggaatcagcggtgaattgcagtgatctttcagagaaagcgcctgttcaactttgtcctctctcagagactcagagccttggggcactgagggatgccagttctgcctgttcatctggaacctggatctaaggagggaagaggcgttgcccctgctggcatagtcaggtaccagcccagccaggtattgaacgggctgagcttttcatgatggttcctgctgacctggaaacatcttaaatggaagggcgtgagcgcttggtccatgcagtgaagctcttccaacctgggtcaacgaaaacggagaagaaatggcccaagaaatagatctgagtgctctcaaggagttagaacgcgaggccattctccaggtcctgtaccgagaccaggcggttcaaaacacagaggaggagaggacacggaaactgaaaacacacctgcagcatctccggtggaaaggagcgaagaacacggactgggagcacaaagagaagtgctgtgcgcgctgccagcaggtgctggggttcctgctgcaccggggcgccgtgtgccggggctgcagccaccgcgtgtgtgcccagtgccgagtgttcctgagggggacccatgcctggaagtgcacggtgtgcttcgaggacaggaatgtcaaaataaaaactggagaatggttctatgaggaacgagccaagaaatttccaactggaggcaaacatgagacagttggagggcagctcttgcaatcttatcagaagctgagcaaaatttctgtggttcctcctactccacctcctgtcagcgagagccagtgcagccgcagtcctggcaggttacaggaatttggtcagtttagaggatttaataagtccgtggaaaatttgtttctgtctcttgctacccacgtgaaaaagctctccaaatcccagaatgatatgacttctgagaagcatcttctcgccacgggccccaggcagtgtgtgggacagacagagagacggagccagtctgacactgcggtcaacgtcaccaccaggaaggtcagtgcaccagatattctgaaacctctcaatcaagaggatcccaaatgctctactaaccctattttgaagcaacagaatctcccatccagtccggcacccagtaccatattctctggaggttttagacacggaagtttaattagcattgacagcacctgtacagagatgggcaattttgacaatgctaatgtcactggagaaatagaatttgccattcattattgcttcaaaacccattctttagaaatatgcatcaaggcctgtaagaaccttgcctatggagaagaaaagaagaaaaagtgcaatccgtatgtgaagacctacctgttgcccgacagatcctcccagggaaagcgcaagactggagtccaaaggaacaccgtggacccgacctttcaggagaccttgaagtatcaggtggcccctgcccagctggtgacccggcagctgcaggtctcggtgtggcatctgggcacgctggcccggagagtgtttcttggagaagtgatcattcctctggccacgtgggactttgaagacagcacaacacagtccttccgctggcatccgctccgggccaaggcggagaaatacgaagacagcgttcctcagagtaatggagagctcacagtccgggctaagctggttctcccttcacggcccagaaaactccaagaggctcaagaagggacagatcagccatcacttcatggtcaactttgtttggtagtgctaggagccaagaatttacctgtgcggccagatggcaccttgaactcatttgttaagggctgtctcactctgccagaccaacaaaaactgagactgaagtcgccagtcctgaggaagcaggcttgcccccagtggaaacactcatttgtcttcagtggcgtaaccccagctcagctgaggcagtcaagcttggagttaactgtctgggatcaggccctctttggaatgaacgaccgcttgcttggaggaaccagacttggttcaaagggagacacagctgttggcggggatgcatgctcactatcgaagctccagtggcagaaagtcctttccagccccaatctatggacagacatgactcttgtcctgcactgacatgaaggcctcaaggttccaggttgcagcaggcgtgaggcactgtgcgtctgcagaggggctacgaaccaggtgcagggtcccagctggagacccctttgaccttgagcagtctccatctgcggccctgtcccatggcttaaccgcctattggtatctgtgtatatttacgttaaacacaattatgttacctaagcctctggtgggttatctcctctttgagatgtagaaaatggccagattttaataaacgttgttacccatgtcctcca

SEQ ID NO: 188256 - DNA, 2692 bp, Homo sapiens
  Payload ID: 17043
  Gene Symbol: SYTL3
  Gene Name: synaptotagmin-like 3
  Uniprot ID: Q4VX76
  ENST ID: ENST00000367081
  CDS Start-End: 792-2420
aagaagaattgacttccttctctgcagagccggctctggtctcttctcttgaagcagatgcgaaggctccccgaatgagaaagaatactcggaatcagcggtgaattgcagtgatctttcagagaaagcgcctgttcaactttgtcctctctcagagactcagagccttggggcactgagggatgccagttctgcctgttcatctggaacctggatctaaggagggaagaggcgttgcccctgctggcatagtcaggtaccagcccagccaggtattgaacgggctgagcttttcatgatggttcctgctgacctggaaacatcttaaatggaaggttagcttctatgagtcactgatactctttttattgctatttctaaatttccttggcttgaaaattacttctgctttgcagaaattatctgcttgcagctgtggataatttataacaatctctggtgaaacctcagaaaagagatatgcttttgtcttagatggatgtcagcagctgctgcagaacccggtgaaaacaccccccgggtagcacgaggctctgcgagccgtaactccgacaaacgcagaacttcttgaggctttcttcttctaaggagtatgacacagttaaaaaggaaaaaagaaccacaagcaaaacagttgccagtgaaataggagagggagctctttaaacaaggctggctgcagctggcctccgccgctcatctgcagggcgtgagcgcttggtccatgcagtgaagctcttccaacctgggtcaacgaaaacggagaagaaatggcccaagaaatagatctgagtgctctcaaggagttagaacgcgaggccattctccaggtcctgtaccgagaccaggcggttcaaaacacagaggaggagaggacacggaaactgaaaacacacctgcagcatctccggtggaaaggagcgaagaacacggactgggagcacaaagagaagtgctgtgcgcgctgccagcaggtgctggggttcctgctgcaccggggcgccgtgtgccggggctgcagccaccgcgtgtgtgcccagtgccgagtgttcctgagggggacccatgcctggaagtgcacggtgtgcttcgaggacaggaatgtcaaaataaaaactggagaatggttctatgaggaacgagccaagaaatttccaactggaggcaaacatgagacagttggagggcagctcttgcaatcttatcagaagctgagcaaaatttctgtggttcctcctactccacctcctgtcagcgagagccagtgcagccgcagtcctggcaggaaggtcagtgcaccagatattctgaaacctctcaatcaagaggatcccaaatgctctactaaccctattttgaagcaacagaatctcccatccagtccggcacccagtaccatattctctggaggttttagacacggaagtttaattagcattgacagcacctgtacagagatgggcaattttgacaatgctaatgtcactggagaaatagaatttgccattcattattgcttcaaaacccattctttagaaatatgcatcaaggcctgtaagaaccttgcctatggagaagaaaagaagaaaaagtgcaatccgtatgtgaagacctacctgttgcccgacagatcctcccagggaaagcgcaagactggagtccaaaggaacaccgtggacccgacctttcaggagaccttgaagtatcaggtggcccctgcccagctggtgacccggcagctgcaggtctcggtgtggcatctgggcacgctggcccggagagtgtttcttggagaagtgatcattcctctggccacgtgggactttgaagacagcacaacacagtccttccgctggcatccgctccgggccaaggcggagaaatacgaagacagcgttcctcagagtaatggagagctcacagtccgggctaagctggttctcccttcacggcccagaaaactccaagaggctcaagaagggacagatcagccatcacttcatggtcaactttgtttggtagtgctaggagccaagaatttacctgtgcggccagatggcaccttgaactcatttgttaagggctgtctcactctgccagaccaacaaaaactgagactgaagtcgccagtcctgaggaagcaggcttgcccccagtggaaacactcatttgtcttcagtggcgtaaccccagctcagctgaggcagtcaagcttggagttaactgtctgggatcaggccctctttggaatgaacgaccgcttgcttggaggaaccagacttggttcaaagggagacacagctgttggcggggatgcatgctcactatcgaagctccagtggcagaaagtcctttccagccccaatctatggacagacatgactcttgtcctgcactgacatgaaggcctcaaggttccaggttgcagcaggcgtgaggcactgtgcgtctgcagaggggctacgaaccaggtgcagggtcccagctggagacccctttgaccttgagcagtctccatctgcggccctgtcccatggcttaaccgcctattggtatctgtgtatatttacgttaaacacaattatgttacctaagcctctggtgggttatctcctctttgagatgtagaaaatggccagattttaataaacgttgttacccatgtcctcca

SEQ ID NO: 188257 - DNA, 2896 bp, Homo sapiens
  Payload ID: 17043
  Gene Symbol: SYTL3
  Gene Name: synaptotagmin-like 3
  Uniprot ID: Q4VX76
  ENST ID: ENST00000611299
  CDS Start-End: 792-2624
aagaagaattgacttccttctctgcagagccggctctggtctcttctcttgaagcagatgcgaaggctccccgaatgagaaagaatactcggaatcagcggtgaattgcagtgatctttcagagaaagcgcctgttcaactttgtcctctctcagagactcagagccttggggcactgagggatgccagttctgcctgttcatctggaacctggatctaaggagggaagaggcgttgcccctgctggcatagtcaggtaccagcccagccaggtattgaacgggctgagcttttcatgatggttcctgctgacctggaaacatcttaaatggaaggttagcttctatgagtcactgatactctttttattgctatttctaaatttccttggcttgaaaattacttctgctttgcagaaattatctgcttgcagctgtggataatttataacaatctctggtgaaacctcagaaaagagatatgcttttgtcttagatggatgtcagcagctgctgcagaacccggtgaaaacaccccccgggtagcacgaggctctgcgagccgtaactccgacaaacgcagaacttcttgaggctttcttcttctaaggagtatgacacagttaaaaaggaaaaaagaaccacaagcaaaacagttgccagtgaaataggagagggagctctttaaacaaggctggctgcagctggcctccgccgctcatctgcagggcgtgagcgcttggtccatgcagtgaagctcttccaacctgggtcaacgaaaacggagaagaaatggcccaagaaatagatctgagtgctctcaaggagttagaacgcgaggccattctccaggtcctgtaccgagaccaggcggttcaaaacacagaggaggagaggacacggaaactgaaaacacacctgcagcatctccggtggaaaggagcgaagaacacggactgggagcacaaagagaagtgctgtgcgcgctgccagcaggtgctggggttcctgctgcaccggggcgccgtgtgccggggctgcagccaccgcgtgtgtgcccagtgccgagtgttcctgagggggacccatgcctggaagtgcacggtgtgcttcgaggacaggaatgtcaaaataaaaactggagaatggttctatgaggaacgagccaagaaatttccaactggaggcaaacatgagacagttggagggcagctcttgcaatcttatcagaagctgagcaaaatttctgtggttcctcctactccacctcctgtcagcgagagccagtgcagccgcagtcctggcaggttacaggaatttggtcagtttagaggatttaataagtccgtggaaaatttgtttctgtctcttgctacccacgtgaaaaagctctccaaatcccagaatgatatgacttctgagaagcatcttctcgccacgggccccaggcagtgtgtgggacagacagagagacggagccagtctgacactgcggtcaacgtcaccaccaggaaggtcagtgcaccagatattctgaaacctctcaatcaagaggatcccaaatgctctactaaccctattttgaagcaacagaatctcccatccagtccggcacccagtaccatattctctggaggttttagacacggaagtttaattagcattgacagcacctgtacagagatgggcaattttgacaatgctaatgtcactggagaaatagaatttgccattcattattgcttcaaaacccattctttagaaatatgcatcaaggcctgtaagaaccttgcctatggagaagaaaagaagaaaaagtgcaatccgtatgtgaagacctacctgttgcccgacagatcctcccagggaaagcgcaagactggagtccaaaggaacaccgtggacccgacctttcaggagaccttgaagtatcaggtggcccctgcccagctggtgacccggcagctgcaggtctcggtgtggcatctgggcacgctggcccggagagtgtttcttggagaagtgatcattcctctggccacgtgggactttgaagacagcacaacacagtccttccgctggcatccgctccgggccaaggcggagaaatacgaagacagcgttcctcagagtaatggagagctcacagtccgggctaagctggttctcccttcacggcccagaaaactccaagaggctcaagaagggacagatcagccatcacttcatggtcaactttgtttggtagtgctaggagccaagaatttacctgtgcggccagatggcaccttgaactcatttgttaagggctgtctcactctgccagaccaacaaaaactgagactgaagtcgccagtcctgaggaagcaggcttgcccccagtggaaacactcatttgtcttcagtggcgtaaccccagctcagctgaggcagtcaagcttggagttaactgtctgggatcaggccctctttggaatgaacgaccgcttgcttggaggaaccagacttggttcaaagggagacacagctgttggcggggatgcatgctcactatcgaagctccagtggcagaaagtcctttccagccccaatctatggacagacatgactcttgtcctgcactgacatgaaggcctcaaggttccaggttgcagcaggcgtgaggcactgtgcgtctgcagaggggctacgaaccaggtgcagggtcccagctggagacccctttgaccttgagcagtctccatctgcggccctgtcccatggcttaaccgcctattggtatctgtgtatatttacgttaaacacaattatgttacctaagcctctggtgggttatctcctctttgagatgtagaaaatggccagattttaataaacgttgttacccatgtcctcca

SEQ ID NO: 188258 - DNA, 2335 bp, Homo sapiens
  Payload ID: 17044
  Gene Symbol: SYTL4
  Gene Name: synaptotagmin-like 4
  Uniprot ID: Q96C24
  ENST ID: ENST00000263033
  CDS Start-End: 189-2204
gagggtgagaagggccggctgccggagctgggttgcgatcttcccggagccggagaccctcccttgaaaccggcactgggacttctcgatctctggaggcacctgttgcaagtgacaggcaactctggtagctctccttgtctggttgttttgaagaaagaagagtagaagaaaaagttgagtaaatcatgtcggagttactggacctttcttttctgtctgaggaggaaaaggatttgattctcagtgttctacagcgagatgaagaggtccggaaagcagatgagaaaaggattaggcgactaaagaatgagttactggagataaaaaggaaaggggccaagaggggcagccaacactacagtgatcggacctgtgcccggtgccaggagagcctgggccgtttgagtcccaaaaccaatacttgtcggggttgtaatcacctggtgtgtcgggactgccgcatacaggaaagcaatggtacctggaggtgcaaggtgtgcgccaaggaaatagagttgaagaaagcaactggggactggttttatgaccagaaagtgaatcgctttgcttaccgcacaggtagtgagataatcaggatgtccctgcgccacaaacctgcagtgagtaaaagagagacagtgggacagtccctccttcatcagacacagatgggtgacatctggccaggaagaaagatcattcaggagcggcagaaggagcccagtgtgctatttgaagtgccaaagctgaaaagtggaaagagtgcattggaagctgagagtgagagtctggatagcttcacagctgactcggatagcacctccaggagagactctctggataaatctggcctctttccagaatggaagaagatgtctgctcccaaatctcaagtagaaaaggaaactcagcctggaggtcaaaatgtggtatttgtggatgagggtgagatgatatttaagaagaacaccagaaaaatcctcaggccttcagagtacactaaatctgtgatagatcttcgcccagaagatgtggtacatgaaagtggctccttgggagacagaagcaaatccgtcccaggcctcaatgtggatatggaagaggaagaagaagaagaagacattgaccacctagtgaagttacatcgccagaagctagccagaagcagcatgcaaagtggctcctccatgagtacgatcggcagcatgatgagcatctacagtgaagctggtgatttcgggaacatctttgtgactggcaggattgccttttccctgaagtatgagcagcaaacccagagtctggttgtccatgtgaaggagtgccatcagctggcctatgctgatgaagccaagaagcgctctaacccatatgtgaagacttaccttctgcctgacaagtcccgccaaggaaaaagaaaaaccagcatcaagcgggacactattaatccactatatgatgagacgctgaggtatgagatcccagaatctctcctggcccagaggaccctgcagttctcagtttggcatcatggtcgttttggcagaaacactttccttggagaggcagagatccagatggattcctggaagcttgataagaaactggatcattgcctccctttacatggaaagatcagtgctgagtccccgactggcttgccatcacacaaaggcgagttggtggtttcattgaaatacatcccagcctccaaaacccctgttggaggtgaccggaaaaagagtaaaggtggggaagggggagagctccaggtgtggatcaaagaagccaagaacttgacggctgccaaagcaggagggacttcagacagctttgtcaagggatacctccttcccatgaggaacaaggccagtaaacgtaaaactcctgtgatgaagaagaccctgaatcctcactacaaccatacatttgtctacaatggtgtgaggctggaagatctacagcatatgtgcctggaactgactgtgtgggaccgggagcccctggccagcaatgacttcctgggaggggtcaggctgggtgttggcactgggatcagtaatggggaagtggtggactggatggactcgactggggaagaagtgagcctgtggcagaagatgcgacagtacccagggtcttgggcagaagggactctgcagctccgttcctcaatggccaagcagaagctgggtttatgagtccctgtcctcttctgcaggtccagccctggcgagggcaggtcagaggaagtgaagaaatcaagagcaaagatttataatttaatgtgtatgtgtgtatgtgtgtatgtgtgtgtgtgtgtgtgtgtgtg

SEQ ID NO: 188259 - DNA, 3737 bp, Homo sapiens
  Payload ID: 17044
  Gene Symbol: SYTL4
  Gene Name: synaptotagmin-like 4
  Uniprot ID: Q96C24
  ENST ID: ENST00000276141
  CDS Start-End: 188-2203
agtcaccttttcgtgggttcctctcacagcgctcggccgtcgagcggggtcgctaacccgcactctcttcggacctacgacatcgcggcttctctggcgttggccagtcagccacaggcaactctggtagctctccttgtctggttgttttgaagaaagaagagtagaagaaaaagttgagtaaatcatgtcggagttactggacctttcttttctgtctgaggaggaaaaggatttgattctcagtgttctacagcgagatgaagaggtccggaaagcagatgagaaaaggattaggcgactaaagaatgagttactggagataaaaaggaaaggggccaagaggggcagccaacactacagtgatcggacctgtgcccggtgccaggagagcctgggccgtttgagtcccaaaaccaatacttgtcggggttgtaatcacctggtgtgtcgggactgccgcatacaggaaagcaatggtacctggaggtgcaaggtgtgcgccaaggaaatagagttgaagaaagcaactggggactggttttatgaccagaaagtgaatcgctttgcttaccgcacaggtagtgagataatcaggatgtccctgcgccacaaacctgcagtgagtaaaagagagacagtgggacagtccctccttcatcagacacagatgggtgacatctggccaggaagaaagatcattcaggagcggcagaaggagcccagtgtgctatttgaagtgccaaagctgaaaagtggaaagagtgcattggaagctgagagtgagagtctggatagcttcacagctgactcggatagcacctccaggagagactctctggataaatctggcctctttccagaatggaagaagatgtctgctcccaaatctcaagtagaaaaggaaactcagcctggaggtcaaaatgtggtatttgtggatgagggtgagatgatatttaagaagaacaccagaaaaatcctcaggccttcagagtacactaaatctgtgatagatcttcgcccagaagatgtggtacatgaaagtggctccttgggagacagaagcaaatccgtcccaggcctcaatgtggatatggaagaggaagaagaagaagaagacattgaccacctagtgaagttacatcgccagaagctagccagaagcagcatgcaaagtggctcctccatgagtacgatcggcagcatgatgagcatctacagtgaagctggtgatttcgggaacatctttgtgactggcaggattgccttttccctgaagtatgagcagcaaacccagagtctggttgtccatgtgaaggagtgccatcagctggcctatgctgatgaagccaagaagcgctctaacccatatgtgaagacttaccttctgcctgacaagtcccgccaaggaaaaagaaaaaccagcatcaagcgggacactattaatccactatatgatgagacgctgaggtatgagatcccagaatctctcctggcccagaggaccctgcagttctcagtttggcatcatggtcgttttggcagaaacactttccttggagaggcagagatccagatggattcctggaagcttgataagaaactggatcattgcctccctttacatggaaagatcagtgctgagtccccgactggcttgccatcacacaaaggcgagttggtggtttcattgaaatacatcccagcctccaaaacccctgttggaggtgaccggaaaaagagtaaaggtggggaagggggagagctccaggtgtggatcaaagaagccaagaacttgacggctgccaaagcaggagggacttcagacagctttgtcaagggatacctccttcccatgaggaacaaggccagtaaacgtaaaactcctgtgatgaagaagaccctgaatcctcactacaaccatacatttgtctacaatggtgtgaggctggaagatctacagcatatgtgcctggaactgactgtgtgggaccgggagcccctggccagcaatgacttcctgggaggggtcaggctgggtgttggcactgggatcagtaatggggaagtggtggactggatggactcgactggggaagaagtgagcctgtggcagaagatgcgacagtacccagggtcttgggcagaagggactctgcagctccgttcctcaatggccaagcagaagctgggtttatgagtccctgtcctcttctgcaggtccagccctggcgagggcaggtcagaggaagtgaagaaatcaagagcaaagatttataatttaatgtgtatgtgtgtatgtgtgtatgtgtgtgtgtgtgtgtgtgtgtgtatgtgtacaaacatgtattttctgcaaatctcattatgctggctagagtgatgcagacttgttcttctttttaaagcagtctcaagaataagcatttctttaaaatgtttctgtgtataatctagtttattttcagagtccattttttcttatgtctttataaggttcacttaacttaaaaacagcttttaaaacaactttttatcttctgtcttgctatcattgttcctacttccctaggaagccctggctacctttcgcattaggaccagtctgggttttaaggctctgggaagcagggttggttagtaaagacaggaatgttggggagaggtgagtagttccttcctctttctcctctccaatttatgcttttaacttattttctacctggataaacttctggaacttggcttttaaatttaacttttctagtttttaagcagtttccaccttgctttggtctaatgcttttctttgaaatgctaacagaattcccaagctttttccagttctagatatctttactagacctttgggggactcttataatggagctgcttttgaaaagcactttaattagataatgtattttgactaaatcacgaggatgcccagtgagagcttctagctgatctcagaggaccagagtgactgagggtaaagtgtctcacagcccatgctgaattttctgcattttaaactgatactgcagtcattggagagagagctcctcatttctcgaatgaaagatgagatatattcatcctcatgtaccacatctgtcttagtgtttgcgtctggggtgtgttatcaaacagagcatggtctacatcccactgtgtcaaccagaagagccaagtgttatctcaattggcccagtgtttctccaggctggggactgttaagggctctaagggaatgtagacagagtctccctgttattctgacttcctgcttgatgagctttcagttcctgtttttgctattgtttcctaaatttgacctacatattacatgggtgtagtgtgttgaggcttttcaaagaagggtctagtgagctaagtttcatcttctggtactcattgatcaaactgacctttctattctcataagcgtttctacccaaagttgtgtgtggaaggagtgtatagcagagaggaaatccctttcaacagagtcagctgctaactgatttcctataagcacactggattaagggcagccacagtggtttctactgtatgtatgaaccgaatggaggaatgttttcaaagattgatttggtgtggattgcaattgtaatggaaggcataacttgggatcccgggctgtaacttgctcttttgtttcccacccccctgacatgtatgtgtgctttaataaagctttctcacttgtc

SEQ ID NO: 188260 - DNA, 4847 bp, Homo sapiens
  Payload ID: 17044
  Gene Symbol: SYTL4
  Gene Name: synaptotagmin-like 4
  Uniprot ID: Q96C24
  ENST ID: ENST00000372981
  CDS Start-End: 188-1237
agggtgagaagggccggctgccggagctgggttgcgatcttcccggagccggagaccctcccttgaaaccggcactgggacttctcgatctctggaggcacctgttgcaagtgacaggcaactctggtagctctccttgtctggttgttttgaagaaagaagagtagaagaaaaagttgagtaaatcatgtcggagttactggacctttcttttctgtctgaggaggaaaaggatttgattctcagtgttctacagcgagatgaagaggtccggaaagcagatgagaaaaggattaggcgactaaagaatgagttactggagataaaaaggaaaggggccaagaggggcagccaacactacagtgatcggacctgtgcccggtgccaggagagcctgggccgtttgagtcccaaaaccaatacttgtcggggttgtaatcacctggtgtgtcgggactgccgcatacaggaaagcaatggtacctggaggtgcaaggtgtgcgccaaggaaatagagttgaagaaagcaactggggactggttttatgaccagaaagtgaatcgctttgcttaccgcacaggtagtgagataatcaggatgtccctgcgccacaaacctgcagtgagtaaaagagagacagtgggacagtccctccttcatcagacacagatgggtgacatctggccaggaagaaagatcattcaggagcggcagaaggagcccagtgtgctatttgaagtgccaaagctgaaaagtggaaagagtgcattggaagctgagagtgagagtctggatagcttcacagctgactcggatagcacctccaggagagactctctggataaatctggcctctttccagaatggaagaagatgtctgctcccaaatctcaagtagaaaaggaaactcagcctggaggtcaaaatgtggtatttgtggatgagggtgagatgatatttaagaagaacaccagaaaaatcctcaggccttcagagtacactaaatctgtgatagatcttcgcccagaagatgtggtacatgaaagtggctccttgggagacagaagcaaatccgtcccaggcctcaatgtggatatggaagaggaagaagaagaagaagacattgaccacctagtgaagttacatcgccagaagctagccagaagcagcatgcaaagtggctcctccatggtaagttctattagatctgtggttacaggcatgttggggtactaggaagaaaagaagcacctccctagagcagattcgggacctggggaaaccatcctagtcactcttttcaggtaagtaagatcatttgtttgttcctatcctcaatttagactataggtgcttagtgtacatctaggtgacttcctgagcccccacctggagattattacattacagcttgggacatttttcatcacagctttgtgaacaataaccttaacttatcctctaaaggggtacccaggctatgaagtgagcaagatcagatttcttcatcatagcccattccaaattctcaacattaaaagaaagtgagtgtcatgagaggggctctggcagggttgatcgacatcagggtatggttaacaagcaataataccagtcaggataatgaatttaaagggaacatttaagaatcagggcctggttctgtcataagcatgaagattgatatttagggaaacaggaacaagggtgaacagaatttgttcacactcacacacaggaagagaatgtcagctcgcatgaccgattactaccagaaaggaaggtgccttttcacttctggtggggtttcctccctcccactcactcccagttctggccaaatctcttttctctgtaggccctgataagacataaggtggataagagaaacccacagataattaaggcaccttgttttagttagtaactaacccccttctagctggtgttttagtgtatataacacattccccagatggacttaactgcaccttgcctctgctccctgcccacctcctggggcaggtgaaaatgaacactaaaatttgtaaaaagagttgaggaagagaagctaagaggctaggtgagccatgagctgattcattcacctgaacaattttgagtgctggtagttctctcttaccctctgggtcaaggaatgtcagcagcactggcttattgcaggggcttctgaaacttctgttcagtgactgtggttttatcatgagggaagatgtgagcaatgcgggcgggggagtgtgccttccccagatgttcgtgggtgctttatcttcagagtacgatcggcagcatgatgagcatctacagtgaagctggtgatttcgggaacatctttgtgactggcaggattgccttttccctgaagtatgagcagcaaacccagagtctggttgtccatgtgaaggagtgccatcagctggcctatgctgatgaagccaagaagcgctctaacccgtgagtgcttctggaacctgactgatgctctgagaccagagaccagaccccggcatctgtccgggcactcttgaacagagcttatctgtttctgggggagcagggaggtgtaatgtaggaaaagaaccaggattgggaaaaagcaagaatggcatgtctaagagggcttgaggtgacatttttgacatcacatgtcaccatggcatatctatatggagaggaggaaagtgaaaagcaggcttgagaaaggccagcaaattactcagtgctgtctttggtttctagatatgtgaagacttaccttctgcctgacaagtcccgccaaggaaaaagaaaaaccagcatcaagcgggacactattaatccactatatgatgagacgctgagggtaagtatctagacctcaagggtaggagaacttgttctgtcttgtgccctaagctgtagctattcctctgcaacatgaccaggtgacacgggcttcagtgggccatgtctgtgtctgaggatacattgggtatctgttcacatcctgatctcccagtgaagagaacaaaggtgatctgcctttcctggattgatgtgaagtttgagattcacatggccacaaatctcatgtaaaaaagacatttgagataaggagtctccttggcagttctttttggacaatccagtgttatctcatccacttaagaaaaaatgaattttccaggtcctcctatggaatatggtaggtttttataaaatgagttaagttgaggctttgagtgaggaaactcaaagtgctcagggaacataaagtaatttggtattcaggactagtgacttcaggaatggttgctcaggttttggaataatcttgtctgaagaattacccttaactaatcatcttgggcttttactttcccttcacagtatgagatcccagaatctctcctggcccagaggaccctgcagttctcagtttggcatcatggtcgttttggcagaaacactttccttggagaggcagagatccagatggattcctggaagcttgataagaaactggatcattgcctccctttacatggaaaggtagtctgctttaacaactcctgcagtttggatctgaggtagaattgtctgcagtagcctctgctggtctatgttggtagcgtctttgaatgtagtcttctctggagttctagtgccccctgctggtgtttctgagtttgacagcaatttcagaggcatttgtctatcaagtgtgagttctgtgtaaaccaggcaaagtgtgaagccatggttttgctttgaaaaaattttcatatgtgtaccaaactttgtctcctaaccttccagaatctgggtgtatcctaacatcctaactcgcacctcttctccgagctaaccttctgtgtatatcctaatctgtacccttttgccaagccactgctttacttccaagtgggaagtaaagcaattcatggagctccaattgctatgctcttggttacagaggccagggaaatattactttggagatggcacctcgggccacagtgtagcagtatggcataatcatgcctgggatctgagtgcagacctgtgttggaatcctggttctgtcacttgccaactagatgagtcacttaactacaaaataatgtagggaaatcatctggctaagaagaaatagctaaaacagaggacttattcagcaacttcttgattatcagaactacacaatgacatgacaaagttcatcttatttttttttacactagcgttttaaatgtgggatggttttacatggtccatagactttgggaagttagatgagaaactagtcatggtggctgcctctaggaatggagactgaggtagaaggaatatttagttttctctatatcccctttttaagcatttgaactttttaccatattaagaaaattaagcaaaaatggacttatgtacacatgattcaaaattaaaacaacataaagtatattaaaaggaaagtaggttccattccttagaaataaccagtgttaacactacttgtgtatccttctagaaattttttatggctaggtatggtggctcacgcctgtaatcccagcacattgggaggcggaggcaggcagatcacctgaggtcaggagttcgagaccaccctgaccaacatggtgaaaccccgtctctactaaatacaaaaaaattagctgggcatggtggcgcaagcctgtaatcccagctacttgggaggctgaggcaggagaatcgcttgaacccatgaggcggaggttgcagtgagccgagattgcgcctttgcactccagcctgggcaaaagagtgaaactctgtctcaaaaaaaaaaaaaaaaaaa

SEQ ID NO: 188261 - DNA, 3885 bp, Homo sapiens
  Payload ID: 17044
  Gene Symbol: SYTL4
  Gene Name: synaptotagmin-like 4
  Uniprot ID: Q96C24
  ENST ID: ENST00000372989
  CDS Start-End: 333-2348
cacagcgctcggccgtcgagcggggtcgctaacccgcactctcttcggacctacgacatcgcggcttctctggcgttggccagtcagccacagggaactagtaaaaaaagaaaaagaaaaaataaagtgaaagaggcgtgttgtctagtttcaaaggagaggagagaagagactgagtcgccctgtgttgcccaggctggtcttgaactcctaggctcaagagatcctcctgcctcagcctcccaaagtgctgggattacaggcaactctggtagctctccttgtctggttgttttgaagaaagaagagtagaagaaaaagttgagtaaatcatgtcggagttactggacctttcttttctgtctgaggaggaaaaggatttgattctcagtgttctacagcgagatgaagaggtccggaaagcagatgagaaaaggattaggcgactaaagaatgagttactggagataaaaaggaaaggggccaagaggggcagccaacactacagtgatcggacctgtgcccggtgccaggagagcctgggccgtttgagtcccaaaaccaatacttgtcggggttgtaatcacctggtgtgtcgggactgccgcatacaggaaagcaatggtacctggaggtgcaaggtgtgcgccaaggaaatagagttgaagaaagcaactggggactggttttatgaccagaaagtgaatcgctttgcttaccgcacaggtagtgagataatcaggatgtccctgcgccacaaacctgcagtgagtaaaagagagacagtgggacagtccctccttcatcagacacagatgggtgacatctggccaggaagaaagatcattcaggagcggcagaaggagcccagtgtgctatttgaagtgccaaagctgaaaagtggaaagagtgcattggaagctgagagtgagagtctggatagcttcacagctgactcggatagcacctccaggagagactctctggataaatctggcctctttccagaatggaagaagatgtctgctcccaaatctcaagtagaaaaggaaactcagcctggaggtcaaaatgtggtatttgtggatgagggtgagatgatatttaagaagaacaccagaaaaatcctcaggccttcagagtacactaaatctgtgatagatcttcgcccagaagatgtggtacatgaaagtggctccttgggagacagaagcaaatccgtcccaggcctcaatgtggatatggaagaggaagaagaagaagaagacattgaccacctagtgaagttacatcgccagaagctagccagaagcagcatgcaaagtggctcctccatgagtacgatcggcagcatgatgagcatctacagtgaagctggtgatttcgggaacatctttgtgactggcaggattgccttttccctgaagtatgagcagcaaacccagagtctggttgtccatgtgaaggagtgccatcagctggcctatgctgatgaagccaagaagcgctctaacccatatgtgaagacttaccttctgcctgacaagtcccgccaaggaaaaagaaaaaccagcatcaagcgggacactattaatccactatatgatgagacgctgaggtatgagatcccagaatctctcctggcccagaggaccctgcagttctcagtttggcatcatggtcgttttggcagaaacactttccttggagaggcagagatccagatggattcctggaagcttgataagaaactggatcattgcctccctttacatggaaagatcagtgctgagtccccgactggcttgccatcacacaaaggcgagttggtggtttcattgaaatacatcccagcctccaaaacccctgttggaggtgaccggaaaaagagtaaaggtggggaagggggagagctccaggtgtggatcaaagaagccaagaacttgacggctgccaaagcaggagggacttcagacagctttgtcaagggatacctccttcccatgaggaacaaggccagtaaacgtaaaactcctgtgatgaagaagaccctgaatcctcactacaaccatacatttgtctacaatggtgtgaggctggaagatctacagcatatgtgcctggaactgactgtgtgggaccgggagcccctggccagcaatgacttcctgggaggggtcaggctgggtgttggcactgggatcagtaatggggaagtggtggactggatggactcgactggggaagaagtgagcctgtggcagaagatgcgacagtacccagggtcttgggcagaagggactctgcagctccgttcctcaatggccaagcagaagctgggtttatgagtccctgtcctcttctgcaggtccagccctggcgagggcaggtcagaggaagtgaagaaatcaagagcaaagatttataatttaatgtgtatgtgtgtatgtgtgtatgtgtgtgtgtgtgtgtgtgtgtgtatgtgtacaaacatgtattttctgcaaatctcattatgctggctagagtgatgcagacttgttcttctttttaaagcagtctcaagaataagcatttctttaaaatgtttctgtgtataatctagtttattttcagagtccattttttcttatgtctttataaggttcacttaacttaaaaacagcttttaaaacaactttttatcttctgtcttgctatcattgttcctacttccctaggaagccctggctacctttcgcattaggaccagtctgggttttaaggctctgggaagcagggttggttagtaaagacaggaatgttggggagaggtgagtagttccttcctctttctcctctccaatttatgcttttaacttattttctacctggataaacttctggaacttggcttttaaatttaacttttctagtttttaagcagtttccaccttgctttggtctaatgcttttctttgaaatgctaacagaattcccaagctttttccagttctagatatctttactagacctttgggggactcttataatggagctgcttttgaaaagcactttaattagataatgtattttgactaaatcacgaggatgcccagtgagagcttctagctgatctcagaggaccagagtgactgagggtaaagtgtctcacagcccatgctgaattttctgcattttaaactgatactgcagtcattggagagagagctcctcatttctcgaatgaaagatgagatatattcatcctcatgtaccacatctgtcttagtgtttgcgtctggggtgtgttatcaaacagagcatggtctacatcccactgtgtcaaccagaagagccaagtgttatctcaattggcccagtgtttctccaggctggggactgttaagggctctaagggaatgtagacagagtctccctgttattctgacttcctgcttgatgagctttcagttcctgtttttgctattgtttcctaaatttgacctacatattacatgggtgtagtgtgttgaggcttttcaaagaagggtctagtgagctaagtttcatcttctggtactcattgatcaaactgacctttctattctcataagcgtttctacccaaagttgtgtgtggaaggagtgtatagcagagaggaaatccctttcaacagagtcagctgctaactgatttcctataagcacactggattaagggcagccacagtggtttctactgtatgtatgaaccgaatggaggaatgttttcaaagattgatttggtgtggattgcaattgtaatggaaggcataacttgggatcccgggctgtaacttgctcttttgtttcccacccccctgacatgtatgtgtgctttaataaagctttctcacttgtcaaa

SEQ ID NO: 188262 - DNA, 4722 bp, Homo sapiens
  Payload ID: 17045
  Gene Symbol: SYTL5
  Gene Name: synaptotagmin-like 5
  Uniprot ID: Q8TDW5
  ENST ID: ENST00000297875
  CDS Start-End: 444-2636
cacaagggtcaagtagtccagcattctacagtttgtgtgtttgagagaaaaataagcccataaaaacattctaaccttcagattaagtgttttctgcattctctcccagcggatctgattcctgttctgaagaattgaagttgagcatcgttagttaaattcagctgctgcctgactgtataccacagcaaaggctttggaaacatttttcagttaaaacaataatgactttcttggagtgtaatcccagtggaggctgttctacgtatagcctgaaagaatacttaactaccatacgcaattctgcagagaccttgtaaaaatcacactttacaccaaacaactgagtgattctgaattggttgggggaatcttagttgtagatatcaattcaccttcttgaagattcaaccactgctactcagagctgctgctgaaataccatgtctaagaactcagagttcatcaatctgtcatttttattagatcatgagaaggaaatgatcctgggcgtcctaaagagagatgaatatttgaaaaaagtggaggacaagagaataaggaagctgaaaaatgaactcttagaagcaaaacgtagaagtgggaaaactcaacaagaggccagcagagtttgtgttcactgtcacagaaacctgggcctaatctttgaccggggagacccttgtcaggcttgctcactgagggtatgcagggagtgtcgagttgcaggccccaatggcagctggaagtgcactgtctgtgacaaaatcgcgcagctaaggattataactggtgagtggttttttgaagaaaaggcaaaacgtttcaagcaagtcaatgttctcggcactgatgttgtccgacagtccattttaagaagaagtccaggagctgaagaagtacagagccaagagcaaacccgccaggatgcagaaaagtcagacacttcacctgttgctgggaagaaggccagccatgatgggcccaagagaaagggatttcttcttagcaagttcagatcggcaaccagaggagaaatcataactcccaaaactgacactgggcggagctatagcttggacttagacggtcaacattttcggagtttaaaatcacctcctggttcagacaggggaagcactggctcatcagatctcaatgaccaggaacctggtcctaggaccccgaagagcagtcggagcaatggtgtgaccccaggcactcagagttcaccagccccaagcacacgaactgtgacctcagtcatcagtagagagtatggttttgaaaattccatggatttggctgctattgaaggtacctctcaggagctcacaaagagtcaccgcagaaacacttctggcacaccttccatagcagtgtctggaacctctctctcctcagatcagagtcgatctgagttagatttgagtgagtcatttacagaagactcagaggatactgtaagcataagaagcaagtctgtccctggggctttagacaaggactccttggaagagactgaagaaagcattgatgccttagtgtcctcgcagttatctacaaacactcaccgtctggcaagtggcctatcaactaccagccttaacagcatgatgagcgtttacagtgaaacgggagactatggcaacgtgaaagtcagtggtgaaatccttctccatatcagctactgctacaaaactggtgggctgtacatttttgtcaagaattgcagaaatctggccataggagatgaaaagaaacagaggacagatgcttatgtcaagtcatatcttcttcctgacaagtcccggaacaacaagcgtaagaccaaaatcagaacaggcaccaatccagaattcaatgaaacactaaagtacactatcagccatacccagctggaaacaagaactctgcagctctcagtctggcactatgatcgatttggacgtaatagcttcctcggggaagtagagattccttttgactcatggaactttgaaaatccaactgatgagtggtttgtgcttcaacccaaggtggagtttgctcctgatattggccttcaatacaaaggagagctgacagttgttttacgttacattcccccagaagagaacctgatgcttccaccagaacaactccaaggaaataagacttttaaaaagggaaagaagaaggagtcacctgtaatctctggaggaatactagaagtgttcatcaaagaggcaaagaatttgacagcagtgaagtcaggaggcacttctgatagctttgtgaagggctacctgctccctgatgatagcaaagccaccaagcacaaaactctggtaataaaaaagagtgttaaccctcagtggaatcatacattcatgttcagtggcatccatccccaggatataaagaatgtttgcctagaacttactatctgggacaaggaggccttttccagcaacatctttctgggaggagttcgtttgaattctggaagtggtgtgagccatgggaagaacgtggattggatggactctcagggggaagagcagcgcctttggcagaagatggccaacaaccctggaactccctttgagggtgtactcatgcttcgttccagcatgggaaaatgtaggctctaaagggaccagttctccaagaatgaggccaccaggacctatctggctgtcttttcctaccattagcaaactgagacctgggattctgcttccctgccatttctcacctgacagtgttgggacatgaggggagagatgtcagtagtatgaacatttagggtcttgctgagtgcctaaaaaacatatatttccatccaatcaaggccttcttgattggatgatagaaagtgtactacttgtcctgtcaacaagcaaattgtgcaaaggcttatagggtttatgccataaaagaaatggcacaagcctccatttgctaattataagttactttagatttcctcaaatcctttgaagagaaagaggaccactgagaaggtagatcacttgaaaagtcagaagaaaggatactggccaacttttactcaccctaggaatccacatgatctcaagaaggcatggtggagatggttgcttgagcaaggggattgtcctgttattgcagcaaacttgtggattaaccaagtagtatttcaagatggattgacagggctttctatgattactatagaatttatcatctaaatcagtttactttttagaacaaagagagctaaataactacatcagaacgattgatgttgattagaattgacctgggaaaattgggatgtagggtcaccctactgatgacctaagagagctctgttttaaacatttattttataaaatgttctaagccattaactaaaaggaaatgagatataatggtcaattgatataccttttcacattgtgttcactgacgagactagtttaatgaaaaaggaggtactctacctgctattttacttctgttcctcttctgccctgttatgggagagaatcaaagactccatctgctctcttcccccttgttttctccttcactgagtttttcttatctccttttgcagtggttaactattgtcacaataatgctgaatgaaaaaacacaccaaatgtcagtggcttaaaatgaccatcctttttctcacagttatgaagattggctatggcacctctgcttcctgctataggcctgaggttctagggcttcttatgcctcatcctctttaagccaaagggatagccagagcatcttgatggcagaagtgcaataagatgagccccactgctcgggtacattttcagcccctggttgtgtcatgtctactgatatctcattggtcaaaggaagtcagagggccaagatgaagaggcagggaaatatgcactgcccacagtgaagccatgacaagagtgaggatgcaggaaggcatgaagaattggggccaacagttcaatctaccataccttctctcacctggaattccagatgcttgagctacgaaacttagatgcaaagaaagttaaagctagaaggaacctcaggcccagttgctcattttgcagattccaaatgtgaatttcagagagctgagataacttgcccaaggccatatagaggctgtgactaaatctggacttaaatccagactatcaatcttaggccagtgttcttttttcaatatagtccttggcataatgctatgcttattaggtagataaaagggcttatgtcaagaaatttggagcagagtctgattacttgagcatgaacatacccgaccaaggtatgttctggagtcatattctagcctctgagctcattttttcatgcgagttcatataaaatcctcgaaagtttagaaactaggttttagtagtaacggagctagaatcatcttcgggcttattcctgctagttgttccatatttctagatttcatcttgaattttgaaaactgatttaagaatatatttagtattattattagtaagggaatacgcaatccagtttcaattttattcagaagtaggtcacctaattctagaaaatggttattagtctagtgtcgcttagcaaggtacttaaaagaaaatctgcacatatccttgtgctgcccttcttaaaaacagaaaacaaaaagtgtaagatcatcattgcttcccacataggaaaaataaaatgtcttcagacttgatgtga

SEQ ID NO: 188263 - DNA, 4704 bp, Homo sapiens
  Payload ID: 17045
  Gene Symbol: SYTL5
  Gene Name: synaptotagmin-like 5
  Uniprot ID: Q8TDW5
  ENST ID: ENST00000456733
  CDS Start-End: 357-2615
tgttttctgcattctctcccagcggatctgattcctgttctgaagaattgaagttgagcatcgttagttaaattcagctgctgcctgactgtataccacagcaaaggctttggaaacatttttcagttaaaacaataatgactttcttggagtgtaatcccagtggaggctgttctacgtatagcctgaaagaatacttaactaccatacgcaattctgcagagaccttgtaaaaatcacactttacaccaaacaactgagtgattctgaattggttgggggaatcttagttgtagatatcaattcaccttcttgaagattcaaccactgctactcagagctgctgctgaaataccatgtctaagaactcagagttcatcaatctgtcatttttattagatcatgagaaggaaatgatcctgggcgtcctaaagagagatgaatatttgaaaaaagtggaggacaagagaataaggaagctgaaaaatgaactcttagaagcaaaacgtagaagtgggaaaactcaacaagaggccagcagagtttgtgttcactgtcacagaaacctgggcctaatctttgaccggggagacccttgtcaggcttgctcactgagggtatgcagggagtgtcgagttgcaggccccaatggcagctggaagtgcactgtctgtgacaaaatcgcgcagctaaggattataactggtgagtggttttttgaagaaaaggcaaaacgtttcaagcaagtcaatgttctcggcactgatgttgtccgacagtccattttaagaagaagtccaggagctgaagaagtacagagccaagagcaaacccgccaggatgcagaaaagtcagacacttcacctgttgctgggaagaaggccagccatgatgggcccaagagaaagggatttcttcttagcaagttcagatcggcaaccagaggagaaatcataactcccaaaactgacactgggcggagctatagcttggacttagacggtcaacattttcggagtttaaaatcacctcctggttcagacaggggaagcactggctcatcagatctcaatgaccaggaacctggtcctaggaccccgaagagcagtcggagcaatggtgtgaccccaggcactcagagttcaccagccccaagcacacgaactgtgacctcagtcatcagtagagagtatggttttgaaaattccatggatttggctgctattgaaggtacctctcaggagctcacaaagagtcaccgcagaaacacttctggcacaccttccatagcagtgtctggaacctctctctcctcagatcagagtcgatctgagttagatttgagtgagtcatttacagaagactcagaggatactgtaagcataagaagcaagtctgtccctggggctttagacaaggactccttggaagagactgaagaaagcattgatgccttagtgtcctcgcagttatctacaaacactcaccgtctggcaagtggcctatcaactagttctcaagcaggttctgacaggaagtggacctacctaaatgtgcctgatgctgactcagacactaccagccttaacagcatgatgagcgtttacagtgaaacgggagactatggcaacgtgaaagtcagtggtgaaatccttctccatatcagctactgctacaaaactggtgggctgtacatttttgtcaagaattgcagaaatctggccataggagatgaaaagaaacagaggacagatgcttatgtcaagtcatatcttcttcctgacaagtcccggaacaacaagcgtaagaccaaaatcagaacaggcaccaatccagaattcaatgaaacactaaagtacactatcagccatacccagctggaaacaagaactctgcagctctcagtctggcactatgatcgatttggacgtaatagcttcctcggggaagtagagattccttttgactcatggaactttgaaaatccaactgatgagtggtttgtgcttcaacccaaggtggagtttgctcctgatattggccttcaatacaaaggagagctgacagttgttttacgttacattcccccagaagagaacctgatgcttccaccagaacaactccaaggaaataagacttttaaaaagggaaagaagaaggagtcacctgtaatctctggaggaatactagaagtgttcatcaaagaggcaaagaatttgacagcagtgaagtcaggaggcacttctgatagctttgtgaagggctacctgctccctgatgatagcaaagccaccaagcacaaaactctggtaataaaaaagagtgttaaccctcagtggaatcatacattcatgttcagtggcatccatccccaggatataaagaatgtttgcctagaacttactatctgggacaaggaggccttttccagcaacatctttctgggaggagttcgtttgaattctggaagtggtgtgagccatgggaagaacgtggattggatggactctcagggggaagagcagcgcctttggcagaagatggccaacaaccctggaactccctttgagggtgtactcatgcttcgttccagcatgggaaaatgtaggctctaaagggaccagttctccaagaatgaggccaccaggacctatctggctgtcttttcctaccattagcaaactgagacctgggattctgcttccctgccatttctcacctgacagtgttgggacatgaggggagagatgtcagtagtatgaacatttagggtcttgctgagtgcctaaaaaacatatatttccatccaatcaaggccttcttgattggatgatagaaagtgtactacttgtcctgtcaacaagcaaattgtgcaaaggcttatagggtttatgccataaaagaaatggcacaagcctccatttgctaattataagttactttagatttcctcaaatcctttgaagagaaagaggaccactgagaaggtagatcacttgaaaagtcagaagaaaggatactggccaacttttactcaccctaggaatccacatgatctcaagaaggcatggtggagatggttgcttgagcaaggggattgtcctgttattgcagcaaacttgtggattaaccaagtagtatttcaagatggattgacagggctttctatgattactatagaatttatcatctaaatcagtttactttttagaacaaagagagctaaataactacatcagaacgattgatgttgattagaattgacctgggaaaattgggatgtagggtcaccctactgatgacctaagagagctctgttttaaacatttattttataaaatgttctaagccattaactaaaaggaaatgagatataatggtcaattgatataccttttcacattgtgttcactgacgagactagtttaatgaaaaaggaggtactctacctgctattttacttctgttcctcttctgccctgttatgggagagaatcaaagactccatctgctctcttcccccttgttttctccttcactgagtttttcttatctccttttgcagtggttaactattgtcacaataatgctgaatgaaaaaacacaccaaatgtcagtggcttaaaatgaccatcctttttctcacagttatgaagattggctatggcacctctgcttcctgctataggcctgaggttctagggcttcttatgcctcatcctctttaagccaaagggatagccagagcatcttgatggcagaagtgcaataagatgagccccactgctcgggtacattttcagcccctggttgtgtcatgtctactgatatctcattggtcaaaggaagtcagagggccaagatgaagaggcagggaaatatgcactgcccacagtgaagccatgacaagagtgaggatgcaggaaggcatgaagaattggggccaacagttcaatctaccataccttctctcacctggaattccagatgcttgagctacgaaacttagatgcaaagaaagttaaagctagaaggaacctcaggcccagttgctcattttgcagattccaaatgtgaatttcagagagctgagataacttgcccaaggccatatagaggctgtgactaaatctggacttaaatccagactatcaatcttaggccagtgttcttttttcaatatagtccttggcataatgctatgcttattaggtagataaaagggcttatgtcaagaaatttggagcagagtctgattacttgagcatgaacatacccgaccaaggtatgttctggagtcatattctagcctctgagctcattttttcatgcgagttcatataaaatcctcgaaagtttagaaactaggttttagtagtaacggagctagaatcatcttcgggcttattcctgctagttgttccatatttctagatttcatcttgaattttgaaaactgatttaagaatatatttagtattattattagtaagggaatacgcaatccagtttcaattttattcagaagtaggtcacctaattctagaaaatggttattagtctagtgtcgcttagcaaggtacttaaaagaaaatctgcacatatccttgtgctgcccttcttaaaaacagaaaacaaaaagtgtaagatcatcattgcttcccacataggaaaaataaaatgtcttcagacttgatgtgactc

SEQ ID NO: 188264 - DNA, 1824 bp, Homo sapiens
  Payload ID: 17046
  Gene Symbol: SYNC
  Gene Name: syncoilin, intermediate filament protein
  Uniprot ID: Q9H7C4
  ENST ID: ENST00000373484
  CDS Start-End: 97-1527
gttgcagctggcagtgcggcgggcgcgggcgccggagcgaggggcccgcgggcccggctattaataacgcggccgccagcccggggtcgcgcagccatggccagcccggagccccggcgcggcggggacggcgccgcccaggccgcgaggaaaacaagagtagaggccaattctcctcttccaaagaactctggatccctaaatgaggcagaagccttgaacccagaagttactctatcttcagaggggtccttaaacctcgaagacattctctacctggaggacacaggtgaccttgatgagacactctatgtgcaagagactgagaaggcagaggaggccctgtatattgaggaggccatgcagccagatgaggctctgcatgtggaggagcctgggaatccagaggagacagtgtgtgtggaggaaaccacggagccagatcggatacagtttgtggaggggcccgtggagccaggaaagcccacaagcccagagcacgttgtttatgagggagagacagtcacaagggcggagaaatctaaccctgaggagagcctcagagccgagcagagccccagcatggaggagaacctgagcatagaggacctggaattgctagaggggcgtttccagcagtgtgtccaagctgtggcccagctggaagaggagagggatcagctcatccatgagcttgtattgctccgggaaccagccctgcaggaggtacagcaagtccatcaagacatcctggctgcctacaagctccatgcccaagcagagctggagagagatggcctaagggaggagatccggctggtcaagcagaagcttttcaaagtgacaaaggaatgtgtggcctaccaataccagctggagtgccgccagcaggacgtggctcagtttgccgatttccgggaagtgctgactacaagggcaacccagctctcagaggaactggcccagctccgggatgcctatcagaagcagaaggagcagctgcggcaacaactagaagcccctccaagccagagggatgggcactttctccaggaaagccggcgactctctgcccagtttgaaaatctcatggcagagagccgccaggacctggaggaggagtatgagcctcagttcctgcggctcctagagaggaaagaagctgggaccaaagctctgcagagaacccaggctgagatccaggaaatgaaggaggctctgagacccctgcaagcagaggcccggcagctccgcctgcaaaacaggaacctggaggaccagatcgcacttgtgaggcaaaaacgagatgaagaggtgcagcagtacagggaacagctggaggaaatggaagaacgccagaggcagttaagaaatggggtgcaactccagcaacagaagaacaaagagatggaacagctaaggctcagtcttgctgaagagctctctacttataagggctgtttagaaatatatggccaaatctgtaacccggaaacagcaaaaaacttcttagcaaaggatcactaagtaccctttggatgtactcttccaaccagacaagagtgccagaaacttggcaagcaattcatcctgtggaagttgcaaatactggctgacctgcttaaaaagattctagagttggccggaggcagaacatgtcaactctttgctggattctatttcatctgctgttgatactgatctcaatgcaccaaggaaaggaaagatgagcctcctgtcttccagcaacaaccctcacatatgcactgagtgaaggatgaatgtatggacacatctgggagtattttaaagaatgtatcttgc

SEQ ID NO: 188265 - DNA, 3398 bp, Homo sapiens
  Payload ID: 17046
  Gene Symbol: SYNC
  Gene Name: syncoilin, intermediate filament protein
  Uniprot ID: Q9H7C4
  ENST ID: ENST00000409190
  CDS Start-End: 460-1908
cggacacccccaaacactcgcgggagaggggtgctggctccctttgagcagcccgcccaaccctgcctccaccctcccaggctggacagggaaggtgctccctggggcttcagaccccccttctgactccccctgcaacgggacctcacgaaaggaagggtggagagaaggttcgggaagacgagggggctgggaggtttggaaagacagctccaggcccccgttcccacccccgccccaggctggtccgggaggggcagcctctccccgcccccaggtccgcgcggccgctccctcctcccccggcaggagccccggccaagtgggcgcgcccggcccggggccggccgggatccggtgtcggttgcagctggcagtgcggcgggcgcgggcgccggagcgaggggcccgcgggcccggctattaataacgcggccgccagcccggggtcgcgcagccatggccagcccggagccccggcgcggcggggacggcgccgcccaggccgcgaggaaaacaagagtagaggccaattctcctcttccaaagaactctggatccctaaatgaggcagaagccttgaacccagaagttactctatcttcagaggggtccttaaacctcgaagacattctctacctggaggacacaggtgaccttgatgagacactctatgtgcaagagactgagaaggcagaggaggccctgtatattgaggaggccatgcagccagatgaggctctgcatgtggaggagcctgggaatccagaggagacagtgtgtgtggaggaaaccacggagccagatcggatacagtttgtggaggggcccgtggagccaggaaagcccacaagcccagagcacgttgtttatgagggagagacagtcacaagggcggagaaatctaaccctgaggagagcctcagagccgagcagagccccagcatggaggagaacctgagcatagaggacctggaattgctagaggggcgtttccagcagtgtgtccaagctgtggcccagctggaagaggagagggatcagctcatccatgagcttgtattgctccgggaaccagccctgcaggaggtacagcaagtccatcaagacatcctggctgcctacaagctccatgcccaagcagagctggagagagatggcctaagggaggagatccggctggtcaagcagaagcttttcaaagtgacaaaggaatgtgtggcctaccaataccagctggagtgccgccagcaggacgtggctcagtttgccgatttccgggaagtgctgactacaagggcaacccagctctcagaggaactggcccagctccgggatgcctatcagaagcagaaggagcagctgcggcaacaactagaagcccctccaagccagagggatgggcactttctccaggaaagccggcgactctctgcccagtttgaaaatctcatggcagagagccgccaggacctggaggaggagtatgagcctcagttcctgcggctcctagagaggaaagaagctgggaccaaagctctgcagagaacccaggctgagatccaggaaatgaaggaggctctgagacccctgcaagcagaggcccggcagctccgcctgcaaaacaggaacctggaggaccagatcgcacttgtgaggcaaaaacgagatgaagaggtgcagcagtacagggaacagctggaggaaatggaagaacgccagaggcagttaagaaatggggtgcaactccagcaacagaagaacaaagagatggaacagctaaggctcagtcttgctgaagagctctctacttataaggctatgctactacccaagagcctggaacaggctgatgctcccacttctcaggcaggtggaatggagacacagtctcaaggggctgtttagaaatatatggccaaatctgtaacccggaaacagcaaaaaacttcttagcaaaggatcactaagtaccctttggatgtactcttccaaccagacaagagtgccagaaacttggcaagcaattcatcctgtggaagttgcaaatactggctgacctgcttaaaaagattctagagttggccggaggcagaacatgtcaactctttgctggattctatttcatctgctgttgatactgatctcaatgcaccaaggaaaggaaagatgagcctcctgtcttccagcaacaaccctcacatatgcactgagtgaaggatgaatgtatggacacatctgggagtattttaaagaatgtatcttgccttgtgttgacccaaaccaaaaacatttttgaggggcacatgtggggtcaaaaagatagccaatttccattacatgggtttacaatttccattcttttgtgccacgagtgttagaatttaaatgaatacttttacaaagtctactttttgttcaaggatatgctgacccatatagtttactcttaaaattgtgtcaaggtatttctcactatactctaaaacaactagacttgaaaagaaaccatttgagatttgaatctaatggttaacgctattcagattttcccaaagatcttacctcatgaaagtagttctgggtcagaatgatctactcagttaaaaaacaacaacaacaaaaaactaagcgattgggaaaaaacaggaattttatctggttattgcatctggtgatagaggccttcaaagcctattatttctaacctaagtaaaggccccagtgaaaaacatactggggaaataaaacctctgagaaaaggttcaagcaccttttccaaatttaaatcttgccttaaattctctctaccacactgcctttgacactcttggaagtccatgtagttctctacagatagacttcaaagaaacgttaccttatcaaagactaatctgtgccacctctgattcagtgttttatgtctttcactttccctgggaaggagtaaagttcttttctacagctctgggactattacatttaattctgctcttgatagtcaaagaccatggacaacaactgtcatctgaaggactcttctagaagccagagactggtgtttgatggatgttttatactaaataaaacccatcagcatggggttatgtagaaaagcaatttattccattttaagcacttacacagttagtcatggagagtaacaggcctgctggtgaaacaggtcacccaaaatggagatggcatcaaactagtggtcaaggactaactcctaaaaaaaaaaagcaactcttatcaaggattaatttaatttttaaaacaaatacaagttattgattcactcttctcaacttgacagtctacctgtggtataactgtcaggtaaaaacatacatctttacaacttggtggtcccaagttaaaaaaaaaaaaaaaaa

SEQ ID NO: 188266 - DNA, 552 bp, Homo sapiens
  Payload ID: 17046
  Gene Symbol: SYNC
  Gene Name: syncoilin, intermediate filament protein
  ENST ID: ENST00000426909
  CDS Start-End: 342-552
cctttgagcagcccgcccaaccctgcctccaccctcccaggctggacagggaaggtgctccctggggcttcagaccccccttctgactccccctgcaacgggacctcacgaaaggaagggtggagagaaggaaaacaagagtagaggccaattctcctcttccaaagaactctggatccctaaatgaggcagaagccttgaacccagaagttactctatcttcagaggggtccttaaacctcgaagacattctctacctggaggacacaggtgaccttgatgagacactctatgtgcaagagactgagaaggcagaggaggccctgtatattgaggaggccatgcagccagatgaggctctgcatgtggaggagcctgggaatccagaggagacagtgtgtgtggaggaaaccacggagccagatcggatacagtttgtggaggggcccgtggagccaggaaagcccacaagcccagagcacgttgtttatgagggagagacagtcacaagggcggagaaatctaaccctgaggagagcctcagagccgagc

SEQ ID NO: 188267 - DNA, 569 bp, Homo sapiens
  Payload ID: 17046
  Gene Symbol: SYNC
  Gene Name: syncoilin, intermediate filament protein
  ENST ID: ENST00000417633
  CDS Start-End: 301-569
agctaagtggaaaaaggaatccgaaggaagaacgcctgaagcccaggtctgggaaggggcccagcagcttctctcttggggagaaagacgaaaacaagagtagaggccaattctcctcttccaaagaactctggatccctaaatgaggcagaagccttgaacccagaagttactctatcttcagaggggtccttaaacctcgaagacattctctacctggaggacacaggtgaccttgatgagacactctatgtgcaagagactgagaaggcagaggaggccctgtatattgaggaggccatgcagccagatgaggctctgcatgtggaggagcctgggaatccagaggagacagtgtgtgtggaggaaaccacggagccagatcggatacagtttgtggaggggcccgtggagccaggaaagcccacaagcccagagcacgttgtttatgagggagagacagtcacaagggcggagaaatctaaccctgaggagagcctcagagccgagcagagccccagcatggaggagaacctgagcatagaggacctggaattgctagaggggcg

SEQ ID NO: 188268 - DNA, 573 bp, Homo sapiens
  Payload ID: 17047
  Gene Symbol: SYCN
  Gene Name: syncollin
  Uniprot ID: Q0VAF6
  ENST ID: ENST00000318438
  CDS Start-End: 13-417
ggcactgccaccatgtccccgctgcgcccgctgctgctggccctggcccttgcctccgtgccttgcgcccagggcgcctgccccgcctccgccgacctcaagcactcggacgggacgcgcacttgcgccaagctctatgacaagagcgacccctactatgagaactgctgcgggggcgccgagctgtcgctggagtcgggcgcagacctgccctacctgccctccaactgggccaacaccgcctcctcacttgtggtggccccgcgctgcgagctcaccgtgtggtcccggcaaggcaaggcgggcaagacgcacaagttctctgccggcacctacccgcgcctggaggagtaccgccggggcatcttaggagactggtccaacgctatctccgcgctctactgcaggtgcagctgatgcattgctggtctctcatctgcagcttccacagagtgccaagcccctcactcagcccatccctgggctctgctccggggccccaagacccaggaggaggagcgttctgcctgccccctcccacctcccctgcaatacagcctttgtgcagttgtc

SEQ ID NO: 188269 - DNA, 3147 bp, Homo sapiens
  Payload ID: 17048
  Gene Symbol: SDC1
  Gene Name: syndecan 1
  Uniprot ID: P18827
  ENST ID: ENST00000254351
  CDS Start-End: 246-1178
ggaagggcctgtgggtttattataaggcggagctcggcgggagaggtgcgggccgaatccgagccgagcggagaggaatccggcagtagagagcggactccagccggcggaccctgcagccctcgcctgggacagcggcgcgctgggcaggcgcccaagagagcatcgagcagcggaacccgcgaagccggcccgcagccgcgacccgcgcagcctgccgctctcccgccgccggtccgggcagcatgaggcgcgcggcgctctggctctggctgtgcgcgctggcgctgagcctgcagccggccctgccgcaaattgtggctactaatttgccccctgaagatcaagatggctctggggatgactctgacaacttctccggctcaggtgcaggtgctttgcaagatatcaccttgtcacagcagaccccctccacttggaaggacacgcagctcctgacggctattcccacgtctccagaacccaccggcctggaggctacagctgcctccacctccaccctgccggctggagaggggcccaaggagggagaggctgtagtcctgccagaagtggagcctggcctcaccgcccgggagcaggaggccaccccccgacccagggagaccacacagctcccgaccactcatctggcctcaacgaccacagccaccacggcccaggagcccgccacctcccacccccacagggacatgcagcctggccaccatgagacctcaacccctgcaggacccagccaagctgaccttcacactccccacacagaggatggaggtccttctgccaccgagagggctgctgaggatggagcctccagtcagctcccagcagcagagggctctggggagcaggacttcacctttgaaacctcgggggagaatacggctgtagtggccgtggagcctgaccgccggaaccagtccccagtggatcagggggccacgggggcctcacagggcctcctggacaggaaagaggtgctgggaggggtcattgccggaggcctcgtggggctcatctttgctgtgtgcctggtgggtttcatgctgtaccgcatgaagaagaaggacgaaggcagctactccttggaggagccgaaacaagccaacggcggggcctaccagaagcccaccaaacaggaggaattctatgcctgacgcgggagccatgcgccccctccgccctgccactcactaggcccccacttgcctcttccttgaagaactgcaggccctggcctcccctgccaccaggccacctccccagcattccagcccctctggtcgctcctgcccacggagtcgtggggtgtgctgggagctccactctgcttctctgacttctgcctggagacttagggcaccaggggtttctcgcataggacctttccaccacagccagcacctggcatcgcaccattctgactcggtttctccaaactgaagcagcctctccccaggtccagctctggaggggagggggatccgactgctttggacctaaatggcctcatgtggctggaagatcctgcgggtggggcttggggctcacacacctgtagcacttactggtaggaccaagcatcttgggggggtggccgctgagtggcaggggacaggagtccactttgtttcgtggggaggtctaatctagatatcgacttgtttttgcacatgtttcctctagttctttgttcatagcccagtagaccttgttacttctgaggtaagttaagtaagttgattcggtatccccccatcttgcttccctaatctatggtcgggagacagcatcagggttaagaagactttttttttttttttttaaactaggagaaccaaatctggaagccaaaatgtaggcttagtttgtgtgttgtctcttgagtttgtcgctcatgtgtgcaacagggtatggactatctgtctggtggccccgtttctggtggtctgttggcaggctggccagtccaggctgccgtggggccgccgcctctttcaagcagtcgtgcctgtgtccatgcgctcagggccatgctgaggcctgggccgctgccacgttggagaagcccgtgtgagaagtgaatgctgggactcagccttcagacagagaggactgtagggagggcggcaggggcctggagatcctcctgcagaccacgcccgtcctgcctgtggcgccgtctccaggggctgcttcctcctggaaattgacgaggggtgtcttgggcagagctggctctgagcgcctccatccaaggccaggttctccgttagctcctgtggccccaccctgggccctgggctggaatcaggaatattttccaaagagtgatagtcttttgcttttggcaaaactctacttaatccaatgggtttttccctgtacagtagattttccaaatgtaataaactttaatataaagtagtcctgtgaatgccactgccttcgcttcttgcctctgtgctgtgtgtgacgtgaccggacttttctgcaaacaccaacatgttgggaaacttggctcgaatctctgtgccttcgtctttcccatggggagggattctggttccagggtccctctgtgtatttgcttttttgttttggctgaaattctcctggaggtcggtaggttcagccaaggttttataaggctgatgtcaatttctgtgttgccaagctccaagccccatcttctaaatggcaaaggaaggtggatggccccagcacagcttgacctgaggctgtggtcacagcggaggtgtggagccgaggcctaccccgcagacaccttggacatcctcctcccacccggctgcagaggccagaggcccccagcccagggctcctgcacttacttgcttatttgacaacgtttcagcgactccgttggccactccgagaggtgggccagtctgtggatcagagatgcaccaccaagccaagggaacctgtgtccggtattcgatactgcgactttctgcctggagtgtatgactgcacatgactcgggggtggggaaaggggtcggctgaccatgctcatctgctggtccgtgggacggtgcccaagccagaggctgggttcatttgtgtaacgacaataaacggtacttgtcatttcgggcaa

SEQ ID NO: 188270 - DNA, 3291 bp, Homo sapiens
  Payload ID: 17048
  Gene Symbol: SDC1
  Gene Name: syndecan 1
  Uniprot ID: P18827
  ENST ID: ENST00000381150
  CDS Start-End: 392-1324
ttcagcccctctcccgggctgcgcctccgcactccgggcccgggcagaagggggtgcgcctcggccccaccacccagggagcagccgagctgaaaggccgggaaccgcggcttgcggggaccacagctcccgaaagcgacgttcggccaccggaggagcgggagccaagcaggcggagctcggcgggagaggtgcgggccgaatccgagccgagcggagaggaatccggcagtagagagcggactccagccggcggaccctgcagccctcgcctgggacagcggcgcgctgggcaggcgcccaagagagcatcgagcagcggaacccgcgaagccggcccgcagccgcgacccgcgcagcctgccgctctcccgccgccggtccgggcagcatgaggcgcgcggcgctctggctctggctgtgcgcgctggcgctgagcctgcagccggccctgccgcaaattgtggctactaatttgccccctgaagatcaagatggctctggggatgactctgacaacttctccggctcaggtgcaggtgctttgcaagatatcaccttgtcacagcagaccccctccacttggaaggacacgcagctcctgacggctattcccacgtctccagaacccaccggcctggaggctacagctgcctccacctccaccctgccggctggagaggggcccaaggagggagaggctgtagtcctgccagaagtggagcctggcctcaccgcccgggagcaggaggccaccccccgacccagggagaccacacagctcccgaccactcatctggcctcaacgaccacagccaccacggcccaggagcccgccacctcccacccccacagggacatgcagcctggccaccatgagacctcaacccctgcaggacccagccaagctgaccttcacactccccacacagaggatggaggtccttctgccaccgagagggctgctgaggatggagcctccagtcagctcccagcagcagagggctctggggagcaggacttcacctttgaaacctcgggggagaatacggctgtagtggccgtggagcctgaccgccggaaccagtccccagtggatcagggggccacgggggcctcacagggcctcctggacaggaaagaggtgctgggaggggtcattgccggaggcctcgtggggctcatctttgctgtgtgcctggtgggtttcatgctgtaccgcatgaagaagaaggacgaaggcagctactccttggaggagccgaaacaagccaacggcggggcctaccagaagcccaccaaacaggaggaattctatgcctgacgcgggagccatgcgccccctccgccctgccactcactaggcccccacttgcctcttccttgaagaactgcaggccctggcctcccctgccaccaggccacctccccagcattccagcccctctggtcgctcctgcccacggagtcgtggggtgtgctgggagctccactctgcttctctgacttctgcctggagacttagggcaccaggggtttctcgcataggacctttccaccacagccagcacctggcatcgcaccattctgactcggtttctccaaactgaagcagcctctccccaggtccagctctggaggggagggggatccgactgctttggacctaaatggcctcatgtggctggaagatcctgcgggtggggcttggggctcacacacctgtagcacttactggtaggaccaagcatcttgggggggtggccgctgagtggcaggggacaggagtccactttgtttcgtggggaggtctaatctagatatcgacttgtttttgcacatgtttcctctagttctttgttcatagcccagtagaccttgttacttctgaggtaagttaagtaagttgattcggtatccccccatcttgcttccctaatctatggtcgggagacagcatcagggttaagaagactttttttttttttttttaaactaggagaaccaaatctggaagccaaaatgtaggcttagtttgtgtgttgtctcttgagtttgtcgctcatgtgtgcaacagggtatggactatctgtctggtggccccgtttctggtggtctgttggcaggctggccagtccaggctgccgtggggccgccgcctctttcaagcagtcgtgcctgtgtccatgcgctcagggccatgctgaggcctgggccgctgccacgttggagaagcccgtgtgagaagtgaatgctgggactcagccttcagacagagaggactgtagggagggcggcaggggcctggagatcctcctgcagaccacgcccgtcctgcctgtggcgccgtctccaggggctgcttcctcctggaaattgacgaggggtgtcttgggcagagctggctctgagcgcctccatccaaggccaggttctccgttagctcctgtggccccaccctgggccctgggctggaatcaggaatattttccaaagagtgatagtcttttgcttttggcaaaactctacttaatccaatgggtttttccctgtacagtagattttccaaatgtaataaactttaatataaagtagtcctgtgaatgccactgccttcgcttcttgcctctgtgctgtgtgtgacgtgaccggacttttctgcaaacaccaacatgttgggaaacttggctcgaatctctgtgccttcgtctttcccatggggagggattctggttccagggtccctctgtgtatttgcttttttgttttggctgaaattctcctggaggtcggtaggttcagccaaggttttataaggctgatgtcaatttctgtgttgccaagctccaagccccatcttctaaatggcaaaggaaggtggatggccccagcacagcttgacctgaggctgtggtcacagcggaggtgtggagccgaggcctaccccgcagacaccttggacatcctcctcccacccggctgcagaggccagaggcccccagcccagggctcctgcacttacttgcttatttgacaacgtttcagcgactccgttggccactccgagaggtgggccagtctgtggatcagagatgcaccaccaagccaagggaacctgtgtccggtattcgatactgcgactttctgcctggagtgtatgactgcacatgactcgggggtggggaaaggggtcggctgaccatgctcatctgctggtccgtgggacggtgcccaagccagaggctgggttcatttgtgtaacgacaataaacggtacttgtcatttcgggc

SEQ ID NO: 188271 - DNA, 1523 bp, Homo sapiens
  Payload ID: 17048
  Gene Symbol: SDC1
  Gene Name: syndecan 1
  ENST ID: ENST00000403076
  CDS Start-End: 230-739
ttattataaggcggagctcggcgggagaggtgcgggccgaatccgagccgagcggagaggaatccggcagtagagagcggactccagccggcggaccctgcagccctcgcctgggacagcggcgcgctgggcaggcgcccaagagagcatcgagcagcggaacccgcgaagccggcccgcagccgcgacccgcgcagcctgccgctctcccgccgccggtccgggcagcatgaggcgcgcggcgctctggctctggctgtgcgcgctggcgctgagcctgcagccggccctgccgcaaattgtggctactaatttgccccctgaagatcaagatggctctggggatgactctgacaacttctccggctcaggtgcaggtgctttgcaagatatcaccttgtcacagcagaccccctccacttggaaggacacgcagctcctgacggctattcccacgtctccagaacccaccggcctggaggctacagctgcctccacctccaccctgccggctggagaggggcccaaggagggagaggctgtagtcctgccagaagtggagcctggcctcaccgcccgggagcaggaggccaccccccgacccagggagaccacacagctcccgaccactcatctggcctcaacgaccacagccaccacggcccaggagcccgccacctcccacccccacagggacatgcagcctgtccactttgtttcgtggggaggtctaatctagatatcgacttgtttttgcacatgtttcctctagttctttgttcatagcccagtagaccttgttacttctgaggtaagttaagtaagttgattcggtatccccccatcttgcttccctaatctatggtcgggagacagcatcagggttaagaagactttttttttttttttttaaactaggagaaccaaatctggaagccaaaatgtaggcttagtttgtgtgttgtctcttgagtttgtcgctcatgtgtgcaacagggtatggactatctgtctggtggccccgtttctggtggtctgttggcaggctggccagtccaggctgccgtggggccgccgcctctttcaagcagtcgtgcctgtgtccatgcgctcagggccatgctgaggcctgggccgctgccacgttggagaagcccgtgtgagaagtgaatgctgggactcagccttcagacagagaggactgtagggagggcggcaggggcctggagatcctcctgcagaccacgcccgtcctgcctgtggcgccgtctccaggggctgcttcctcctggaaattgacgaggggtgtcttgggcagagctggctctgagcgcctccatccaaggccaggttctccgttagctcctgtggccccaccctgggccctgggctggaatcaggaatattttccaaagagtgatagtcttttgcttttggcaaaactctacttaatccaatgggtttttccctgtacagtagattttccaaatgtaataaactttaatataaagtagtcctgtgaa

SEQ ID NO: 188272 - DNA, 591 bp, Homo sapiens
  Payload ID: 17048
  Gene Symbol: SDC1
  Gene Name: syndecan 1
  ENST ID: ENST00000447124
  CDS Start-End: 228-314
attataaggcggagctcggcgggagaggtgcgggccgaatccgagccgagcggagaggaatccggcagtagagagcggactccagccggcggaccctgcagccctcgcctgggacagcggcgcgctgggcaggcgcccaagagagcatcgagcagcggaacccgcgaagccggcccgcagccgcgacccgcgcagcctgccgctctcccgccgccggtccgggcagcatgaggcgcgcggcgctctggctctggctgtgcgcgctggcgctgagcctgcagccggccctgccgagtctgtctcatgggagatgaggtagggacagtcgtttctgagaccgatgtgtaaagcgccctccctgcttcccagcaaattgtggctactaatttgccccctgaagatcaagatggctctggggatgactctgacaacttctccggctcaggtgcaggtgctttgcaagatatcaccttgtcacagcagaccccctccacttggaaggacacgcagctcctgacggctattcccacgtctccagaacccaccggcctggaggctacagctgcctccacctccaccctgccggctgga

SEQ ID NO: 188273 - DNA, 646 bp, Homo sapiens
  Payload ID: 17048
  Gene Symbol: SDC1
  Gene Name: syndecan 1
  ENST ID: ENST00000429035
  CDS Start-End: 1-646
ccgcgttggcccggggagccgggccagggctgcgtggggggcgcgggcgagcgtctgcagggccctcgggcttgccgtgggcggctcgagcaaattgtggctactaatttgccccctgaagatcaagatggctctggggatgactctgacaacttctccggctcaggtgcaggtgctttgcaagatatcaccttgtcacagcagaccccctccacttggaaggacacgcagctcctgacggctattcccacgtctccagaacccaccggcctggaggctacagctgcctccacctccaccctgccggctggagaggggcccaaggagggagaggctgtagtcctgccagaagtggagcctggcctcaccgcccgggagcaggaggccaccccccgacccagggagaccacacagctcccgaccactcatctggcctcaacgaccacagccaccacggcccaggagcccgccacctcccacccccacagggacatgcagcctggccaccatgagacctcaacccctgcaggacccagccaagctgaccttcacactccccacacagaggatggaggtccttctgccaccgagagggctgctgaggatggagcctccagtcagctcccagcagcagagggctctgggg

SEQ ID NO: 188274 - DNA, 3759 bp, Homo sapiens
  Payload ID: 17049
  Gene Symbol: SDC2
  Gene Name: syndecan 2
  Uniprot ID: P34741
  ENST ID: ENST00000302190
  CDS Start-End: 922-1527
agaaaagctacatacgtctctcgtttcttcactaattgttctctagaaaagggaaagtgaagaagggaaagagaaaagacaacggggaagaaaagagcatagaggagagaggaaaagtggggagagaaaggaagaaaaggactgagaaaacgcaggagccctggcttgccggtgagcagagccggcgcagccacagcgcggagccgcggcgcccactggtcctcggagctgccaatcggcgtgtaatcctgtaggaatttctcccgggtttatctgggagtcacactgccgcctcctctccccagtcgcccaggggagcccggagaagcaggctcaggagggagggagccagaggaaaagaagaggaggagaaggaggaggacccggggagggaggcgcggcgcgggaggaggaggggcgcagccgcggagccagtggccccgcttggacgcgctgctctccagatacccccggagctccagccgcgcggatcgcgcgctcccgccgctctgcccctaaacttctgccgtagctccctttcaagccagcgaatttattccttaaaaccagaaactgaacctcggcacgggaaaggagtccgcggaggagcaaaaccacagcagagcaagaagagcttcagagagcagccttcccggagcaccaactccgtgtcgggagtgcagaaaccaacaagtgagagggcgccgcgttcccggggcgcagctgcgggcggcgggagcaggcgcaggaggaggaagcgagcgcccccgagccccgagcccgagtccccgagcctgagccgcaatcgctgcggtactctgctccggattcgtgtgcgcgggctgcgccgagcgctgggcaggaggcttcgttttgccctggttgcaagcagcggctgggagcagccggtccctggggaatatgcggcgcgcgtggatcctgctcaccttgggcttggtggcctgcgtgtcggcggagtcgagagcagagctgacatctgataaagacatgtaccttgacaacagctccattgaagaagcttcaggagtgtatcctattgatgacgatgactacgcttctgcgtctggctcgggagctgatgaggatgtagagagtccagagctgacaacatctcgaccacttccaaagatactgttgactagtgctgctccaaaagtggaaaccacgacgctgaatatacagaacaagatacctgctcagacaaagtcacctgaagaaactgataaagagaaagttcacctctctgactcagaaaggaaaatggacccagccgaagaggatacaaatgtgtatactgagaaacactcagacagtctgtttaaacggacagaagtcctagcagctgtcattgctggtggagttattggctttctctttgcaatttttcttatcctgctgttggtgtatcgcatgagaaagaaggatgaaggaagctatgaccttggagaacgcaaaccatccagtgctgcttatcagaaggcacctactaaggagttttatgcgtaaaactccaacttagtgtctctatttatgagatcactgaacttttcaaaataaagcttttgcatagaataatgaagatctttgttttttgttttcattaaagagccattctggcactttaatgataaaatcccattgtatttaaaacatttcatgtatttctttagaacaacataaaattaaaatttaacatctgcagtgttctgtgaatagcagtggcaaaatattatgttatgaaaaccctcgatgttcatggaattggtttaaacttttatgcgcaaatacaaaatgattgtctttttcctatgactcaaagatgaaagctgtttcatttgtgtcagcatgtctcagattgaccttaccaagttggtcttactttgttaatttatctgttgtccccttcctctcctctgccctcccttcttgtgcccttaaaaccaaaccctatgccttttgtagctgtcatggtgcaatttgtctttggaaaattcagataatggtaatttagtgtatatgtgattttcaaatatgtaaactttaacttccactttgtataaatttttaagtgtcagactatccattttacacttgctttatttttcattacctgtagctttgggcagatttgcaacagcaaattaatgtgtaaaattggattattactacaaaaccgtttagtcatatctatctaatcagatcttcttttgggaggatttgatgtaagttactgacaagcctcagcaaacccaaagatgttaacagtattttaagaagttgctgcagattcctttggccactgtatttgttaatttcttgcaatttgaaggtacgagtagaggtttaaagaaaaatcagtttttgttcttaaaaatgcatttaagttgtaaacgtctttttaagcctttgaagtgcctctgattctatgtaacttgttgcagactggtgttaatgagtatatgtaacagtttaaaaaaaaagttggtattttataagcacagacaattctaatggtaacttttgtagtcttatgaatagacataaattgtaatttgggaacataaaaactactgaataaatcatgtggcctaatattgaaaatgtcactgttataaattttgtacatttttgatcaaatgtacatctcccctttgctaacggccgtctgctctcaaggatgacgtgggtttgatttctaagtgtttcacagtgtctgtaaatcaagaccaaagagcctgtcgatgagactgtttattaccagattcacttctgaattggccagaggaaatctgaatgtattatcctgtgtgtgtctaggtagagatattggaaggctgccaggggatttcgaagtttgcaacctttataggataactgatggcaatattaagacagacgcctgcttttgcaaataacttacaagactgtaaattccaaagatctgaatggggctttcctgatgttggtatctaaggcttaggcctatagattgatttacctttggaattgtgctccaaatgtctactgaagcttaaccgaagaactaataaatggactacagtagctcacgttacagggaaggagggtaggcagggaggctctgtgtgttaaaatgagggtctcactgctttaggattgaagtggctggaaagagtgatgcctggggaaggagatggagttatgagggtactgtggctggtactttctgtactaaacatttcctttttctattttaccactaattttgttttaaactgtgagccgtccaagtcagaagaagacagcaaaaaaagcaacttttccaacatacaatttacttttaataaagtatgaatatttcattttgagaacattccctggaattgccacataattcattaaaaacatttttttaagcaacacttggaacagtgtttactttaaatccttaatggccttaattaattctcagattcctgccccatcacttacagaaccaattcactttagagtgactaaaaggaaacgatagcctagctttctaaagccacgctgtgtccctcaattacagagggtaggaatgggtatacctctaactgtgcaaagcagagtgaaattcaattcatagaataacaactgctgggaatatccgtgccaggaaaagaaaaatttctggcaaatattttgtcactgctgtaaagcaaaatatttgtgaaagtgccaaaataaagtctgtcatgccaaaagtaaatcattgta

SEQ ID NO: 188275 - DNA, 677 bp, Homo sapiens
  Payload ID: 17049
  Gene Symbol: SDC2
  Gene Name: syndecan 2
  ENST ID: ENST00000522911
  CDS Start-End: 64-582
gcaccaactccgtgtcgggagtgcagaaaccaacaaagagcagagctgacatctgataaagacatgtaccttgacaacagctccattgaagaagcttcaggagtgtatcctattgatgacgatgactacgcttctgcgtctggctcgggagctgatgaggatgtagagagtccagagctgacaacatctcgaccacttccaaagatactgttgactagtgctgctccaaaagtggaaaccacgacgctgaatatacagaacaagatacctgctcagacaaagtcacctgaagaaactgataaagagaaagttcacctctctgactcagaaaggaaaatggacccagccgaagaggatacaaatgtgtatactgagaaacactcagacagtctgtttaaacggacagaagtcctagcagctgtcattgctggtggagttattggctttctctttgcaatttttcttatcctgctgttggtgtatcgcatgagaaagaaggatgaaggaagctatgaccttggagaacgcaaaccatccagtgctgcttatcagaaggcacctactaaggagttttatgcgtaaaactccaacttagtgtctctatttatgagatcactgaacttttcaaaataaagcttttgcatagaataatgaagatctttgttttttgttttcat

SEQ ID NO: 188276 - DNA, 1318 bp, Homo sapiens
  Payload ID: 17049
  Gene Symbol: SDC2
  Gene Name: syndecan 2
  ENST ID: ENST00000519914
  CDS Start-End: 248-766
gtctttgttccagagcatttgccaaagccaggtatgtccagtcaaagggataatgcaaccgatagctcccaagcctccatatcctcagctgttgcttgttgccactgaggggtggacatgttttcatttggcatcttacatgtgagcatcatgactacagactcatcttataccaattaaataataaactccactctgtgggcagaggttctgtctggagagagcagagctgacatctgataaagacatgtaccttgacaacagctccattgaagaagcttcaggagtgtatcctattgatgacgatgactacgcttctgcgtctggctcgggagctgatgaggatgtagagagtccagagctgacaacatctcgaccacttccaaagatactgttgactagtgctgctccaaaagtggaaaccacgacgctgaatatacagaacaagatacctgctcagacaaagtcacctgaagaaactgataaagagaaagttcacctctctgactcagaaaggaaaatggacccagccgaagaggatacaaatgtgtatactgagaaacactcagacagtctgtttaaacggacagaagtcctagcagctgtcattgctggtggagttattggctttctctttgcaatttttcttatcctgctgttggtgtatcgcatgagaaagaaggatgaaggaagctatgaccttggagaacgcaaaccatccagtgctgcttatcagaaggcacctactaaggagttttatgcgtaaaactccaacttagtgtctctatttatgagatcactgaacttttcaaaataaagcttttgcatagaataatgaagatctttgttttttgttttcattaaagagccattctggcactttaatgataaaatcccattgtatttaaaacatttcatgtatttctttagaacaacataaaattaaaatttaacatctgcagtgttctgtgaatagcagtggcaaaatattatgttatgaaaaccctcgatgttcatggaattggtttaaacttttatgcgcaaatacaaaatgattgtctttttcctatgactcaaagatgaaagctgtttcatttgtgtcagcatgtctcagattgaccttaccaagttggtcttactttgttaatttatctgttgtccccttcctctcctctgccctcccttcttgtgcccttaaaaccaaaccctatgccttttgtagctgtcatggtgcaatttgtctttggaaaattcagataatggtaatttagtgtatatgtgattttcaaatatgtaaactttaacttccactttgtat

SEQ ID NO: 188277 - DNA, 1583 bp, Homo sapiens
  Payload ID: 17049
  Gene Symbol: SDC2
  Gene Name: syndecan 2
  ENST ID: ENST00000518385
  CDS Start-End: 460-957
agatacccccggagctccagccgcgcggatcgcgcgctcccgccgctctgcccctaaacttctgccgtagctccctttcaagccagcgaatttattccttaaaaccagaaactgaacctcggcacgggaaaggagtccgcggaggagcaaaaccacagcagagcaagaagagcttcagagagcagccttcccggagcaccaactccgtgtcgggagtgcagaaaccaacaagtgagagggcgccgcgttcccggggcgcagctgcgggcggcgggagcaggcgcaggaggaggaagcgagcgcccccgagccccgagcccgagtccccgagcctgagccgcaatcgctgcggtactctgctccggattcgtgtgcgcgggctgcgccgagcgctgggcaggaggcttcgttttgccctggttgcaagcagcggctgggagcagccggtccctggggaatatgcggcgcgcgtggatcctgctcaccttgggcttggtggcctgcgtgtcggcggagtcggtgagagctgatgaggatgtagagagtccagagctgacaacatctcgaccacttccaaagatactgttgactagtgctgctccaaaagtggaaaccacgacgctgaatatacagaacaagatacctgctcagacaaagtcacctgaagaaactgataaagagaaagttcacctctctgactcagaaaggaaaatggacccagccgaagaggatacaaatgtgtatactgagaaacactcagacagtctgtttaaacggacagaagtcctagcagctgtcattgctggtggagttattggctttctctttgcaatttttcttatcctgctgttggtgtatcgcatgagaaagaaggatgaaggaagctatgaccttggagaacgcaaaccatccagtgctgcttatcagaaggcacctactaaggagttttatgcgtaaaactccaacttagtgtctctatttatgagatcactgaacttttcaaaataaagcttttgcatagaataatgaagatctttgttttttgttttcattaaagagccattctggcactttaatgataaaatcccattgtatttaaaacatttcatgtatttctttagaacaacataaaattaaaatttaacatctgcagtgttctgtgaatagcagtggcaaaatattatgttatgaaaaccctcgatgttcatggaattggtttaaacttttatgcgcaaatacaaaatgattgtctttttcctatgactcaaagatgaaagctgtttcatttgtgtcagcatgtctcagattgaccttaccaagttggtcttactttgttaatttatctgttgtccccttcctctcctctgccctcccttcttgtgcccttaaaaccaaaccctatgccttttgtagctgtcatggtgcaatttgtctttggaaaattcagataatggtaatttagtgtatatgtgattttcaaatatgtaaactttaacttccactttgtataaatttttaagtgtcagactatccattttacacttgctttatttttcattacctgtagctttgggcagatttgc

SEQ ID NO: 188278 - DNA, 507 bp, Homo sapiens
  Payload ID: 17049
  Gene Symbol: SDC2
  Gene Name: syndecan 2
  ENST ID: ENST00000521590
  CDS Start-End: 97-507
aattcaagacaaaggttgcttcccttctgtctctggatcaggaatctgaacccattaccacaaacagaaagagcagagctgacatctgataaagacatgtaccttgacaacagctccattgaagaagcttcaggagtgtatcctattgatgacgatgactacgcttctgcgtctggctcgggagctgatgaggatgtagagagtccagagctgacaacatctcgaccacttccaaagatactgttgactagtgctgctccaaaagtggaaaccacgacgctgaatatacagaacaagatacctgctcagacaaagtcacctgaagaaactgataaagagaaagttcacctctctgactcagaaaggaaaatggacccagccgaagaggatacaaatgtgtatactgagaaacactcagacagtctgtttaaacggacagaagtcctagcagctgtcattgctggtggagttattggctttctctttgcaatttttcttatcctgctg

SEQ ID NO: 188279 - DNA, 621 bp, Homo sapiens
  Payload ID: 17049
  Gene Symbol: SDC2
  Gene Name: syndecan 2
  ENST ID: ENST00000523877
  CDS Start-End: 186-621
agaacacaacggcggtcaagggagaggacgcagaaagatcaggctcaggcctgggtcttgggcatcttcaaggaactcgctttctcagtggtataagaagagccccactctataagaggcatccaacaggaacagccaacatcagtggcaccttccaaagagcagagctgacatctgataaagacatgtaccttgacaacagctccattgaagaagcttcaggagtgtatcctattgatgacgatgactacgcttctgcgtctggctcgggagctgatgaggatgtagagagtccagagctgacaacatctcgaccacttccaaagatactgttgactagtgctgctccaaaagtggaaaccacgacgctgaatatacagaacaagatacctgctcagacaaagtcacctgaagaaactgataaagagaaagttcacctctctgactcagaaaggaaaatggacccagccgaagaggatacaaatgtgtatactgagaaacactcagacagtctgtttaaacggacagaagtcctagcagctgtcattgctggtggagttattggctttctctttgcaatttttcttatcctgctgttggtgtatcgcatgagaaagaagg

SEQ ID NO: 188280 - DNA, 6392 bp, Homo sapiens
  Payload ID: 17050
  Gene Symbol: SDC3
  Gene Name: syndecan 3
  ENST ID: ENST00000336798
  CDS Start-End: 1494-2648
gcccagcgctggcgcagtgagaacttcgagagacccgtggacctggagggctctggggatgatgactcctttcccgatgatgaactggatgacctctactcggggtcgggctcgggctgtaagtacccccctccctacctctgcctgggggcagtgaccagtctgtatccagcctcaactctgagaagcccacggggggcttgcttcagtgaggcagggggcattcactgcctgggtcaggcaagttcttcttgctctggatccccagaacaagaagggcagaacatccttctggggatagaacaagacctgggaggacctcagggcccagaatgtccaggtctccagggtcccacgtctgcatctttgtgtgtgctatgtggctttctctgcagaccttgcttggttccggtggtcccgtcaggtgcaataagctgtggccaatggtggggttagggcagtgatgacacagggcaggtgcttcaagtggtgcctgggatggccccgccctggggaaggggagccaggtcagctgggtctagcagaatctcgggagagaagggcaccgcgaaccccactctgccatgtagcaactgtgtgcccctcggtgctccccctccctgaatccctgtattttcacctgtggatggtgagaaatacgacttcttctcagtgcctctaggagggtttgggataggaagctggggtctggcacagaggaggagctctcaaaatggtagcaaaaagaaggcagctgagactgggcccagtgagggcacgggctggcatctgaggagatggtacggggtctgcacgccacagagctggctccccacagccctcgcctctggtctcccctccttagccaagtcctttgagcctctttcaaattaatctttgtaaaacccgtttatattgggtcacatctctattcgcaaagttccctggctcccctccctcctgcctggttccgagcccaggagctggctgtggcttctccctcccccatcccctactccccatctcatttcctcccaagttccttcactgtcccggctttgcgtcagccagattgctcaagcagttcccctgcctcaagggcttcttttcccttttaccctccgcctctgcctctgggggaagcccttagtgtaccacccctgccttgagcttgtggtaggggtgcctttggggtctgactcttcccagaatgccactcctgtgttcccctgcaagccccagcaagttttgcagccagtagcgcctcagttgctgctgcctggattcaacctcatagaaactgtaggctgggtgggcaggaatagtcaaggaaggcttcccgggagaggcggcccccagaatttttgacttggcagagagaagttggggaacatcagcaactgaccacctttagctgggctgtgccttcctcctttctctcatcttttctgggaaaattgggtaaagagagggggttgggagacctaatcttgatggccattgcttacctgggatcctcatgcccctcacaaccacccagctccctagctctctccctctcccccaccccctcagacttcgagcaggagtcgggcattgagacagccatgcgcttcagcccagatgtagccctggcggtgtccaccacacctgcggtgctgcccaccacgaacatccagcctgtgggcacaccatttgaagagctcccctctgagcgccccaccctggagccagccaccagccccctggtggtgacagaagtcccggaagagcccagccagagagccaccaccgtctccactaccatggctaccactgctgccacaagcacaggggacccgactgtggccacagtgcctgccacagtggccaccgccacccccagcacccctgcagcacccccttttacggccaccactgctgttataaggaccactggcgtacggaggcttctgcctctcccactgaccacagtggctacggcacgggccactacccccgaggcgccctccccgcccaccacggcggctgtcttggacaccgaggccccaacacccaggctggtcagcacagctacctcccggccaagagcccttcccaggccggccaccacccaggagcctgacatccctgagaggagcaccctgcccctggggaccactgcccctggacccacagaggtggctcagaccccaactccagagaccttcctgaccacaatccgggatgagccagaggttccggtgagtggggggcccagtggagacttcgagctgccagaagaagagaccacacaaccagacacagccaatgaggtggtagctgtgggaggggctgcggccaaggcatcatctccacctgggacactgcccaagggtgcccgcccgggccctggcctcctggacaatgccatcgactcgggcagctcagctgctcagctgcctcagaagagtatcctggagcggaaggaggtgctcgtagctgtgattgtgggcggggtggtgggcgccctctttgctgccttcttggtcacactgctcatctatcgtatgaagaaaaaggatgagggcagctacacgctggaggaacccaagcaggcgagcgtcacataccagaagcctgacaagcaggaggagttctatgcctagtggagccacagtgcctccctgcagcctcaacaccaccctgctgtccagtccccagcctggccccaccagcccaagcctgggactgggcctggaacctggccccagttcttctctgccctctctcccaaggtctgcccaggctgccagcctcacacagatcttccccgaggaagaggggctgctgccatctgccccagactgtgcccttacgagctcatctcttgttcccctcatccctgccaccagtctggggcttcaggacctcatgtcagatggatgggaggaagaaagctcctgattggctggtggtggaagaaagggtggggcttgagatgagcctgagccctgacttggcacccacagtgctcactgagatctcctttttggggcagagaggcactcaggctggtttccaggacaaacatttggtaaacacagcccttgaaatcatctagacactgcaacctcttgctcgtatcccagggcctctctctagctgggtgagagggtgtcccttgtcaccagcctgttttgtcctggtctctctggggttgttgaatctctcctcttgcctgccaagtacacatgtacccagacttcatttctttctgcatcttcccccaagaaacagcttcctgagggtgctggggcagccactggtgaggaggggctgctctgatgtccctcctatgaggggactctgcacagacaccattgcccacactatcaccatattttcactcagtcacacacaagacaaaagcatgcaatgacaaaaccatacgcaatcctgaccgcccagccaatcaagacatatcacagaacacacgcgtccttccaagaatgtttatcctcatgcatcacttacacacccccagacacgtactgcaatgcaagtcactagtcatggtcacatgacagtgacagtgtggcctcctcctaccccaaatacacccacactctggcaccacacacattgtctccagctttcaggcttactggggagggtggaatcgagccagaacaatcagcccatattgggtccccctaagttgccccgtcatactcagtcccatgccatggtgcccacaccaaccatgcagccgccaaccccagccagtgtcagacacaatcccatgtggatgcacagtctcactccacatgacctgctctcaatgctggagggaaacaggcaggcccttgcctttctcggaaaaagtgtggggccacagcccttttagggcattgcatgcaggtgggcctggcttcacccctacctgcttcctccccaccgcagctggcagagggggaggtttggggccagacccccactagctgggagcctgggggctcctctaaggctgaggaaggaaatttggccccaggttgttggggggtcttgggtctcccaggacggaaggcccagggcagggagggggcatgtggttgggctcctttatctccctgtgtccccttcctgctttgagctagggggctgactctgcctcccaggacacaagtctccaaagtgcctgtgagggcgggccctccgcaccctctgccctctgcctggcaggccaacctcagcccacctgcccagaggccctccctgtggacaccccctcacctatttggccaaacaattctggctgcagcttcaggggccatggctggaagcagcccctgcagatccctcaggccccgaggtcagggtttgagggatgagaccaggtgatagtgggggaggggttacttcctttgttacctagcaagtagggctatttccatcggtattttaaatgtggggtcacagatcttttggggagggtgtgcttggcagggggcctcttggagccaaagggatgtggtgtgagttgcgattggctggcactcacacccccacccctcacccacatcccagattcaagtcaggaaggcaggttttatttcagggcccttttcaagatgccctggcagcagatttctgcaggatgaggggtagcggtgtgtaggcagtgagggggaggttccaggggctgtcccacagcctgtcttttccaggctgggctccatcttccagtcccaaaaccctccttcacagggcccagaggcttgtgaggaagccaggtggacccagccttagaagagtgggcatggggggcccctgatatctggagggggcgggttggcctcagtcatctttggagcagaagggctgggtcctggggccacagaccacaaggctcagcctccctaccctgctccctggggtgctgctgtcttggagagcacagctctggtgagacggcctgggcaggccgaggctgagaaaccagggaggatagaggagaaaagggcttgggcccccagccccagaagatgctggaccccaggtgggagacccaacagtgggtgcagtttctcagtagggctggagccaatggtgggggtggccccggcaggcctggctcctcacatcccaggggttggcttctgatttggggcttgggctccaggcactggcttctcttctctgtgtccttagcatttgagagaagaggccaggggccttgttcatggatccctggacccaaggcagatgtccaggctttatcctcctgaggatgaggagtctgaccagcccaaatctgccctggccggcctgaccggggcaaggcagtccaagagagttcagtgaggaccagctaggctctcccaggtgcaatgtgggtgcagggccctcatgtccccctacccctgcctgtgatggagtgttctgaggggctttggcatttgctggaagcacagggagttccaaatgagagggagcttctgtggcttgagagcctctggggccttggctgccagagcacgaggcaggccaggacctggagagcccagaccctgtctccaggaggccaggaggccagatgggggccttgcctgaaagactggtccccttgatcgctggaggcatgtgggtggcaaccagggctgggcagggcttagggtgtgtgggccaaacccccctggggttggcaaagccgcctgtcaggcctcctggtgggggcccctggacacagggagcagaccctctgcctcatggggtaggagtggctgcctcctgtgttctctggatttcttctcccaacaactacaaccctggacttgcctccccaggcctcttgcctgtaaatagaagcccgcaaactgtacagatttacagaggcatcgagactgggccctgggagttgccatctgagagccgatggccccagcatcccccaggtgcctgcctggcaccacagtgaccctggcctcagcgtggcaaatgcatgtaaatatttttcgtaggcagcgtggctccagagagccccctgaagacagtgtccctccctcctgtgagtcctttctcctgtacagaacctgcctggggtgggtgggggtctgccattccctcccccaggccttccctgccccttctctcccctgtaacctgtttattaaccatacctgtcctgagttcatggccaaaaccttaaataagaaaaacaaaagaaaaagacagtggaaaaaagagaccaaggcgcctgccccactgcgggtactctcctgttccagccttgtgaaggaactggttttgtttttgtttttttttttttttttttttttttgtttgtttgtttttttaacacttcctgtgctgtgcccatttataagaggaaataaaattaagctgaaatg

SEQ ID NO: 188281 - DNA, 1580 bp, Homo sapiens
  Payload ID: 17050
  Gene Symbol: SDC3
  Gene Name: syndecan 3
  Uniprot ID: O75056
  ENST ID: ENST00000339394
  CDS Start-End: 176-1504
gctgtgggcgcggagctgcgaggcggagccgggcggccgagccgggagcccgcgagcctagagcgcgtcggtccagccgccgggccgcgccgccgccaagcagccgccccgcgcgccgcgcctcgggaacaaaggcgcccgcccgccgcccgccgcccgcgcccgcgccgccgccatgaagccggggccgccgcaccgtgccggggccgcccacggggccggcgccggggccggggccgcggccgggcccggggcccgcgggctgctcctgccaccgctgctgctgctgctgctggcggggcgcgccgcgggggcccagcgctggcgcagtgagaacttcgagagacccgtggacctggagggctctggggatgatgactcctttcccgatgatgaactggatgacctctactcggggtcgggctcgggctacttcgagcaggagtcgggcattgagacagccatgcgcttcagcccagatgtagccctggcggtgtccaccacacctgcggtgctgcccaccacgaacatccagcctgtgggcacaccatttgaagagctcccctctgagcgccccaccctggagccagccaccagccccctggtggtgacagaagtcccggaagagcccagccagagagccaccaccgtctccactaccatggctaccactgctgccacaagcacaggggacccgactgtggccacagtgcctgccacagtggccaccgccacccccagcacccctgcagcacccccttttacggccaccactgctgttataaggaccactggcgtacggaggcttctgcctctcccactgaccacagtggctacggcacgggccactacccccgaggcgccctccccgcccaccacggcggctgtcttggacaccgaggccccaacacccaggctggtcagcacagctacctcccggccaagagcccttcccaggccggccaccacccaggagcctgacatccctgagaggagcaccctgcccctggggaccactgcccctggacccacagaggtggctcagaccccaactccagagaccttcctgaccacaatccgggatgagccagaggttccggtgagtggggggcccagtggagacttcgagctgccagaagaagagaccacacaaccagacacagccaatgaggtggtagctgtgggaggggctgcggccaaggcatcatctccacctgggacactgcccaagggtgcccgcccgggccctggcctcctggacaatgccatcgactcgggcagctcagctgctcagctgcctcagaagagtatcctggagcggaaggaggtgctcgtagctgtgattgtgggcggggtggtgggcgccctctttgctgccttcttggtcacactgctcatctatcgtatgaagaaaaaggatgagggcagctacacgctggaggaacccaagcaggcgagcgtcacataccagaagcctgacaagcaggaggagttctatgcctagtggagccacagtgcctccctgcagcctcaacaccaccctgctgtccagtccccagcctggccccaccagcccaagc

SEQ ID NO: 188282 - DNA, 2613 bp, Homo sapiens
  Payload ID: 17051
  Gene Symbol: SDC4
  Gene Name: syndecan 4
  Uniprot ID: P31431
  ENST ID: ENST00000372733
  CDS Start-End: 41-637
actcgccgcagcctgcgcgccttctccagtccgcggtgccatggcccccgcccgtctgttcgcgctgctgctgttcttcgtaggcggagtcgccgagtcgatccgagagactgaggtcatcgacccccaggacctcctagaaggccgatacttctccggagccctaccagacgatgaggatgtagtggggcccgggcaggaatctgatgactttgagctgtctggctctggagatctggatgacttggaagactccatgatcggccctgaagttgtccatcccttggtgcctctagataaccatatccctgagagggcagggtctgggagccaagtccccaccgaacccaagaaactagaggagaatgaggttatccccaagagaatctcacccgttgaagagagtgaggatgtgtccaacaaggtgtcaatgtccagcactgtgcagggcagcaacatctttgagagaacggaggtcctggcagctctgattgtgggtggcatcgtgggcatcctctttgccgtcttcctgatcctactgctcatgtaccgtatgaagaagaaggatgaaggcagctatgacctgggcaagaaacccatctacaagaaagcccccaccaatgagttctacgcgtgaagcttgcttgtgggcactggcttggactttagcggggagggaagccaggggattttgaagggtggacattagggtagggtgaggtcaacctaatactgacttgtcagtatctccagctctgattacctttgaagtgttcagaagagacattgtcttctactgttctgccaggttcttcttgagctttgggcctcagttgccctggcagaaaaatggattcaacttggcctttctgaaggcaagactgggattggatcacttcttaaacttccagttaagaatctaggtccgccctcaagcccatactgaccatgcctcatccagagctcctctgaagccagggggctaacggatgttgtgtggagtcctggctggaggtcctcccccagtggccttcctcccttcctttcacagccggtctctctgccaggaaatgggggaaggaactagaaccacctgcaccttgagatgtttctgtaaatgggtacttgtgatcacactacgggaatctctgtggtatatacctggggccattctaggctctttcaagtgacttttggaaatcaaccttttttatttgggggggaggatggggaaaagagctgagagtttatgctgaaatggatttatagaatatttgtaaatctatttttagtgtttgttcgtttttttaactgttcattcctttgtgcagagtgtatatctctgcctgggcaagagtgtggaggtgccgaggtgtcttcattctctcgcacatttccacagcacctgctaagtttgtatttaatggtttttgtttttgtttttgtttgtttcttgaaaatgagagaagagccggagagatgatttttattaattttttttttttttttttttttttactatttatagctttagatagggcctcccttcccctcttctttctttgttctctttcattaaaccccttccccagttttttttttatactttaaaccccgctcctcatggccttggccctttctgaagctgcttcctcttataaaatagcttttgccgaaacatagtttttttttagcagatcccaaaatataatgaaggggatggtgggatatttgtgtctgtgttcttataatatattattattcttccttggttctagaaaaatagataaatatatttttttcaggaaatagtgtggtgtttccagtttgatgttgctgggtggttgagtgagtgaattttcatgtggctgggtgggtttttgcctttttctcttgccctgttcctggtgccttctgatggggctggaatagttgaggtggatggttctaccctttctgccttctgtttgggacccagctggtgttctttggtttgctttcttcaggctctagggctgtgctatccaatacagtaaccacatgcggctgtttaaagttaagccaattaaaatcacataagattaaaaattccttcctcagttgcactaaccacgtttctagaggcgtcactgtatgtagttcatggctactgtactgacagcgagagcatgtccatctgttggacagcactattctagagaactaaactggcttaacgagtcacagcctcagctgtgctgggacgacccttgtctccctgggtaggggggggggaatgggggagggctgatgaggccccagctggggcctgttgtctgggaccctccctctcctgagaggggaggcctggtggcttagcctgggcaggtcgtgtctcctcctgaccccagtggctgcggtgaggggaaccaccctcccttgctgcaccagtggccattagctcccgtcaccactgcaacccagggtcccagctggctgggtcctcttctgcccccagtgcccttccccttgggctgtgttggagtgagcacctcctctgtaggcacctctcacactgttgtctgttactgattttttttgataaaaagataataaaacctggtactttctaaa

SEQ ID NO: 188283 - DNA, 2167 bp, Homo sapiens
  Payload ID: 17052
  Gene Symbol: SDCBP
  Gene Name: syndecan binding protein (syntenin)
  Uniprot ID: O00560
  ENST ID: ENST00000260130
  CDS Start-End: 151-1047
ggctgaaggcgggggcggtgccatgacgcgcctcgggggcggtcctcgggcgcgcaccgctctcttacactcgggcctcagaagtccgtgccagtgaccggaggcggcggcggcgagcggttccttgtgggctagaagaatcctgcaaaaatgtctctctatccatctctcgaagacttgaaggtagacaaagtaattcaggctcaaactgctttttctgcaaaccctgccaatccagcaattttgtcagaagcttctgctcctatccctcacgatggaaatctctatcccagactgtatccagagctctctcaatacatggggctgagtttaaatgaagaagaaatacgtgcaaatgtggccgtggtttctggtgcaccacttcaggggcagttggtagcaagaccttccagtataaactatatggtggctcctgtaactggtaatgatgttggaattcgtagagcagaaattaagcaagggattcgtgaagtcattttgtgtaaggatcaagatggaaaaattggactcaggcttaaatcaatagataatggtatatttgttcagctagtccaggctaattctccagcctcattggttggtctgagatttggggaccaagtacttcagatcaatggtgaaaactgtgcaggatggagctctgataaagcgcacaaggtgctcaaacaggcttttggagagaagattaccatgaccattcgtgacaggccctttgaacggacgattaccatgcataaggatagcactggacatgttggttttatctttaaaaatggaaaaataacatccatagtgaaagatagctctgcagccagaaatggtcttctcacggaacataacatctgtgaaatcaatggacagaatgtcattggattgaaggactctcaaattgcagacatactgtcaacatctgggactgtagttactattacaatcatgcctgcttttatctttgaacatattattaagcggatggcaccaagcattatgaaaagcctaatggaccacaccattcctgaggtttaaaattcacggcaccatggaaatgtagctgaacgtctccagtttccttctttggcaacttctgtattatgcacgtgaagccttcccggagccagcgagcatatgctgcatgaggacctttctatcttacattatggctgggaatcttactctttcatctgataccttgttcagatttcaaaatagttgtagccttatcctggttttacagatgtgaaactttcaagagatttactgactttcctagaatagtttctctactggaaacctgatgcttttataagccattgtgattaggatgactgttacaggcttagctttgtgtgaaaaccagtcacctttctcctaggtaatgagtagtgctgttcatattactttagttctatagcatacttgcatctttaacatgctatcatagtacatttagaatgattgcctttgattttttttttaaattctgtgtgtgtgtgtgtaaaatgccaattaagaacactggtttcattccatgtaagcattaaacagtgtatgtaggtttcaagagattgtgatgattcttaaattttaactaccttcacttaatatgcttgaactgtcgccttaactatgttaagcatctagactaaaagccaaaatataattattgctgcctttctaaaaacccaaaatgtagttctctattaacctgaaatgtacactagcccagaacagtttaatggtacttactgagctatagcatagctgcttagttgtttttgagattttttagtcaacacataatggaaacttctttcttctaaaagttgccagtgccacttttaagaagtgaatcactatatgtgatgtaaaagttattacactaaacaggataaacttttgactccccttttgttcatttgtggattaagtggtataatacttaattttggcatttgactcttaagattatgtaacctagctactttgggatggtcttagaatatttttctgataacttgttccttttcctgactcctccttgcaaacaaaatgatagttgacactttatcctgatttttttcttctttttggtttatgtctattctaattaaatatgtataaataaagttacattttagtctgtcta

SEQ ID NO: 188284 - DNA, 1277 bp, Homo sapiens
  Payload ID: 17052
  Gene Symbol: SDCBP
  Gene Name: syndecan binding protein (syntenin)
  Uniprot ID: O00560
  ENST ID: ENST00000424270
  CDS Start-End: 83-961
actcgggcctcagaagtccgtgccagtgaccggaggcggcggcggcgagcggttccttgtgggctagaagaatcctgcaaaaatgtctctctatccatctctcgaagacttgaaggctcaaactgctttttctgcaaaccctgccaatccagcaattttgtcagaagcttctgctcctatccctcacgatggaaatctctatcccagactgtatccagagctctctcaatacatggggctgagtttaaatgaagaagaaatacgtgcaaatgtggccgtggtttctggtgcaccacttcaggggcagttggtagcaagaccttccagtataaactatatggtggctcctgtaactggtaatgatgttggaattcgtagagcagaaattaagcaagggattcgtgaagtcattttgtgtaaggatcaagatggaaaaattggactcaggcttaaatcaatagataatggtatatttgttcagctagtccaggctaattctccagcctcattggttggtctgagatttggggaccaagtacttcagatcaatggtgaaaactgtgcaggatggagctctgataaagcgcacaaggtgctcaaacaggcttttggagagaagattaccatgaccattcgtgacaggccctttgaacggacgattaccatgcataaggatagcactggacatgttggttttatctttaaaaatggaaaaataacatccatagtgaaagatagctctgcagccagaaatggtcttctcacggaacataacatctgtgaaatcaatggacagaatgtcattggattgaaggactctcaaattgcagacatactgtcaacatctgggactgtagttactattacaatcatgcctgcttttatctttgaacatattattaagcggatggcaccaagcattatgaaaagcctaatggaccacaccattcctgaggtttaaaattcacggcaccatggaaatgtagctgaacgtctccagtttccttctttggcaacttctgtattatgcacgtgaagccttcccggagccagcgagcatatgctgcatgaggacctttctatcttacattatggctgggaatcttactctttcatctgataccttgttcagatttcaaaatagttgtagccttatcctggttttacagatgtgaaactttcaagagatttactgactttcctagaatagtttctctactggaaacctgatgcttttataagccattgtgattaggatgactgttacaggcttagct

SEQ ID NO: 188285 - DNA, 772 bp, Homo sapiens
  Payload ID: 17052
  Gene Symbol: SDCBP
  Gene Name: syndecan binding protein (syntenin)
  ENST ID: ENST00000447267
  CDS Start-End: 19-753
tagaagaatcctgcaaaaatgtctctctatccatctctcgaagacttgaaggtagacaaagtaattcaggctcaaactgctttttctgcaaaccctgccaatccagcaattttgtcagaagcttctgctcctatccctcacgatggaaatctctatcccagactgtatccagagctctctcaatacatggggctgagtttaaatgaagaagaaatacgtgcaaatgtggccgtggtttctggtgcaccacttcaggggggtatatttgttcagctagtccaggctaattctccagcctcattggttggtctgagatttggggaccaagtacttcagatcaatggtgaaaactgtgcaggatggagctctgataaagcgcacaaggtgctcaaacaggcttttggagagaagattaccatgaccattcgtgacaggccctttgaacggacgattaccatgcataaggatagcactggacatgttggttttatctttaaaaatggaaaaataacatccatagtgaaagatagctctgcagccagaaatggtcttctcacggaacataacatctgtgaaatcaatggacagaatgtcattggattgaaggactctcaaattgcagacatactgtcaacatctgggactgtagttactattacaatcatgcctgcttttatctttgaacatattattaagcggatggcaccaagcattatgaaaagcctaatggaccacaccattcctgaggtttaaaattcacggcaccatggaa

SEQ ID NO: 188286 - DNA, 2103 bp, Homo sapiens
  Payload ID: 17052
  Gene Symbol: SDCBP
  Gene Name: syndecan binding protein (syntenin)
  Uniprot ID: O00560
  ENST ID: ENST00000447182
  CDS Start-End: 104-997
gggcgcgcaccgctctcttacactcgggcctcagaagtccgtgccagtgaccggaggcggcggcggcgagcggttccttgtgggctagaagaatcctgcaaaaatgtctctctatccatctctcgaagacttgaaggtagacaaagtaattcaggctcaaactgctttttctgcaaaccctgccaatccagcaattttgtcagaagcttctgctcctatccctcacgatggaaatctctatcccagactgtatccagagctctctcaatacatggggctgagtttaaatgaagaagaaatacgtgcaaatgtggccgtggtttctggtgcaccacttcaggggttggtagcaagaccttccagtataaactatatggtggctcctgtaactggtaatgatgttggaattcgtagagcagaaattaagcaagggattcgtgaagtcattttgtgtaaggatcaagatggaaaaattggactcaggcttaaatcaatagataatggtatatttgttcagctagtccaggctaattctccagcctcattggttggtctgagatttggggaccaagtacttcagatcaatggtgaaaactgtgcaggatggagctctgataaagcgcacaaggtgctcaaacaggcttttggagagaagattaccatgaccattcgtgacaggccctttgaacggacgattaccatgcataaggatagcactggacatgttggttttatctttaaaaatggaaaaataacatccatagtgaaagatagctctgcagccagaaatggtcttctcacggaacataacatctgtgaaatcaatggacagaatgtcattggattgaaggactctcaaattgcagacatactgtcaacatctgggactgtagttactattacaatcatgcctgcttttatctttgaacatattattaagcggatggcaccaagcattatgaaaagcctaatggaccacaccattcctgaggtttaaaattcacggcaccatggaaatgtagctgaacgtctccagtttccttctttggcaacttctgtattatgcacgtgaagccttcccggagccagcgagcatatgctgcatgaggacctttctatcttacattatggctgggaatcttactctttcatctgataccttgttcagatttcaaaatagttgtagccttatcctggttttacagatgtgaaactttcaagagatttactgactttcctagaatagtttctctactggaaacctgatgcttttataagccattgtgattaggatgactgttacaggcttagctttgtgtgaaaaccagtcacctttctcctaggtaatgagtagtgctgttcatattactttagttctatagcatacttgcatctttaacatgctatcatagtacatttagaatgattgcctttgattttttttttaaattctgtgtgtgtgtgtgtaaaatgccaattaagaacactggtttcattccatgtaagcattaaacagtgtatgtaggtttcaagagattgtgatgattcttaaattttaactaccttcacttaatatgcttgaactgtcgccttaactatgttaagcatctagactaaaagccaaaatataattattgctgcctttctaaaaacccaaaatgtagttctctattaacctgaaatgtacactagcccagaacagtttaatggtacttactgagctatagcatagctgcttagttgtttttgagattttttagtcaacacataatggaaacttctttcttctaaaagttgccagtgccacttttaagaagtgaatcactatatgtgatgtaaaagttattacactaaacaggataaacttttgactccccttttgttcatttgtggattaagtggtataatacttaattttggcatttgactcttaagattatgtaacctagctactttgggatggtcttagaatatttttctgataacttgttccttttcctgactcctccttgcaaacaaaatgatagttgacactttatcctgatttttttcttctttttggtttatgtctattctaattaaatatgtataaataaagttaca

SEQ ID NO: 188287 - DNA, 2086 bp, Homo sapiens
  Payload ID: 17052
  Gene Symbol: SDCBP
  Gene Name: syndecan binding protein (syntenin)
  Uniprot ID: O00560
  ENST ID: ENST00000413219
  CDS Start-End: 100-996
ggcgcgcaccgctctcttacactcgggcctcagaagtccgtgccagtgaccggaggcggcggcggcgagcggttccttgtgggctagaatcctgcaaaaatgtctctctatccatctctcgaagacttgaaggtagacaaagtaattcaggctcaaactgctttttctgcaaaccctgccaatccagcaattttgtcagaagcttctgctcctatccctcacgatggaaatctctatcccagactgtatccagagctctctcaatacatggggctgagtttaaatgaagaagaaatacgtgcaaatgtggccgtggtttctggtgcaccacttcaggggcagttggtagcaagaccttccagtataaactatatggtggctcctgtaactggtaatgatgttggaattcgtagagcagaaattaagcaagggattcgtgaagtcattttgtgtaaggatcaagatggaaaaattggactcaggcttaaatcaatagataatggtatatttgttcagctagtccaggctaattctccagcctcattggttggtctgagatttggggaccaagtacttcagatcaatggtgaaaactgtgcaggatggagctctgataaagcgcacaaggtgctcaaacaggcttttggagagaagattaccatgaccattcgtgacaggccctttgaacggacgattaccatgcataaggatagcactggacatgttggttttatctttaaaaatggaaaaataacatccatagtgaaagatagctctgcagccagaaatggtcttctcacggaacataacatctgtgaaatcaatggacagaatgtcattggattgaaggactctcaaattgcagacatactgtcaacatctgggactgtagttactattacaatcatgcctgcttttatctttgaacatattattaagcggatggcaccaagcattatgaaaagcctaatggaccacaccattcctgaggtttaaaattcacggcaccatggaaatgtagctgaacgtctccagtttccttctttggcaacttctgtattatgcacgtgaagccttcccggagccagcgagcatatgctgcatgaggacctttctatcttacattatggctgggaatcttactctttcatctgataccttgttcagatttcaaaatagttgtagccttatcctggttttacagatgtgaaactttcaagagatttactgactttcctagaatagtttctctactggaaacctgatgcttttataagccattgtgattaggatgactgttacaggcttagctttgtgtgaaaaccagtcacctttctcctaggtaatgagtagtgctgttcatattactttagttctatagcatacttgcatctttaacatgctatcatagtacatttagaatgattgcctttgattttttttttaaattctgtgtgtgtgtgtgtaaaatgccaattaagaacactggtttcattccatgtaagcattaaacagtgtatgtaggtttcaagagattgtgatgattcttaaattttaactaccttcacttaatatgcttgaactgtcgccttaactatgttaagcatctagactaaaagccaaaatataattattgctgcctttctaaaaacccaaaatgtagttctctattaacctgaaatgtacactagcccagaacagtttaatggtacttactgagctatagcatagctgcttagttgtttttgagattttttagtcaacacataatggaaacttctttcttctaaaagttgccagtgccacttttaagaagtgaatcactatatgtgatgtaaaagttattacactaaacaggataaacttttgactccccttttgttcatttgtggattaagtggtataatacttaattttggcatttgactcttaagattatgtaacctagctactttgggatggtcttagaatatttttctgataacttgttccttttcctgactcctccttgcaaacaaaatgatagttgacactttatcctgatttttttcttctttttggtttatgtctattctaattaaatatg

SEQ ID NO: 188288 - DNA, 3589 bp, Homo sapiens
  Payload ID: 17052
  Gene Symbol: SDCBP
  Gene Name: syndecan binding protein (syntenin)
  ENST ID: ENST00000523483
  CDS Start-End: 1515-2471
ccgtgccagtgaccggaggcggcggcggcgagcggttccttgtgggctaggtgcccaggagccactgagaacagaagacttgttgctgctctagaggacctatggtagggcagacagaggatgatacagctcagcagcttgtccctacgtgtggcatgaaaggtgttggagagagaatagtggagtatgtgtccaacattccagcacttcagagagctacccccaagggactggcttctgtttcacctgacttggagcacaggcaggagtggacatactctaaaagcccactgatgggaaagggcaccaggttggaggcctctgaaaacaagagagctgggtggcttgcagcagctccagagaacctgaagtaccacagacagatagcacagggagcaaaagattatgagatcctgaaaaaggaaacgaacaagttcatcttgagaatttatacacactggtcgagaagaagcatcctcaggaaaggttcaaaaggcatgcagaatctctagtcaggccgatcagtgaggatctttctctgtacagagccagaccacaaagactgggaggggtgatattttttcaaatgcttggatcccaacatgatgttaaaagacacacaaagaaatagggaaacatggcacaatcaaagagtcaaaatatccaggaacctactttaaggaaacacagatatcttcattatctcagaaggaattcagactaaccaccataaacatgttcagtgacccaaggaaaatgctgcatgaacaaaatggtatcaacatagagattgaaaacgtaaaaaggaaccaaacaaacattgtaacagatgcaatatgcttctttgaccaaattgaaagatttactagaggagtttagcagcagtgtttttcaaggagaagaattagtgaacttgaagccaggtcatttgaaattatccagtcagagaagcaaaaagaaaaaaaataaaaaaagaatgaagacagcctagagtactaatgggacagcatcaattttatcaatgtagattgtatggaagttccatatgttggaaagagaaaggagcaaaaagcttatttgaagaaatactggccaaaacttcccaaactgaaggaaggcagtggacatccagattcaagaagccaaatggactccagagtagaacaatccgaagacatctacatggaaacacactgtaatcaaattgtcaaagaattttgaaagcagcaggataagaacaacttgtcatatacaaaggagattctgtgggactctaagtggatttcttagcagaaaccttgcaggtcagaaagaagtgggatgatatagtcaaactgctggaagaaaaactgccagcaaagtactgtatgtggcaaaacttttctttaaaagtaaaagagaaataagattctcaaaatctgagagagttcatcaccactatatctgacttaaacgccaatgggagtctgttaaatggaaacaaaagtatgttcaacatgaaagtataaaattaaatgataaagctatggacaaatagagacctgcatattattgtaatggtgaagaatcctgcaaaaatgtctctctatccatctctcgaagacttgaaggtagacaaagtaattcaggctcaaactgctttttctgcaaaccctgccaatccagcaattttgtcagaagcttctgctcctatccctcacgatggaaatctctatcccagactgtatccagagctctctcaatacatggggctgagtttaaatgaagaagaaatacgtgcaaatgtggccgtggtttctggtgcaccacttcaggggttggtagcaagaccttccagtataaactatatggtggctcctgtaactggtaatgatgttggaattcgtagagcagaaattaagcaagggattcgtgaagtcattttgtgtaaggatcaagatggaaaaattggactcaggcttaaatcaatagataatggtatatttgttcagctagtccaggctaattctccagcctcattggttggtctgagatttggggaccaagtacttcagatcaatggtgaaaactgtgcaggatggagctctgataaagcgcacaaggtgctcaaacaggcttttggagagaagattaccatgaccattcgtgacaggccctttgaacggacgattaccatgcataaggatagcactggacatgttggttttatctttaaaaatggaaaaataacatccatagtgaaagatagctctgcagccagaaatggtcttctcacggaacataacatctgtgaaatcaatggacagaatgtcattggattgaaggactctcaaattgcagacatactgtcaacatctgggactgtagttactattacaatcatgcctgcttttatctttgaacatattattaagcggatggcaccaagcattatgaaaagcctaatggaccacaccattcctgaggtttaaaattcacggcaccatggaaatgtagctgaacgtctccagtttccttctttggcaacttctgtattatgcacgtgaagccttcccggagccagcgagcatatgctgcatgaggacctttctatcttacattatggctgggaatcttactctttcatctgataccttgttcagatttcaaaatagttgtagccttatcctggttttacagatgtgaaactttcaagagatttactgactttcctagaatagtttctctactggaaacctgatgcttttataagccattgtgattaggatgactgttacaggcttagctttgtgtgaaaaccagtcacctttctcctaggtaatgagtagtgctgttcatattactttagttctatagcatacttgcatctttaacatgctatcatagtacatttagaatgattgcctttgattttttttttaaattctgtgtgtgtgtgtgtaaaatgccaattaagaacactggtttcattccatgtaagcattaaacagtgtatgtaggtttcaagagattgtgatgattcttaaattttaactaccttcacttaatatgcttgaactgtcgccttaactatgttaagcatctagactaaaagccaaaatataattattgctgcctttctaaaaacccaaaatgtagttctctattaacctgaaatgtacactagcccagaacagtttaatggtacttactgagctatagcatagctgcttagttgtttttgagattttttagtcaacacataatggaaacttctttcttctaaaagttgccagtgccacttttaagaagtgaatcactatatgtgatgtaaaagttattacactaaacaggataaacttttgactccccttttgttcatttgtggattaagtggtataatacttaattttggcatttgactcttaagattatgtaacctagctactttgggatggtcttagaatatttttctgataacttgttccttttcctgactcctccttgcaaacaaaatgatagttgacactttatcctgatttttttcttctttttggtttatgtctattctaattaaatatgtataaataaagttacattttagtctgtc

SEQ ID NO: 188289 - DNA, 1097 bp, Homo sapiens
  Payload ID: 17052
  Gene Symbol: SDCBP
  Gene Name: syndecan binding protein (syntenin)
  ENST ID: ENST00000520168
  CDS Start-End: 65-784
cgtgccagtgaccggaggcggcggcggcgagcggttccttgtgggctagaagaatcctgcaaaaatgtctctctatccatctctcgaagacttgaaggtagacaaagtaattcaggctcaaactgctttttctgcaaaccctgccaatccagcaattttgtcagaagcttctgctcctatccctcacgatggaaatctctatcccagactgtatccagagctctctcaatacatggggctgagtttaaatgaagaagaaatacgtgcaaatgtggccgtggtttctggtgcaccacttcaggggctagtccaggctaattctccagcctcattggttggtctgagatttggggaccaagtacttcagatcaatggtgaaaactgtgcaggatggagctctgataaagcgcacaaggtgctcaaacaggcttttggagagaagattaccatgaccattcgtgacaggccctttgaacggacgattaccatgcataaggatagcactggacatgttggttttatctttaaaaatggaaaaataacatccatagtgaaagatagctctgcagccagaaatggtcttctcacggaacataacatctgtgaaatcaatggacagaatgtcattggattgaaggactctcaaattgcagacatactgtcaacatctgggactgtagttactattacaatcatgcctgcttttatctttgaacatattattaagcggatggcaccaagcattatgaaaagcctaatggaccacaccattcctgaggtttaaaattcacggcaccatggaaatgtagctgaacgtctccagtttccttctttggcaacttctgtattatgcacgtgaagccttcccggagccagcgagcatatgctgcatgaggacctttctatcttacattatggctgggaatcttactctttcatctgataccttgttcagatttcaaaatagttgtagccttatcctggttttacagatgtgaaactttcaagagatttactgactttcctagaatagtttctctactggaaacctgatgcttttataagccattgtgattaggatgactgttacaggctta

SEQ ID NO: 188290 - DNA, 2076 bp, Homo sapiens
  Payload ID: 17052
  Gene Symbol: SDCBP
  Gene Name: syndecan binding protein (syntenin)
  ENST ID: ENST00000630925
  CDS Start-End: 1-957
atgataaagctatggacaaatagagacctgcatattattgtaatggtgaagaatcctgcaaaaatgtctctctatccatctctcgaagacttgaaggtagacaaagtaattcaggctcaaactgctttttctgcaaaccctgccaatccagcaattttgtcagaagcttctgctcctatccctcacgatggaaatctctatcccagactgtatccagagctctctcaatacatggggctgagtttaaatgaagaagaaatacgtgcaaatgtggccgtggtttctggtgcaccacttcaggggttggtagcaagaccttccagtataaactatatggtggctcctgtaactggtaatgatgttggaattcgtagagcagaaattaagcaagggattcgtgaagtcattttgtgtaaggatcaagatggaaaaattggactcaggcttaaatcaatagataatggtatatttgttcagctagtccaggctaattctccagcctcattggttggtctgagatttggggaccaagtacttcagatcaatggtgaaaactgtgcaggatggagctctgataaagcgcacaaggtgctcaaacaggcttttggagagaagattaccatgaccattcgtgacaggccctttgaacggacgattaccatgcataaggatagcactggacatgttggttttatctttaaaaatggaaaaataacatccatagtgaaagatagctctgcagccagaaatggtcttctcacggaacataacatctgtgaaatcaatggacagaatgtcattggattgaaggactctcaaattgcagacatactgtcaacatctgggactgtagttactattacaatcatgcctgcttttatctttgaacatattattaagcggatggcaccaagcattatgaaaagcctaatggaccacaccattcctgaggtttaaaattcacggcaccatggaaatgtagctgaacgtctccagtttccttctttggcaacttctgtattatgcacgtgaagccttcccggagccagcgagcatatgctgcatgaggacctttctatcttacattatggctgggaatcttactctttcatctgataccttgttcagatttcaaaatagttgtagccttatcctggttttacagatgtgaaactttcaagagatttactgactttcctagaatagtttctctactggaaacctgatgcttttataagccattgtgattaggatgactgttacaggcttagctttgtgtgaaaaccagtcacctttctcctaggtaatgagtagtgctgttcatattactttagttctatagcatacttgcatctttaacatgctatcatagtacatttagaatgattgcctttgattttttttttaaattctgtgtgtgtgtgtgtaaaatgccaattaagaacactggtttcattccatgtaagcattaaacagtgtatgtaggtttcaagagattgtgatgattcttaaattttaactaccttcacttaatatgcttgaactgtcgccttaactatgttaagcatctagactaaaagccaaaatataattattgctgcctttctaaaaacccaaaatgtagttctctattaacctgaaatgtacactagcccagaacagtttaatggtacttactgagctatagcatagctgcttagttgtttttgagattttttagtcaacacataatggaaacttctttcttctaaaagttgccagtgccacttttaagaagtgaatcactatatgtgatgtaaaagttattacactaaacaggataaacttttgactccccttttgttcatttgtggattaagtggtataatacttaattttggcatttgactcttaagattatgtaacctagctactttgggatggtcttagaatatttttctgataacttgttccttttcctgactcctccttgcaaacaaaatgatagttgacactttatcctgatttttttcttctttttggtttatgtctattctaattaaatatgtataaataaagttacattttagtctgtct

SEQ ID NO: 188291 - DNA, 1404 bp, Homo sapiens
  Payload ID: 17053
  Gene Symbol: SDCBP2
  Gene Name: syndecan binding protein (syntenin) 2
  Uniprot ID: Q9H190
  ENST ID: ENST00000339987
  CDS Start-End: 60-938
ctcaacactgggtcagaagtcacggccagacaagaaacggggtgttctgagaatcagccatgtcatccctgtacccatctctagaggacctaaaagtggaccaagccattcaggcccaggtcagagcctcacccaagatgccagccctgccagtccaggcaacagccatttccccaccaccagttttgtacccaaacttggcagaactggaaaattatatgggtctttccctctccagccaagaagtccaggagagcctgcttcagattccagagggtgacagtacagcggtctcgggccccgggcccggccagatggtggcaccggtaaccgggtacagcctgggcgtgcggcgagctgagatcaagcccggggtgcgcgagatccacctgtgcaaggacgagcgcggcaagaccgggctgaggctgcggaaggtcgaccaggggctctttgtgcagttggtccaggccaacacccctgcatcccttgtggggctgcgctttggggaccagctcctgcagattgacgggcgtgactgtgctgggtggagctcgcacaaagcccatcaggtggtgaagaaggcatcaggcgataagattgtcgtggtggttcgggacaggccgttccagcggactgtcaccatgcacaaggacagcatgggccacgtcggcttcgtgatcaagaaggggaagattgtctctctggtcaaagggagttctgcggcccgcaacgggctcctcaccaaccactacgtgtgtgaggtggacgggcagaatgttatcgggctgaaggacaaaaagatcatggagattctggccacggctgggaacgttgtcaccctgaccatcatccccagtgtgatctacgagcacatggtcaaaaagttgcctccagtcctgctccaccacaccatggaccactccatcccagatgcctgaagccactgcagggcagggcaggcagggggggcttcccgccctcctgcagcaaagggcaaccaccctcggatgatgggttgcagccggcctgctgcttaaggtgggggctgccatgaggggggcgtgtccaggagggtgaccatgggatggcttatacacacaggcctccttggagcctcagactccaagctaggctgaggctcaggcagggcccacaggcagccgattctcttgtgctgatttaaatgctggacacggaggcaggctgtttaaacgctgcttaaagtcgcaactgggcccctttcaagaaattttgctctaccaggaaaacagttacacattttaagagaacagagctacgttctttgtgagagctttttccttgccttgacttgctctttgtcacagactgcataagttgtcagccttgactatcttttgaataaagatttgattttaaacaaaa

SEQ ID NO: 188292 - DNA, 1519 bp, Homo sapiens
  Payload ID: 17053
  Gene Symbol: SDCBP2
  Gene Name: syndecan binding protein (syntenin) 2
  Uniprot ID: Q9H190
  ENST ID: ENST00000360779
  CDS Start-End: 175-1053
atcccagtccaaggtgagtcagctgaacaggggacaggcaccacccttcccagatcaggaagccagctgagagacagggctacgtttcagggagggaaacagattcagcagcggcagcagctggagaaggtcgtggagcagcaccttgcctgcagggtgttctgagaatcagccatgtcatccctgtacccatctctagaggacctaaaagtggaccaagccattcaggcccaggtcagagcctcacccaagatgccagccctgccagtccaggcaacagccatttccccaccaccagttttgtacccaaacttggcagaactggaaaattatatgggtctttccctctccagccaagaagtccaggagagcctgcttcagattccagagggtgacagtacagcggtctcgggccccgggcccggccagatggtggcaccggtaaccgggtacagcctgggcgtgcggcgagctgagatcaagcccggggtgcgcgagatccacctgtgcaaggacgagcgcggcaagaccgggctgaggctgcggaaggtcgaccaggggctctttgtgcagttggtccaggccaacacccctgcatcccttgtggggctgcgctttggggaccagctcctgcagattgacgggcgtgactgtgctgggtggagctcgcacaaagcccatcaggtggtgaagaaggcatcaggcgataagattgtcgtggtggttcgggacaggccgttccagcggactgtcaccatgcacaaggacagcatgggccacgtcggcttcgtgatcaagaaggggaagattgtctctctggtcaaagggagttctgcggcccgcaacgggctcctcaccaaccactacgtgtgtgaggtggacgggcagaatgttatcgggctgaaggacaaaaagatcatggagattctggccacggctgggaacgttgtcaccctgaccatcatccccagtgtgatctacgagcacatggtcaaaaagttgcctccagtcctgctccaccacaccatggaccactccatcccagatgcctgaagccactgcagggcagggcaggcagggggggcttcccgccctcctgcagcaaagggcaaccaccctcggatgatgggttgcagccggcctgctgcttaaggtgggggctgccatgaggggggcgtgtccaggagggtgaccatgggatggcttatacacacaggcctccttggagcctcagactccaagctaggctgaggctcaggcagggcccacaggcagccgattctcttgtgctgatttaaatgctggacacggaggcaggctgtttaaacgctgcttaaagtcgcaactgggcccctttcaagaaattttgctctaccaggaaaacagttacacattttaagagaacagagctacgttctttgtgagagctttttccttgccttgacttgctctttgtcacagactgcataagttgtcagccttgactatcttttgaataaagatttgattttaaacaaaa

SEQ ID NO: 188293 - DNA, 1261 bp, Homo sapiens
  Payload ID: 17053
  Gene Symbol: SDCBP2
  Gene Name: syndecan binding protein (syntenin) 2
  Uniprot ID: Q9H190
  ENST ID: ENST00000381808
  CDS Start-End: 172-795
gggagaagcgtggactggggacgtggggggacccggggacggctccatcctcctttccccatccctacccccaccccagtgtctcctgaggcacagggtccccacgggccgggctgaccccctgccccctggtgtctgcagacagcggtctcgggccccgggcccggccagatggtggcaccggtaaccgggtacagcctgggcgtgcggcgagctgagatcaagcccggggtgcgcgagatccacctgtgcaaggacgagcgcggcaagaccgggctgaggctgcggaaggtcgaccaggggctctttgtgcagttggtccaggccaacacccctgcatcccttgtggggctgcgctttggggaccagctcctgcagattgacgggcgtgactgtgctgggtggagctcgcacaaagcccatcaggtggtgaagaaggcatcaggcgataagattgtcgtggtggttcgggacaggccgttccagcggactgtcaccatgcacaaggacagcatgggccacgtcggcttcgtgatcaagaaggggaagattgtctctctggtcaaagggagttctgcggcccgcaacgggctcctcaccaaccactacgtgtgtgaggtggacgggcagaatgttatcgggctgaaggacaaaaagatcatggagattctggccacggctgggaacgttgtcaccctgaccatcatccccagtgtgatctacgagcacatggtcaaaaagttgcctccagtcctgctccaccacaccatggaccactccatcccagatgcctgaagccactgcagggcagggcaggcagggggggcttcccgccctcctgcagcaaagggcaaccaccctcggatgatgggttgcagccggcctgctgcttaaggtgggggctgccatgaggggggcgtgtccaggagggtgaccatgggatggcttatacacacaggcctccttggagcctcagactccaagctaggctgaggctcaggcagggcccacaggcagccgattctcttgtgctgatttaaatgctggacacggaggcaggctgtttaaacgctgcttaaagtcgcaactgggcccctttcaagaaattttgctctaccaggaaaacagttacacattttaagagaacagagctacgttctttgtgagagctttttccttgccttgacttgctctttgtcacagactgcataagttgtcagccttgactatcttttgaataaagatttgattttaaacaaaa

SEQ ID NO: 188294 - DNA, 1550 bp, Homo sapiens
  Payload ID: 17053
  Gene Symbol: SDCBP2
  Gene Name: syndecan binding protein (syntenin) 2
  Uniprot ID: Q9H190
  ENST ID: ENST00000381812
  CDS Start-End: 140-1018
cccttcccacggctgccttagtacagaatcttataagtcctcctccttcagaggctacaaatggtgttccgaggccaggggagtttaaagctcgatttcacccgcgcagcctccaatccgggtgttctgagaatcagccatgtcatccctgtacccatctctagaggacctaaaagtggaccaagccattcaggcccaggtcagagcctcacccaagatgccagccctgccagtccaggcaacagccatttccccaccaccagttttgtacccaaacttggcagaactggaaaattatatgggtctttccctctccagccaagaagtccaggagagcctgcttcagattccagagggtgacagtacagcggtctcgggccccgggcccggccagatggtggcaccggtaaccgggtacagcctgggcgtgcggcgagctgagatcaagcccggggtgcgcgagatccacctgtgcaaggacgagcgcggcaagaccgggctgaggctgcggaaggtcgaccaggggctctttgtgcagttggtccaggccaacacccctgcatcccttgtggggctgcgctttggggaccagctcctgcagattgacgggcgtgactgtgctgggtggagctcgcacaaagcccatcaggtggtgaagaaggcatcaggcgataagattgtcgtggtggttcgggacaggccgttccagcggactgtcaccatgcacaaggacagcatgggccacgtcggcttcgtgatcaagaaggggaagattgtctctctggtcaaagggagttctgcggcccgcaacgggctcctcaccaaccactacgtgtgtgaggtggacgggcagaatgttatcgggctgaaggacaaaaagatcatggagattctggccacggctgggaacgttgtcaccctgaccatcatccccagtgtgatctacgagcacatggtcaaaaagttgcctccagtcctgctccaccacaccatggaccactccatcccagatgcctgaagccactgcagggcagggcaggcagggggggcttcccgccctcctgcagcaaagggcaaccaccctcggatgatgggttgcagccggcctgctgcttaaggtgggggctgccatgaggggggcgtgtccaggagggtgaccatgggatggcttatacacacaggcctccttggagcctcagactccaagctaggctgaggctcaggcagggcccacaggcagccgattctcttgtgctgatttaaatgctggacacggaggcaggctgtttaaacgctgcttaaagtcgcaactgggcccctttcaagaaattttgctctaccaggaaaacagttacacattttaagagaacagagctacgttctttgtgagagctttttccttgccttgacttgctctttgtcacagactgcataagttgtcagccttgactatcttttgaataaagatttgattttaaacaaaaccctgtccgcaaaggtaattgattcccccaaaactattgaaaataaaataaaaaggtaactgaaaa

SEQ ID NO: 188295 - DNA, 3960 bp, Homo sapiens
  Payload ID: 17054
  Gene Symbol: SYNM
  Gene Name: synemin, intermediate filament protein
  ENST ID: ENST00000328642
  CDS Start-End: 121-1140
agtctgcgggcctccggggcagcggcgaggccggagcgtcgcggcggagaggacgagaccgggacaagaccagggcaggagggagccggccagccgcgagaaccccgcacgcccggcaagatgctgtcctggcggctgcagacgggccccgagaaggccgagctccaggagctcaacgcccggctctatgactacgtgtgtcgggtgcgggagctggagcgcgaaaacctactcctggaggaggagctgcgcggccggcgcgggcgagagggcctgtgggccgaggggcaggcccgctgcgccgaggaggcgcgcagcttgcggcagcagctggacgagctgagctgggccactgcgctggcggagggcgagcgggacgctctgcggcgcgagctgcgggagctgcagcgcctggatgcggaggagcgcgccgcccgcggccgcctggacgccgagctgggtgcgcagcagcgcgagctgcaggaggcgctgggcgcgcgcgccgccctcgaggcgctgctgggccggctgcaggccgagcgccgaggcctcgacgcggcccacgaacgcgacgtgagggagctgcgcgcgcgcgccgccagccttaccatgcatttccgcgcccgcgccaccggccccgccgcgccgccgccacgcctgcgggaggtgcacgacagctacgcactgctggtggccgagtcgtggcgggagacggtgcagctgtacgaggacgaggtgcgcgagctggaggaggcgctgcggcgcggccaggagagcagactccaggcggaggaagagacgcggctgtgcgcgcaggaggcagaggcgctgcggcgcgaggcgctcgggttggagcagctgcgcgcgcggctggaggacgcgctgctgcggatgcgcgaggagtacgggatacaggccgaggagcggcagagagtgattgactgcctggaggatgagaaggcaaccctcaccttggccatggctgactggctgcgggactatcaggacctcctgcaggtgaagaccggcctcagtctggaggtggcgacctaccgggccttattggaaggagaaagtaatccagagatagtgatctgggctgagcacgttgaaaacatgccgtcagatggatgtgagtaacgtagaggcgatccgcagccggacacaggaagcgggagctctcggtgtgtctgaccgtggttcctggagagacgcggacagtaggaatgaccaggcagttggtgtgagctttaaggcctctgctggggaaggagaccaggcccacagagaacagggcaaggagcaggccatgtttgataagaaggtgcagctccagagaatggtagaccaaaggtcggtgatttcagatgaaaagaaagttgccctcctctatctagacaatgaggaggaggagaatgatgggcattggttttaataagcagaaacattttgttttaatggcagcctgttggcgacgtgccaacatccaaaggccttaacttattttaagaggccgagggagtctatgaaaatctccccttttttacttttttaaagagtactcccggcatggtcaatttcctttatagttaatccgtaaaggtttccagttaattcatgccttaaaaggcactgcaattttatttttgagttgggacttttacaaaacacttttttccctggagtcttctctccacttctggagatgaatttctatgttttgcacctggtcacagacatggcttgcatctgtttgaaactacaattaattatagatgtcaaaacattaaccagattaaagtaatatatttaagagtaaattttgcttgcatgtgctaatatgaaataacagactaacattttaggggaaaaataaatacaatttagactctaaaaagtcttttcaaaaagaaatgggaaataggcagactgtttatgttaaaaaaattcttgctaaatgatttcatctttaggaaaaaattacttgccatatagagctaaattcatcttaagacttgaatgaattgctttctatgtacagaactttaaacaatatagtatttatggcgaggacagctgtagtctgttgtgatatttcacattctatttgcacaggttccctggcactggtagggtagatgattattgggaatcgcttacagtaccatttcattttttggcactaggtcattaagtagcacacagtctgaatgcccttttctggagtggccagttcctatcagactgtgcagacttgcgcttctctgcaccttatcccttagcacccaaacatttaatttcactggtgggaggtagaccttgaagacaatgaagagaatgccgatactcagactgcagctggaccggcaagctggctgtgtacaggaaaattggaagcacacagtggactgtgcctcttaaagatgcctttcccaaccctccattcatgggatgcaggtctttctgagctcaagggtgaaagatgaatacaataacaaccatgaacccacctcacggaagctttttttgcactttgaacagaagtcattgcagttggggtgttttgtccagggaaacagtttattaaatagaaggatgttttggggaaggaactggatatctctcctgcagcccagcaccgagatacccaggacgggcctggggggcgagaaaggcccccatgctcatgggccgcggagtgtggacctgtagataggcaccaccgagtttaagatactgggatgagcatgcttcattggattcattttattttacacgtcagtattgttttaaagtttctgtctgtaaagtgtagcatcatatataaaaagagtttcgctagcagcgcattttttttagttcaggctagcttctttcacataatgctgtctcagctgtatttccagtaacacagcatcatcgcactgactgtggcgcactggggaataacagtctgagctagcaccaccctcagccaggctacaacgacagcactggagggtcttccctctcagattcacctggaggccctcagacccccagggtgcacgtctccccaggtcctgggagtggctaccgcaggtagtttctggagagcacgttttcttcattgataagtggaggagaaatgcagcacagctttcaagatactattttaaaaacaccatgaatcagatagggaaagaaagttgattggaatagcaagtttaaacctttgttgtccatctgccaaatgaactagtgattgtcagactggtatggaggtgactgctttgtaaggttttgtcgtttctaatacagacagagatgtgctgattttgttttagctgtaacaggtaatggtttttggatagatgattgactggtgagaatttggtcaaggtgacagcctcctgtctgatgacaggacagactggtggtgaggagtctaagtgggctcagtttgatgtcagtgtctgggctcatgacttgtaaatggaagctgatgtgaacaggtaattaatattatgacccacttctatttactttgggaaatatcttggatcttaattatcatctgcaagtttcaagaagtattctgccaaaagtatttacaagtatggactcatgagctattgttggttgctaaatgtgaatcacgcgggagtgagtgtgcccttcacactgtgacattgtgacattgtgacaagctccatgtcctttaaaatcagtcactctgcacacaagagaaatcaacttcgtggttggatggggccggaacacaaccagtctttttgtatttattgttactgagacaaaacagtactcactgagtgtttttcagtttcctactggtggttttgatattgtttgtttaagatgtatatttagaatgacatcatctaagaagctgattttgctaaactcctgttccctacaatgggaaatgtcacaagaatgtgcaaaaataaaaatctgagg

SEQ ID NO: 188296 - DNA, 7394 bp, Homo sapiens
  Payload ID: 17054
  Gene Symbol: SYNM
  Gene Name: synemin, intermediate filament protein
  Uniprot ID: O15061
  ENST ID: ENST00000336292
  CDS Start-End: 166-4863
gcccgccccgtccgctaagtgcctgggctctcccgctcgcgtcccagtctgcgggcctccggggcagcggcgaggccggagcgtcgcggcggagaggacgagaccgggacaagaccagggcaggagggagccggccagccgcgagaaccccgcacgcccggcaagatgctgtcctggcggctgcagacgggccccgagaaggccgagctccaggagctcaacgcccggctctatgactacgtgtgtcgggtgcgggagctggagcgcgaaaacctactcctggaggaggagctgcgcggccggcgcgggcgagagggcctgtgggccgaggggcaggcccgctgcgccgaggaggcgcgcagcttgcggcagcagctggacgagctgagctgggccactgcgctggcggagggcgagcgggacgctctgcggcgcgagctgcgggagctgcagcgcctggatgcggaggagcgcgccgcccgcggccgcctggacgccgagctgggtgcgcagcagcgcgagctgcaggaggcgctgggcgcgcgcgccgccctcgaggcgctgctgggccggctgcaggccgagcgccgaggcctcgacgcggcccacgaacgcgacgtgagggagctgcgcgcgcgcgccgccagccttaccatgcatttccgcgcccgcgccaccggccccgccgcgccgccgccacgcctgcgggaggtgcacgacagctacgcactgctggtggccgagtcgtggcgggagacggtgcagctgtacgaggacgaggtgcgcgagctggaggaggcgctgcggcgcggccaggagagcagactccaggcggaggaagagacgcggctgtgcgcgcaggaggcagaggcgctgcggcgcgaggcgctcgggttggagcagctgcgcgcgcggctggaggacgcgctgctgcggatgcgcgaggagtacgggatacaggccgaggagcggcagagagtgattgactgcctggaggatgagaaggcaaccctcaccttggccatggctgactggctgcgggactatcaggacctcctgcaggtgaagaccggcctcagtctggaggtggcgacctaccgggccttattggaaggagaaagtaatccagagatagtgatctgggctgagcacgttgaaaacatgccgtcagaattcagaaacaaatcctatcactataccgactcactactacagagggaaaatgaaaggaatctattttcaaggcagaaagcacctttggcaagtttcaatcacagctcggcactgtattctaacctgtcagggcaccgtggatctcagacgggcacatctattggaggtgatgccagaagaggcttcttgggctcgggatattcttcctcggccactacccagcaggaaaactcatacggaaaagccgtcagcagtcaaaccaacgtcagaactttctctccaacctatggccttttaagaaatactgaggctcaagtgaaaacattccctgacagaccaaaagccggagatacaagggaggtccccgtttacataggtgaagattccacaattgcccgcgagtcgtaccgggatcgccgagacaaggtggcagcaggtgcttcggaaagcacacggtcaaatgagaggaccgtcattctgggaaagaaaacagaagtgaaagccacgagggagcaagaaagaaacagaccagaaaccatccgaacaaagccagaagagaaaatgttcgattctaaagagaaggcttccgaggagagaaacctaagatgggaagaattgacaaagttagataaggaagcgagacagagagaaagccagcagatgaaggagaaggctaaggagaaggactcaccgaaggagaagagcgtgcgagagagagaggtgccgattagtctagaagtatcccaggacagaagagcagaggtgtccccgaaaggtttgcagacgcctgtgaaggatgctggtggtgggaccggtagagaggcagaagcaagagagctacggttcaggttgggcaccagtgatgccactggttctctgcaaggcgattccatgacagaaaccgtagcagaaaacatcgttaccagtatcctgaagcagttcactcagtctccagagacagaagcatctgctgattcttttccagacacaaaagtcacttacgtggacaggaaagagcttcctggggaaaggaaaacaaagactgaaatagttgtggagtctaaactgactgaggatgttgatgtttccgatgaagctggcctggactaccttttaagcaaggatattaaggaagtggggctgaaaggcaagtcagccgagcagatgataggagacatcatcaacctcggcctgaaagggagggaggggagagcaaaggtcgtcaacgtggagatcgtggaggagcccgtgagttatgtcagcggggagaagccggaggagttttccgtcccattcaaagtggaggaggtcgaagatgtgtcgccaggcccctgggggttggttaaggaggaggaaggttatggagaaagcgatgtcacattctcagttaatcagcatcgaaggaccaagcagcctcaggagaacacgactcacgtggaagaagtgacagaggcaggtgattcagagggcgagcagagttattttgtgtccactccagatgaacaccccggggggcacgacagagatgacggctcggtgtacgggcagatccacatcgaggaggaatccaccatcaggtactcttggcaggatgaaatcgtgcaggggactcgaaggaggacacagaaggacggtgcagtgggcgagaaggttgtgaagcccttggatgtcccagcgccctctctggagggggacctgggttccactcactggaaagaacaagctagaagcggtgaatttcatgccgaacccacagtcattgaaaaagaaattaaaataccccacgaattccacacctccatgaagggcatctcctccaaggagccccggcagcagctggtggaggtcatcgggcagctggaggaaacccttcccgagcgcatgagggaggagctgtccgccctcaccagagaggggcagggtgggccggggagcgtttccgtggatgtcaagaaggtccagggtgctggtggcagttccgtgaccctggttgctgaagtcaacgtctcacaaactgtggatgccgatcggttagacctggaggagctgagcaaagatgaggccagtgagatggagaaggctgtggagtcggtggttcgggagagcctgagcaggcaacgcagcccagcgcctggcagcccagatgaggaaggtggagcggaggccccggctgctggcattcgctttaggcgttgggccacccgggagctgtacatcccttcaggcgagagcgaggttgctggtggggcctctcacagctcgggacagcgcactccccagggcccagtgtcggccactgtggaggtcagcagccccacaggctttgcccagtcacaggtgctggaggatgtgagccaggctgcaaggcacataaaactcggcccctctgaagtctggaggactgagcgaatgtcatatgaaggacccactgcagaagtggtggaggtaagtgcgggaggtgacctaagtcaggcagcgagcccgaccggagccagccggtctgtgaggcatgtcacgctgggtcccggtcaaagtccactgtccagagaagtcatcttcctaggccctgcccctgcctgtccagaggcatggggctcgccagaacctggcccagcagagtcttctgcagatatggacggatcagggaggcacagcacatttggctgcagacaatttcatgctgaaaaggagattatttttcagggccccatttctgctgcagggaaggttggtgattattttgcaacagaagagtcagtgggtacccagacttctgtcaggcaactccagttaggccctaaagaagggttcagtgggcaaatccagttcacagctccactttcagacaaggtggagttgggtgtcataggagattctgtacacatggaagggttgccagggagcagcacatccatcaggcacatcagcattgggcctcagaggcatcagaccacccagcagatagtttaccatgggctggttccccaactgggggaatctggtgactcagagagcactgtgcacggagagggctcagcagatgtgcaccaggccactcacagtcatacctcgggtagacaaaccgttatgactgaaaagagcaccttccaaagtgtcgtttctgaatctccccaggaggatagtgcagaggacacatcaggggcagaaatgacatcgggtgttagcagatcctttaggcacattcgactaggtcctacagaaacggaaacctctgaacacattgccatccgtggacccgtgtccagaacatttgtgcttgctggttcagcggactcccctgagctaggcaagttagcagacagcagcagaacgctaaggcacattgcaccagggcccaaagaaacttcgtttacctttcagatggatgtgagtaacgtagaggcgatccgcagccggacacaggaagcgggagctctcggtgtgtctgaccgtggttcctggagagacgcggacagtaggaatgaccaggcagttggtgtgagctttaaggcctctgctggggaaggagaccaggcccacagagaacagggcaaggagcaggccatgtttgataagaaggtgcagctccagagaatggtagaccaaaggtcggtgatttcagatgaaaagaaagttgccctcctctatctagacaatgaggaggaggagaatgatgggcattggttttaataagcagaaacattttgttttaatggcagcctgttggcgacgtgccaacatccaaaggccttaacttattttaagaggccgagggagtctatgaaaatctccccttttttacttttttaaagagtactcccggcatggtcaatttcctttatagttaatccgtaaaggtttccagttaattcatgccttaaaaggcactgcaattttatttttgagttgggacttttacaaaacacttttttccctggagtcttctctccacttctggagatgaatttctatgttttgcacctggtcacagacatggcttgcatctgtttgaaactacaattaattatagatgtcaaaacattaaccagattaaagtaatatatttaagagtaaattttgcttgcatgtgctaatatgaaataacagactaacattttaggggaaaaataaatacaatttagactctaaaaagtcttttcaaaaagaaatgggaaataggcagactgtttatgttaaaaaaattcttgctaaatgatttcatctttaggaaaaaattacttgccatatagagctaaattcatcttaagacttgaatgaattgctttctatgtacagaactttaaacaatatagtatttatggcgaggacagctgtagtctgttgtgatatttcacattctatttgcacaggttccctggcactggtagggtagatgattattgggaatcgcttacagtaccatttcattttttggcactaggtcattaagtagcacacagtctgaatgcccttttctggagtggccagttcctatcagactgtgcagacttgcgcttctctgcaccttatcccttagcacccaaacatttaatttcactggtgggaggtagaccttgaagacaatgaagagaatgccgatactcagactgcagctggaccggcaagctggctgtgtacaggaaaattggaagcacacagtggactgtgcctcttaaagatgcctttcccaaccctccattcatgggatgcaggtctttctgagctcaagggtgaaagatgaatacaataacaaccatgaacccacctcacggaagctttttttgcactttgaacagaagtcattgcagttggggtgttttgtccagggaaacagtttattaaatagaaggatgttttggggaaggaactggatatctctcctgcagcccagcaccgagatacccaggacgggcctggggggcgagaaaggcccccatgctcatgggccgcggagtgtggacctgtagataggcaccaccgagtttaagatactgggatgagcatgcttcattggattcattttattttacacgtcagtattgttttaaagtttctgtctgtaaagtgtagcatcatatataaaaagagtttcgctagcagcgcattttttttagttcaggctagcttctttcacataatgctgtctcagctgtatttccagtaacacagcatcatcgcactgactgtggcgcactggggaataacagtctgagctagcaccaccctcagccaggctacaacgacagcactggagggtcttccctctcagattcacctggaggccctcagacccccagggtgcacgtctccccaggtcctgggagtggctaccgcaggtagtttctggagagcacgttttcttcattgataagtggaggagaaatgcagcacagctttcaagatactattttaaaaacaccatgaatcagatagggaaagaaagttgattggaatagcaagtttaaacctttgttgtccatctgccaaatgaactagtgattgtcagactggtatggaggtgactgctttgtaaggttttgtcgtttctaatacagacagagatgtgctgattttgttttagctgtaacaggtaatggtttttggatagatgattgactggtgagaatttggtcaaggtgacagcctcctgtctgatgacaggacagactggtggtgaggagtctaagtgggctcagtttgatgtcagtgtctgggctcatgacttgtaaatggaagctgatgtgaacaggtaattaatattatgacccacttctatttactttgggaaatatcttggatcttaattatcatctgcaagtttcaagaagtattctgccaaaagtatttacaagtatggactcatgagctattgttggttgctaaatgtgaatcacgcgggagtgagtgtgcccttcacactgtgacattgtgacattgtgacaagctccatgtcctttaaaatcagtcactctgcacacaagagaaatcaacttcgtggttggatggggccggaacacaaccagtctttttgtatttattgttactgagacaaaacagtactcactgagtgtttttcagtttcctactggtggttttgatattgtttgtttaagatgtatatttagaatgacatcatctaagaagctgattttgctaaactcctgttccctacaatgggaaatgtcacaagaatgtgcaaaaataaaaatctgaggaaaaaa

SEQ ID NO: 188297 - DNA, 5908 bp, Homo sapiens
  Payload ID: 17054
  Gene Symbol: SYNM
  Gene Name: synemin, intermediate filament protein
  ENST ID: ENST00000560674
  CDS Start-End: 470-3373
aagagtggctggattcggattttggagtgagacggagcatgaagacgctgtgtcctgaggcctttacattctcatcttacttatcccttgtagcgatcctatgagggaggggttatccttactttacagatgaggaaactgagtctgggaggctcaaggaccagctcgtccctgtcctcctgctccctagacccagctggtctcagaccctgcggagctgccatcatctgcatctgtgccctgactcttcagcctctctccctggccttctggagacagacctctgaccggtgggctccatgtgattctgggctccaggacctctcccatgaagatgaccagcacttgctgagtgcggtgtgccaagtcttgtgcaacacgtctcacacagcgtaacgggcagtgtggcaaagtgggtaagagagtgattgactgcctggaggatgagaaggcaaccctcaccttggccatggctgactggctgcgggactatcaggacctcctgcaggtgaagaccggcctcagtctggaggtggcgacctaccgggccttattggaaggagaaagtaatccagagatagtgatctgggctgagcacgttgaaaacatgccgtcagaattcagaaacaaatcctatcactataccgactcactactacagagggaaaatgaaaggaatctattttcaaggcagaaagcacctttggcaagtttcaatcacagctcggcactgtattctaacctgtcagggcaccgtggatctcagacgggcacatctattggaggtgatgccagaagaggcttcttgggctcgggatattcttcctcggccactacccagcaggaaaactcatacggaaaagccgtcagcagtcaaaccaacgtcagaactttctctccaacctatggccttttaagaaatactgaggctcaagtgaaaacattccctgacagaccaaaagccggagatacaagggaggtccccgtttacataggtgaagattccacaattgcccgcgagtcgtaccgggatcgccgagacaaggtggcagcaggtgcttcggaaagcacacggtcaaatgagaggaccgtcattctgggaaagaaaacagaagtgaaagccacgagggagcaagaaagaaacagaccagaaaccatccgaacaaagccagaagagaaaatgttcgattctaaagagaaggcttccgaggagagaaacctaagatgggaagaattgacaaagttagataaggaagcgagacagagagaaagccagcagatgaaggagaaggctaaggagaaggactcaccgaaggagaagagcgtgcgagagagagaggtgccgattagtctagaagtatcccaggacagaagagcagaggtgtccccgaaaggtttgcagacgcctgtgaaggatgctggtggtgggaccggtagagaggcagaagcaagagagctacggttcaggttgggcaccagtgatgccactggttctctgcaaggcgattccatgacagaaaccgtagcagaaaacatcgttaccagtatcctgaagcagttcactcagtctccagagacagaagcatctgctgattcttttccagacacaaaagtcacttacgtggacaggaaagagcttcctggggaaaggaaaacaaagactgaaatagttgtggagtctaaactgactgaggatgttgatgtttccgatgaagctggcctggactaccttttaagcaaggatattaaggaagtggggctgaaaggcaagtcagccgagcagatgataggagacatcatcaacctcggcctgaaagggagggaggggagagcaaaggtcgtcaacgtggagatcgtggaggagcccgtgagttatgtcagcggggagaagccggaggagttttccgtcccattcaaagtggaggaggtcgaagatgtgtcgccaggcccctgggggttggttaaggaggaggaaggttatggagaaagcgatgtcacattctcagttaatcagcatcgaaggaccaagcagcctcaggagaacacgactcacgtggaagaagtgacagaggcaggtgattcagagggcgagcagagttattttgtgtccactccagatgaacaccccggggggcacgacagagatgacggctcggtgtacgggcagatccacatcgaggaggaatccaccatcaggtactcttggcaggatgaaatcgtgcaggggactcgaaggaggacacagaaggacggtgcagtgggcgagaaggttgtgaagcccttggatgtcccagcgccctctctggagggggacctgggttccactcactggaaagaacaagctagaagcggtgaatttcatgccgaacccacagtcattgaaaaagaaattaaaataccccacgaattccacacctccatgaagggcatctcctccaaggagccccggcagcagctggtggaggtcatcgggcagctggaggaaacccttcccgagcgcatgagggaggagctgtccgccctcaccagagaggggcagggtgggccggggagcgtttccgtggatgtcaagaaggtccagggtgctggtggcagttccgtgaccctggttgctgaagtcaacgtctcacaaactgtggatgccgatcggttagacctggaggagctgagcaaagatgaggccagtgagatggagaaggctgtggagtcggtggttcgggagagcctgagcaggcaacgcagcccagcgcctggcagcccagatgaggaaggtggagcggaggccccggctgctggcattcgctttaggcgttgggccacccgggagctgtacatcccttcaggcgagagcgaggttgctggtggggcctctcacagctcgggacagcgcactccccagggcccagtgtcggccactgtggaggtcagcagccccacaggctttgcccagtcacaggtgctggaggatgtgagccaggctgcaaggcacataaaactcggcccctctgaagtctggaggactgagcgaatgtcatatgaaggacccactgcagaagtggtggagatggatgtgagtaacgtagaggcgatccgcagccggacacaggaagcgggagctctcggtgtgtctgaccgtggttcctggagagacgcggacagtaggaatgaccaggcagttggtgtgagctttaaggcctctgctggggaaggagaccaggcccacagagaacagggcaaggagcaggccatgtttgataagaaggtgcagctccagagaatggtagaccaaaggtcggtgatttcagatgaaaagaaagttgccctcctctatctagacaatgaggaggaggagaatgatgggcattggttttaataagcagaaacattttgttttaatggcagcctgttggcgacgtgccaacatccaaaggccttaacttattttaagaggccgagggagtctatgaaaatctccccttttttacttttttaaagagtactcccggcatggtcaatttcctttatagttaatccgtaaaggtttccagttaattcatgccttaaaaggcactgcaattttatttttgagttgggacttttacaaaacacttttttccctggagtcttctctccacttctggagatgaatttctatgttttgcacctggtcacagacatggcttgcatctgtttgaaactacaattaattatagatgtcaaaacattaaccagattaaagtaatatatttaagagtaaattttgcttgcatgtgctaatatgaaataacagactaacattttaggggaaaaataaatacaatttagactctaaaaagtcttttcaaaaagaaatgggaaataggcagactgtttatgttaaaaaaattcttgctaaatgatttcatctttaggaaaaaattacttgccatatagagctaaattcatcttaagacttgaatgaattgctttctatgtacagaactttaaacaatatagtatttatggcgaggacagctgtagtctgttgtgatatttcacattctatttgcacaggttccctggcactggtagggtagatgattattgggaatcgcttacagtaccatttcattttttggcactaggtcattaagtagcacacagtctgaatgcccttttctggagtggccagttcctatcagactgtgcagacttgcgcttctctgcaccttatcccttagcacccaaacatttaatttcactggtgggaggtagaccttgaagacaatgaagagaatgccgatactcagactgcagctggaccggcaagctggctgtgtacaggaaaattggaagcacacagtggactgtgcctcttaaagatgcctttcccaaccctccattcatgggatgcaggtctttctgagctcaagggtgaaagatgaatacaataacaaccatgaacccacctcacggaagctttttttgcactttgaacagaagtcattgcagttggggtgttttgtccagggaaacagtttattaaatagaaggatgttttggggaaggaactggatatctctcctgcagcccagcaccgagatacccaggacgggcctggggggcgagaaaggcccccatgctcatgggccgcggagtgtggacctgtagataggcaccaccgagtttaagatactgggatgagcatgcttcattggattcattttattttacacgtcagtattgttttaaagtttctgtctgtaaagtgtagcatcatatataaaaagagtttcgctagcagcgcattttttttagttcaggctagcttctttcacataatgctgtctcagctgtatttccagtaacacagcatcatcgcactgactgtggcgcactggggaataacagtctgagctagcaccaccctcagccaggctacaacgacagcactggagggtcttccctctcagattcacctggaggccctcagacccccagggtgcacgtctccccaggtcctgggagtggctaccgcaggtagtttctggagagcacgttttcttcattgataagtggaggagaaatgcagcacagctttcaagatactattttaaaaacaccatgaatcagatagggaaagaaagttgattggaatagcaagtttaaacctttgttgtccatctgccaaatgaactagtgattgtcagactggtatggaggtgactgctttgtaaggttttgtcgtttctaatacagacagagatgtgctgattttgttttagctgtaacaggtaatggtttttggatagatgattgactggtgagaatttggtcaaggtgacagcctcctgtctgatgacaggacagactggtggtgaggagtctaagtgggctcagtttgatgtcagtgtctgggctcatgacttgtaaatggaagctgatgtgaacaggtaattaatattatgacccacttctatttactttgggaaatatcttggatcttaattatcatctgcaagtttcaagaagtattctgccaaaagtatttacaagtatggactcatgagctattgttggttgctaaatgtgaatcacgcgggagtgagtgtgcccttcacactgtgacattgtgacattgtgacaagctccatgtcctttaaaatcagtcactctgcacacaagagaaatcaacttcgtggttggatggggccggaacacaaccagtctttttgtatttattgttactgagacaaaacagtactcactgagtgtttttcagtttcctactggtggttttgatattgtttgtttaagatgtatatttagaatgacatcatctaagaagctgattttgctaaactcctgttccctacaatgggaaatgtcacaagaatgtgcaaaaataaaaatctgaggaaaaaaccca

SEQ ID NO: 188298 - DNA, 6407 bp, Homo sapiens
  Payload ID: 17054
  Gene Symbol: SYNM
  Gene Name: synemin, intermediate filament protein
  ENST ID: ENST00000594047
  CDS Start-End: 121-3882
agtctgcgggcctccggggcagcggcgaggccggagcgtcgcggcggagaggacgagaccgggacaagaccagggcaggagggagccggccagccgcgagaaccccgcacgcccggcaagatgctgtcctggcggctgcagacgggccccgagaaggccgagctccaggagctcaacgcccggctctatgactacgtgtgtcgggtgcgggagctggagcgcgaaaacctactcctggaggaggagctgcgcggccggcgcgggcgagagggcctgtgggccgaggggcaggcccgctgcgccgaggaggcgcgcagcttgcggcagcagctggacgagctgagctgggccactgcgctggcggagggcgagcgggacgctctgcggcgcgagctgcgggagctgcagcgcctggatgcggaggagcgcgccgcccgcggccgcctggacgccgagctgggtgcgcagcagcgcgagctgcaggaggcgctgggcgcgcgcgccgccctcgaggcgctgctgggccggctgcaggccgagcgccgaggcctcgacgcggcccacgaacgcgacgtgagggagctgcgcgcgcgcgccgccagccttaccatgcatttccgcgcccgcgccaccggccccgccgcgccgccgccacgcctgcgggaggtgcacgacagctacgcactgctggtggccgagtcgtggcgggagacggtgcagctgtacgaggacgaggtgcgcgagctggaggaggcgctgcggcgcggccaggagagcagactccaggcggaggaagagacgcggctgtgcgcgcaggaggcagaggcgctgcggcgcgaggcgctcgggttggagcagctgcgcgcgcggctggaggacgcgctgctgcggatgcgcgaggagtacgggatacaggccgaggagcggcagagagtgattgactgcctggaggatgagaaggcaaccctcaccttggccatggctgactggctgcgggactatcaggacctcctgcaggtgaagaccggcctcagtctggaggtggcgacctaccgggccttattggaaggagaaagtaatccagagatagtgatctgggctgagcacgttgaaaacatgccgtcagaattcagaaacaaatcctatcactataccgactcactactacagagggaaaatgaaaggaatctattttcaaggcagaaagcacctttggcaagtttcaatcacagctcggcactgtattctaacctgtcagggcaccgtggatctcagacgggcacatctattggaggtgatgccagaagaggcttcttgggctcgggatattcttcctcggccactacccagcaggaaaactcatacggaaaagccgtcagcagtcaaaccaacgtcagaactttctctccaacctatggccttttaagaaatactgaggctcaagtgaaaacattccctgacagaccaaaagccggagatacaagggaggtccccgtttacataggtgaagattccacaattgcccgcgagtcgtaccgggatcgccgagacaaggtggcagcaggtgcttcggaaagcacacggtcaaatgagaggaccgtcattctgggaaagaaaacagaagtgaaagccacgagggagcaagaaagaaacagaccagaaaccatccgaacaaagccagaagagaaaatgttcgattctaaagagaaggcttccgaggagagaaacctaagatgggaagaattgacaaagttagataaggaagcgagacagagagaaagccagcagatgaaggagaaggctaaggagaaggactcaccgaaggagaagagcgtgcgagagagagaggtgccgattagtctagaagtatcccaggacagaagagcagaggtgtccccgaaaggtttgcagacgcctgtgaaggatgctggtggtgggaccggtagagaggcagaagcaagagagctacggttcaggttgggcaccagtgatgccactggttctctgcaaggcgattccatgacagaaaccgtagcagaaaacatcgttaccagtatcctgaagcagttcactcagtctccagagacagaagcatctgctgattcttttccagacacaaaagtcacttacgtggacaggaaagagcttcctggggaaaggaaaacaaagactgaaatagttgtggagtctaaactgactgaggatgttgatgtttccgatgaagctggcctggactaccttttaagcaaggatattaaggaagtggggctgaaaggcaagtcagccgagcagatgataggagacatcatcaacctcggcctgaaagggagggaggggagagcaaaggtcgtcaacgtggagatcgtggaggagcccgtgagttatgtcagcggggagaagccggaggagttttccgtcccattcaaagtggaggaggtcgaagatgtgtcgccaggcccctgggggttggttaaggaggaggaaggttatggagaaagcgatgtcacattctcagttaatcagcatcgaaggaccaagcagcctcaggagaacacgactcacgtggaagaagtgacagaggcaggtgattcagagggcgagcagagttattttgtgtccactccagatgaacaccccggggggcacgacagagatgacggctcggtgtacgggcagatccacatcgaggaggaatccaccatcaggtactcttggcaggatgaaatcgtgcaggggactcgaaggaggacacagaaggacggtgcagtgggcgagaaggttgtgaagcccttggatgtcccagcgccctctctggagggggacctgggttccactcactggaaagaacaagctagaagcggtgaatttcatgccgaacccacagtcattgaaaaagaaattaaaataccccacgaattccacacctccatgaagggcatctcctccaaggagccccggcagcagctggtggaggtcatcgggcagctggaggaaacccttcccgagcgcatgagggaggagctgtccgccctcaccagagaggggcagggtgggccggggagcgtttccgtggatgtcaagaaggtccagggtgctggtggcagttccgtgaccctggttgctgaagtcaacgtctcacaaactgtggatgccgatcggttagacctggaggagctgagcaaagatgaggccagtgagatggagaaggctgtggagtcggtggttcgggagagcctgagcaggcaacgcagcccagcgcctggcagcccagatgaggaaggtggagcggaggccccggctgctggcattcgctttaggcgttgggccacccgggagctgtacatcccttcaggcgagagcgaggttgctggtggggcctctcacagctcgggacagcgcactccccagggcccagtgtcggccactgtggaggtcagcagccccacaggctttgcccagtcacaggtgctggaggatgtgagccaggctgcaaggcacataaaactcggcccctctgaagtctggaggactgagcgaatgtcatatgaaggacccactgcagaagtggtggagatggatgtgagtaacgtagaggcgatccgcagccggacacaggaagcgggagctctcggtgtgtctgaccgtggttcctggagagacgcggacagtaggaatgaccaggcagttggtgtgagctttaaggcctctgctggggaaggagaccaggcccacagagaacagggcaaggagcaggccatgtttgataagaaggtgcagctccagagaatggtagaccaaaggtcggtgatttcagatgaaaagaaagttgccctcctctatctagacaatgaggaggaggagaatgatgggcattggttttaataagcagaaacattttgttttaatggcagcctgttggcgacgtgccaacatccaaaggccttaacttattttaagaggccgagggagtctatgaaaatctccccttttttacttttttaaagagtactcccggcatggtcaatttcctttatagttaatccgtaaaggtttccagttaattcatgccttaaaaggcactgcaattttatttttgagttgggacttttacaaaacacttttttccctggagtcttctctccacttctggagatgaatttctatgttttgcacctggtcacagacatggcttgcatctgtttgaaactacaattaattatagatgtcaaaacattaaccagattaaagtaatatatttaagagtaaattttgcttgcatgtgctaatatgaaataacagactaacattttaggggaaaaataaatacaatttagactctaaaaagtcttttcaaaaagaaatgggaaataggcagactgtttatgttaaaaaaattcttgctaaatgatttcatctttaggaaaaaattacttgccatatagagctaaattcatcttaagacttgaatgaattgctttctatgtacagaactttaaacaatatagtatttatggcgaggacagctgtagtctgttgtgatatttcacattctatttgcacaggttccctggcactggtagggtagatgattattgggaatcgcttacagtaccatttcattttttggcactaggtcattaagtagcacacagtctgaatgcccttttctggagtggccagttcctatcagactgtgcagacttgcgcttctctgcaccttatcccttagcacccaaacatttaatttcactggtgggaggtagaccttgaagacaatgaagagaatgccgatactcagactgcagctggaccggcaagctggctgtgtacaggaaaattggaagcacacagtggactgtgcctcttaaagatgcctttcccaaccctccattcatgggatgcaggtctttctgagctcaagggtgaaagatgaatacaataacaaccatgaacccacctcacggaagctttttttgcactttgaacagaagtcattgcagttggggtgttttgtccagggaaacagtttattaaatagaaggatgttttggggaaggaactggatatctctcctgcagcccagcaccgagatacccaggacgggcctggggggcgagaaaggcccccatgctcatgggccgcggagtgtggacctgtagataggcaccaccgagtttaagatactgggatgagcatgcttcattggattcattttattttacacgtcagtattgttttaaagtttctgtctgtaaagtgtagcatcatatataaaaagagtttcgctagcagcgcattttttttagttcaggctagcttctttcacataatgctgtctcagctgtatttccagtaacacagcatcatcgcactgactgtggcgcactggggaataacagtctgagctagcaccaccctcagccaggctacaacgacagcactggagggtcttccctctcagattcacctggaggccctcagacccccagggtgcacgtctccccaggtcctgggagtggctaccgcaggtagtttctggagagcacgttttcttcattgataagtggaggagaaatgcagcacagctttcaagatactattttaaaaacaccatgaatcagatagggaaagaaagttgattggaatagcaagtttaaacctttgttgtccatctgccaaatgaactagtgattgtcagactggtatggaggtgactgctttgtaaggttttgtcgtttctaatacagacagagatgtgctgattttgttttagctgtaacaggtaatggtttttggatagatgattgactggtgagaatttggtcaaggtgacagcctcctgtctgatgacaggacagactggtggtgaggagtctaagtgggctcagtttgatgtcagtgtctgggctcatgacttgtaaatggaagctgatgtgaacaggtaattaatattatgacccacttctatttactttgggaaatatcttggatcttaattatcatctgcaagtttcaagaagtattctgccaaaagtatttacaagtatggactcatgagctattgttggttgctaaatgtgaatcacgcgggagtgagtgtgcccttcacactgtgacattgtgacattgtgacaagctccatgtcctttaaaatcagtcactctgcacacaagagaaatcaacttcgtggttggatggggccggaacacaaccagtctttttgtatttattgttactgagacaaaacagtactcactgagtgtttttcagtttcctactggtggttttgatattgtttgtttaagatgtatatttagaatgacatcatctaagaagctgattttgctaaactcctgttccctacaatgggaaatgtcacaagaatgtgcaaaaataaaaatctgagg

SEQ ID NO: 188299 - DNA, 3787 bp, Homo sapiens
  Payload ID: 17055
  Gene Symbol: SYNRG
  Gene Name: synergin, gamma
  Uniprot ID: Q9UMZ2
  ENST ID: ENST00000619541
  CDS Start-End: 27-3734
gaaggcagcggcaggtcgggagcaagatggcgctgcggccaggagctggttctggtggcggcggggccgcgggagctggcgcggggtccgccgggggaggcggcttcatgtttcctgttgcaggtgggataagaccccctcaaggcctgatgccgatgcagcaacaaggatttcctatggtctctgtcatgcagcctaatatgcaaggcattatgggaatgaattacagctctcagatgtcccaaggacctattgctatgcaggcaggaataccaatgggaccaatgccagcagcgggaatgccttacctaggacaagcacccttcctgggcatgcgtcctccaggcccacagtacactccagacatgcagaagcagtttgccgaagagcagcagaaacgatttgaacagcagcaaaaactcttagaagaagaaagaaaaagacgccagtttgaagagcagaagcaaaagctcagacttttgagcagtgtgaaacccaagacaggagagaagagtagagatgatgctttggaagccataaaaggaaatttagatgggttttccagagatgcaaaaatgcaccctactccagcatcgcaccccaagaaaccaggtgtgggagtatttccctcacaggatcctgctcagcccagaatgcctccttggatttacaatgagagtttggttccagatgcctataagaaaatcttagaaaccacaatgactccaactggaatagatactgccaaactgtatcccattctgatgtcatctgggcttcccagggaaactcttggacagatatgggccttagctaatcgaactacacctggcaaacttacaaaagaagaactttataccgttctagccatgatagcggtaacacagaggggcgttcctgcaatgagtcctgatgctttaaaccagttcccagcagctcctattccaactttaagtggcttttctatgactctgcctacaccggtgagtcagccaactgtgataccttcaggtcctgcgggctccatgcccctcagccttggacagccagtcatgggcattaaccttgttggaccagtgggtggagctgcagcccaggcttctagtggtttcataccaacctaccctgcaaatcaggtagtaaagccagaagaagatgacttccaggattttcaagatgcttctaagtcaggatcccttgatgactcattcagtgatttccaagagttgcctgcttcttcaaaaacaagtaactcccagcatggaaacagtgccccttctttgttgatgccacttcctggaactaaagcattgccttcaatggacaaatatgctgtgtttaaaggaattgcagctgacaagtcctctgaaaatactgttccacctggagatcctggtgataaatatagtgctttcagagaacttgaacagacagcagagaataaacctttaggagaaagctttgcagaattcagatctgcaggaactgatgatggtttcaccgattttaaaacagccgatagtgtatcaccactagagccaccaacaaaagacaaaacttttccaccatccttcccctcaggaactatacaacagaaacaacaaacacaagtgaaaaaccctctgaacttagcagacctagatatgttttcctcagttaattgcagcagcgagaaaccattgtctttttcagctgtgtttagcacatcaaaatcagtttctacaccacagtcaacaggttctgctgctactatgacagcattggcagcaacaaaaacttctagtttggctgatgattttggagaattcagcctttttggggaatattctggtctagcacctgttggggagcaggatgactttgcagattttatggctttcagtaatagctctatttcatctgagcaaaagccggatgacaaatatgatgcccttaaagaggaagccagtcctgttcctctaaccagcaacgtgggcagcacagtgaagggtggacaaaactcgactgctgcgtctaccaagtacgatgtcttcagacaactttctctggaagggtctggactaggtgttgaagacctgaaagataacactccttcaggaaaaagtgatgatgattttgctgacttccactccagtaaattttcttccataaactcggacaaatccctgggagagaaagcagtggctttcagacacaccaaagaagactctgcatcagtgaagtccttagatctcccttccattggtggcagcagtgttggcaaggaggactctgaagatgcactctctgttcagtttgacatgaaattggctgatgtgggaggagatcttaagcatgtcatgtctgatagctctttggatttaccaacagttagtggccagcatcctcctgctgcagatatagaggacttaaaatatgctgcttttggaagctacagtagcaattttgcagtgagcacacttacaagctatgactggtcagacagggatgatgcaactcagggcagaaaactctctccatttgtcctctcagcaggaagtggatccccctcagccacctcaattcttcaaaagaaagagacttcatttggcagttctgaaaacatcaccatgacatctctctccaaagtaacgacctttgtaagtgaagatgctcttccagagaccaccttcccagctcttgccagttttaaagacacgattcctcagaccagtgagcaaaaggaatatgaaaacagagactataaagatttcacaaaacaggacctgcctacggctgaacggagccaggaggccacgtgtcccagcccagcgtccagtggtgcctctcaagaaaccccgaacgaatgttcggatgactttggagagtttcaaagtgaaaagcccaaaatcagcaaatttgacttcttagtagccacttcacaaagcaaaatgaaatccagtgaagaaatgatcaaaagtgagctggcaacctttgacctttctgttcaaggatcacacaagaggagtttgagccttggtgataaagaaataagccgttcttctccttctccagctttggagcagcctttcagagaccgttccaatactctgaatgagaagcccgccctgcccgtcatccgagacaagtacaaagacctgacgggagaggtggaggaaaatgagagatatgcatatgaatggcagagatgcctggggagtgccctgaatgtcattaagaaggcaaatgataccttaaatggaatcagtagtagttctgtttgcacagaagtaattcagtcagctcaaggcatggaatatttattaggtgttgttgaagtgtacagggtaaccaagcgtgtggagctggggataaaagccactgcagtgtgcagtgagaaactccagcagttgctgaaggacatcgataaagtatggaataacctaatcggcttcatgtcactcgccacactcacaccagatgaaaactcgctggatttttcctcctgtatgttacggcctgggattaaaaatgctcaggagcttgcctgtggagtgtgcctcttgaatgtggactcgaggagccggaaagaagagaagcctgcagaagaacatcctaaaaaagcattcaactcagaaacagacagtttcaagctggcctatggagggcaccagtatcacgccagctgtgccaacttctggatcaactgtgtcgaaccaaagcctcctggcctcgtcctgcctgacctgctctgaacaactcctctgtgaagcattgacttttttttttctgtgacaccccacggggt

SEQ ID NO: 188300 - DNA, 3406 bp, Homo sapiens
  Payload ID: 17055
  Gene Symbol: SYNRG
  Gene Name: synergin, gamma
  Uniprot ID: Q9UMZ2
  ENST ID: ENST00000610513
  CDS Start-End: 27-3353
gaaggcagcggcaggtcgggagcaagatggcgctgcggccaggagctggttctggtggcggcggggccgcgggagctggcgcggggtccgccgggggaggcggcttcatgtttcctgttgcaggtgggataagaccccctcaagcaggcctgatgccgatgcagcaacaaggatttcctatggtctctgtcatgcagcctaatatgcaaggcattatgggaatgaattacagctctcagatgtcccaaggacctattgctatgcaggcaggaataccaatgggaccaatgccagcagcgggaatgccttacctaggacaagcacccttcctgggcatgcgtcctccaggcccacagtacactccagacatgcagaagcagtttgccgaagagcagcagaaacgatttgaacagcagcaaaaactcttagaagaagaaagaaaaagacgccagtttgaagagcagaagcaaaagctcagacttttgagcagtgtgaaacccaagacaggagagaagagtagagatgatgctttggaagccataaaaggaaatttagatgggttttccagagatgcaaaaatgcaccctactccagcatcgcaccccaagaaaccaggtgtgggagtatttccctcacaggatcctgctcagcccagaatgcctccttggatttacaatgagagtttggttccagatgcctataagaaaatcttagaaaccacaatgactccaactggaatagatactgccaaactgtatcccattctgatgtcatctgggcttcccagggaaactcttggacagatatgggccttagctaatcgaactacacctggcaaacttacaaaagaagaactttataccgttctagccatgatagcggtaacacaggtagtaaagccagaagaagatgacttccaggattttcaagatgcttctaagtcaggatcccttgatgactcattcagtgatttccaagagttgcctgcttcttcaaaaacaagtaactcccagcatggaaacagtgccccttctttgttgatgccacttcctggaactaaagcattgccttcaatggacaaatatgctgtgtttaaaggaattgcagctgacaagtcctctgaaaatactgttccacctggagatcctggtgataaatatagtgctttcagagaacttgaacagacagcagagaataaacctttaggagaaagctttgcagaattcagatctgcaggaactgatgatggtttcaccgattttaaaacagccgatagtgtatcaccactagagccaccaacaaaagacaaaacttttccaccatccttcccctcaggaactatacaacagaaacaacaaacacaagtgaaaaaccctctgaacttagcagacctagatatgttttcctcagttaattgcagcagcgagaaaccattgtctttttcagctgtgtttagcacatcaaaatcagtttctacaccacagtcaacaggttctgctgctactatgacagcattggcagcaacaaaaacttctagtttggctgatgattttggagaattcagcctttttggggaatattctggtctagcacctgttggggagcaggatgactttgcagattttatggctttcagtaatagctctatttcatctgagcaaaagccggatgacaaatatgatgcccttaaagaggaagccagtcctgttcctctaaccagcaacgtgggcagcacagtgaagggtggacaaaactcgactgctgcgtctaccaagtacgatgtcttcagacaactttctctggaagggtctggactaggtgttgaagacctgaaagataacactccttcaggaaaaagtgatgatgattttgctgacttccactccagtaaattttcttccataaactcggacaaatccctgggagagaaagcagtggctttcagacacaccaaagaagactctgcatcagtgaagtccttagatctcccttccattggtggcagcagtgttggcaaggaggactctgaagatgcactctctgttcagtttgacatgaaattggctgatgtgggaggagatcttaagcatgtcatgtctgatagctctttggatttaccaacagttagtggccagcatcctcctgctgcagcaggaagtggatccccctcagccacctcaattcttcaaaagaaagagacttcatttggcagttctgaaaacatcaccatgacatctctctccaaagtaacgacctttgtaagtgaagatgctcttccagagaccaccttcccagctcttgccagttttaaagacacgattcctcagaccagtgagcaaaaggaatatgaaaacagagactataaagatttcacaaaacaggacctgcctacggctgaacggagccaggaggccacgtgtcccagcccagcgtccagtggtgcctctcaagaaaccccgaacgaatgttcggatgactttggagagtttcaaagtgaaaagcccaaaatcagcaaatttgacttcttagtagccacttcacaaagcaaaatgaaatccagtgaagaaatgatcaaaagtgagctggcaacctttgacctttctgttcaaggatcacacaagaggagtttgagccttggtgataaagaaataagccgttcttctccttctccagctttggagcagcctttcagagaccgttccaatactctgaatgagaagcccgccctgcccgtcatccgagacaagtacaaagacctgacgggagaggtggaggaaaatgagagatatgcatatgaatggcagagatgcctggggagtgccctgaatgtcattaagaaggcaaatgataccttaaatggaatcagtagtagttctgtttgcacagaagtaattcagtcagctcaaggcatggaatatttattaggtgttgttgaagtgtacagggtaaccaagcgtgtggagctggggataaaagccactgcagtgtgcagtgagaaactccagcagttgctgaaggacatcgataaagtatggaataacctaatcggcttcatgtcactcgccacactcacaccagatgaaaactcgctggatttttcctcctgtatgttacggcctgggattaaaaatgctcaggagcttgcctgtggagtgtgcctcttgaatgtggactcgaggagccggaaagaagagaagcctgcagaagaacatcctaaaaaagcattcaactcagaaacagacagtttcaagctggcctatggagggcaccagtatcacgccagctgtgccaacttctggatcaactgtgtcgaaccaaagcctcctggcctcgtcctgcctgacctgctctgaacaactcctctgtgaagcattgacttttttttttctgtgacaccccacggggt

SEQ ID NO: 188301 - DNA, 527 bp, Homo sapiens
  Payload ID: 17055
  Gene Symbol: SYNRG
  Gene Name: synergin, gamma
  ENST ID: ENST00000612770
  CDS Start-End: 1-323
agcaaaaactcttagaagaagaaagaaaaagacgccagtttgaagagcagaagcaaaagctcagacttttgagcagtgtgaaacccaagacaggagagaagagtagagatgatgctttggaagccataaaaggaaatttagatgggttttccagagatgcaaaaatgcaccctactccagcatcgcaccccaagaaaccaggtagttttaagaggcattatatttttcttttctgggaaggtgatttatgtagtccctgtttctttacctcgccattatatgtgtgtgtgaaaagtcaatgtagaactcttccttcaagctaagtacagatttggatgttctcaaatatacagtggcttaagagctctggtctggataacaactgtcttgggaggaaaaaacctctttgtcttctaattaaatatcagtatgacaatttcacctgtaagttttctgtatataaatatgttaacattagtaaaatctattcactcagagcaaatgtaataaaggagtttaccatttaa

SEQ ID NO: 188302 - DNA, 8229 bp, Homo sapiens
  Payload ID: 17055
  Gene Symbol: SYNRG
  Gene Name: synergin, gamma
  Uniprot ID: Q9UMZ2
  ENST ID: ENST00000618402
  CDS Start-End: 142-4086
agtcacgtgggcgcgaggccccgccccatcgcccggtccgcggcgaggtggggcctggtgtttgacccggaagtggctgtgttcagctgacagctgctgataaggtggcggcggcgaaggcagcggcaggtcgggagcaagatggcgctgcggccaggagctggttctggtggcggcggggccgcgggagctggcgcggggtccgccgggggaggcggcttcatgtttcctgttgcaggtgggataagaccccctcaagcaggcctgatgccgatgcagcaacaaggatttcctatggtctctgtcatgcagcctaatatgcaaggcattatgggaatgaattacagctctcagatgtcccaaggacctattgctatgcaggcaggaataccaatgggaccaatgccagcagcgggaatgccttacctaggacaagcacccttcctgggcatgcgtcctccaggcccacagtacactccagacatgcagaagcagtttgccgaagagcagcagaaacgatttgaacagcagcaaaaactcttagaagaagaaagaaaaagacgccagtttgaagagcagaagcaaaagctcagacttttgagcagtgtgaaacccaagacaggagagaagagtagagatgatgctttggaagccataaaaggaaatttagatgggttttccagagatgcaaaaatgcaccctactccagcatcgcaccccaagaaaccaggcccttccttggaggagaagttcctagtatcttgtgatataagtacatctgggcaggaacaaattaaattaaatacttctgaagttggccacaaagccctaggcccaggttccagtaagaagtatcccagtttaatggccagtaacggggttgctgtagatggatgtgtaagtggtaccaccactgcagaggcagaaaatacttcagatcaaaacctgtcaattgaagagagtggtgtgggagtatttccctcacaggatcctgctcagcccagaatgcctccttggatttacaatgagagtttggttccagatgcctataagaaaatcttagaaaccacaatgactccaactggaatagatactgccaaactgtatcccattctgatgtcatctgggcttcccagggaaactcttggacagatatgggccttagctaatcgaactacacctggcaaacttacaaaagaagaactttataccgttctagccatgatagcggtaacacagaggggcgttcctgcaatgagtcctgatgctttaaaccagttcccagcagctcctattccaactttaagtggcttttctatgactctgcctacaccggtgagtcagccaactgtgataccttcaggtcctgcgggctccatgcccctcagccttggacagccagtcatgggcattaaccttgttggaccagtgggtggagctgcagcccaggcttctagtggtttcataccaacctaccctgcaaatcaggtagtaaagccagaagaagatgacttccaggattttcaagatgcttctaagtcaggatcccttgatgactcattcagtgatttccaagagttgcctgcttcttcaaaaacaagtaactcccagcatggaaacagtgccccttctttgttgatgccacttcctggaactaaagcattgccttcaatggacaaatatgctgtgtttaaaggaattgcagctgacaagtcctctgaaaatactgttccacctggagatcctggtgataaatatagtgctttcagagaacttgaacagacagcagagaataaacctttaggagaaagctttgcagaattcagatctgcaggaactgatgatggtttcaccgattttaaaacagccgatagtgtatcaccactagagccaccaacaaaagacaaaacttttccaccatccttcccctcaggaactatacaacagaaacaacaaacacaagtgaaaaaccctctgaacttagcagacctagatatgttttcctcagttaattgcagcagcgagaaaccattgtctttttcagctgtgtttagcacatcaaaatcagtttctacaccacagtcaacaggttctgctgctactatgacagcattggcagcaacaaaaacttctagtttggctgatgattttggagaattcagcctttttggggaatattctggtctagcacctgttggggagcaggatgactttgcagattttatggctttcagtaatagctctatttcatctgagcaaaagccggatgacaaatatgatgcccttaaagaggaagccagtcctgttcctctaaccagcaacgtgggcagcacagtgaagggtggacaaaactcgactgctgcgtctaccaagtacgatgtcttcagacaactttctctggaagggtctggactaggtgttgaagacctgaaagataacactccttcaggaaaaagtgatgatgattttgctgacttccactccagtaaattttcttccataaactcggacaaatccctgggagagaaagcagtggctttcagacacaccaaagaagactctgcatcagtgaagtccttagatctcccttccattggtggcagcagtgttggcaaggaggactctgaagatgcactctctgttcagtttgacatgaaattggctgatgtgggaggagatcttaagcatgtcatgtctgatagctctttggatttaccaacagttagtggccagcatcctcctgctgcagatatagaggacttaaaatatgctgcttttggaagctacagtagcaattttgcagtgagcacacttacaagctatgactggtcagacagggatgatgcaactcagggcagaaaactctctccatttgtcctctcagcaggaagtggatccccctcagccacctcaattcttcaaaagaaagagacttcatttggcagttctgaaaacatcaccatgacatctctctccaaagtaacgacctttgtaagtgaagatgctcttccagagaccaccttcccagctcttgccagttttaaagacacgattcctcagaccagtgagcaaaaggaatatgaaaacagagactataaagatttcacaaaacaggacctgcctacggctgaacggagccaggaggccacgtgtcccagcccagcgtccagtggtgcctctcaagaaaccccgaacgaatgttcggatgactttggagagtttcaaagtgaaaagcccaaaatcagcaaatttgacttcttagtagccacttcacaaagcaaaatgaaatccagtgaagaaatgatcaaaagtgagctggcaacctttgacctttctgttcaaggatcacacaagaggagtttgagccttggtgataaagaaataagccgttcttctccttctccagctttggagcagcctttcagagaccgttccaatactctgaatgagaagcccgccctgcccgtcatccgagacaagtacaaagacctgacgggagaggtggaggaaaatgagagatatgcatatgaatggcagagatgcctggggagtgccctgaatgtcattaagaaggcaaatgataccttaaatggaatcagtagtagttctgtttgcacagaagtaattcagtcagctcaaggcatggaatatttattaggtgttgttgaagtgtacagggtaaccaagcgtgtggagctggggataaaagccactgcagtgtgcagtgagaaactccagcagttgctgaaggacatcgataaagtatggaataacctaatcggcttcatgtcactcgccacactcacaccagatgaaaactcgctggatttttcctcctgtatgttacggcctgggattaaaaatgctcaggagcttgcctgtggagtgtgcctcttgaatgtggactcgaggagccggaaagaagagaagcctgcagaagaacatcctaaaaaagcattcaactcagaaacagacagtttcaagctggcctatggagggcaccagtatcacgccagctgtgccaacttctggatcaactgtgtcgaaccaaagcctcctggcctcgtcctgcctgacctgctctgaacaactcctctgtgaagcattgacttttttttttctgtgacaccccacggggtgacagggaccaataaatagaatgcgagcactgcacagttcgcttccctgaatcgatatgaagaacaccgcaagggacggggcccccgtcatccccacggccagtctgcaggacttcaggtaaaattgtcccacccaaactgcacgtggcaccagaagcttgctcacttatctctacttaagattttctgaaatacggaccacggctttcttgatctaaggaagaacttgctgctgcagtattgaaactgtgaagaactgacatttgaagaaaaatagattaccgttgcgggactagaatgggcgactgcttggagccagtgcttgtttttatctaggacacttactgtcctgtgaagtagaatacatttatctgcatttagtttgttaatgtctgaaatgaataaaaagaggaaattgcgattaaactgatgttctgctttttatggagaagattctgcccatctcccctggacagtagcaggcaggtgagggcagattttacccacttggttgtcacaactgaaccagttctctactccttcccttcacttctgtccactctcaagactttttcccaaaacatgcctgggcactctgcagccgtgaagaatgctcattttgacagaggcccaaatcctgtgtattaggataatatccttccccccgggagccttcgctgcaaacctgttctgccgcatgcaaagactgtgaccatggagttttctcagacaagatttggaaaggcagtggaatgaaatctctttgcagtggcctctctccaaatttccaaagatgactgcatagggaccaacactgcctgactttgcagtatctgtgagaaaaacctgaaaattaattcagggtgaaaatgtggagctctcggcctagtgtaaagtatcaagatgtatatttatgggatagatacatgacttagaagaagtagaagaaaattgtccagaaacagtactgaattttagatagaaaaggctcatgcttcctggagtagggaattgtctttgccatttaatgtgaatgcataaaattaggggaaaaacccaagtggctaagagctgtgttattcctgggaagaactaccaatctagggcacacgtctctctgaattgttgattatgcgctttatgaagagatttttcaatctcgtgtgctttactttgtgtggtttagaccctctgacctagacttttatttttaaactgaaaaagttggtcttgtctatataattgctgcttttacataatttattttcccctctcaggacaaattctgtcttgctccatcttacagcttttccatgttctccaagaaaggtgtggaacattttcattaaacagctgttgctgaggcttctgcttgaccttctgcgtgcccgaatgcacagagaggcaccgaggagagaaaggcttttctcactcgctcccgatgataccgtctctggccattcctgactgaggcagctcactctgaatgggcacctttggagcttttgcccaccacaaggctagtggggtgtttctaacaacacaagtgggacagcttttggcaggcttttcctgaggcctcggcgcttccatcctggacagcaccacttccacatggagctggaatgcaagcaggctgctaattggccttaaaaattctttgtttttttttgagatggagtttcactcttgttgcccaggcttgagtgcaatggcacaatctcagctcagtgcaacctccgcctcccgggttcaagcgattctcctgcctcagcctcgtgagtagctgggattacaggcgtgcaccaccacgcccagctaattttgtatttttagtagaggcaaggtttctccatgttggccaggcttgaactccggacctcaggcgatccgcccgcctcagcctcccaaagtaccgggattacaggcgtgagccactgcgcctggcctaaatttcataacagaaccatgacagcagaatctacctttgcaataagaatgtttcccaggagttagagaccagccctgggcatgatggtaaagaccccagctaattatacaaaaaataattagccgggtaggtggagtgcatctgtggacattcgtggtcccagctactaggtaagctgaggcgggagatcacaagtccaggagtttgaggctgcacgtgacagcgtaggtgatgacagagcgagacactgtctcttaaaaaaaaaaaaaaaaaagtttcccagtttgaatttgtattgctgaagcatttttttgaaatgctatatagatgcctgtcatgtcacagtggcccagtatcaacattttaaaaagctcacttggtagctgggctggtttctattcctgagaaattccagaatgcctcagataaaattccttagtataatccccattttccttaccaaggatggtaggcttagtcactccttgggaggtgccacaggaaaattcagcagatgtcaacagaaaaaaagcctttgctatgaaaagtattcactacctttcatatctcttgaatacttgaaatgtttaattagatgccaccaatagggatccaaggagtgtgggacacggttgcgctgcttttctttataaacgtttattaaaatggctcaacgctgcattcagcttcacctcagctcttcttgtcagccaggagccccgtgtccttggaaactgtagccaaggttacttatttccatactgtgcattgtgtcagcccgcttcaccccactgcttgaatggccattaataagcacttttctttttttggtgggatgttttgcctttaaaatttttatggcttagtgtgtaatttaatttttgtctggacatgcttgagatagaagaggtactggatatatgaggatattttccatgctttatttttcctgtggctactagttagcattccataggggttgtgaatttttaattatttgaatattttgtgtacatatacatatttgaagggttttgggggggtcttatttgtttaaaggtgtcttctgtttgcctatttcaagtgtacttcagctttgcaaagattatagggctgtatgttacagaaataggaaatgctggccctgtactggggaccactacaaaaattccctttagccgggcgtggtggctcacgcctgtaatccccagcactttgggaggccgagccgggtggatcacccgaggtcaggagttcaagaccagcctggccaacatggcgagaccctgtctctactaaaaatacaaaaattagctgggcatggtggcaggtgcctgtaatccgagctactcgggaggctgaggcaggagaattgcttgaaccagagaggcggaggttgcagtgagccgagatcgcgccactgcactccagcctgggcaacaagagcgaaactctgtctcaaaaataaaaaattccctttaacaccttcaaggtcaaatgcctgcctttgtgaacagttaataaactgacattttcagacatttgccattcagaagggagcattgtagcctgctgtagaccattccagcaaatgtcagaatgcagggcaagatgtgtgtcgactatgttttttatgtttaagttacttacttatttcttcaggtaagtgtgtaccaaataacaatactgaaaagccctccccttgccaggccgaggaaataaagcttaagtgaaacagctcttgggggaaaaatgccactttacaaatacttttctaacaaaatagcattataatgaagtttttacttaattccattatttatatgttgacgtgaatgtaagtggttaaaaagtattcatgtgggacatctcattactttgtagctgtggctttattaaccagtgaatgctgtggcccttagcgaaatgcgttgtcttctgcgtgatgtggaattcgcgcctgtattttaaaagatggtgtggtttctcccttgtttgtattttaataaacaactgctctaattgatgtgtttagacattataaagctttacctttaaaatattttcagggtctgttctgaaatcaccccttgttaaacttctctaaccaaaatacaagtgtagaagaatgtcaggcta

SEQ ID NO: 188303 - DNA, 3406 bp, Homo sapiens; identical to SEQ ID NO: 188300
  Payload ID: 17055
  Gene Symbol: SYNRG
  Gene Name: synergin, gamma
  Uniprot ID: Q9UMZ2
  ENST ID: ENST00000614941
  CDS Start-End: 27-3353

SEQ ID NO: 188304 - DNA, 4841 bp, Homo sapiens
  Payload ID: 17055
  Gene Symbol: SYNRG
  Gene Name: synergin, gamma
  Uniprot ID: Q9UMZ2
  ENST ID: ENST00000618176
  CDS Start-End: 57-3731
gctgacagctgctgataaggtggcggcggcgaaggcagcggcaggtcgggagcaagatggcgctgcggccaggagctggttctggtggcggcggggccgcgggagctggcgcggggtccgccgggggaggcggcttcatgtttcctgttgcaggtgggataagaccccctcaagcaggcctgatgccgatgcagcaacaaggatttcctatggtctctgtcatgcagcctaatatgcaaggcattatgggaatgaattacagctctcagatgtcccaaggacctattgctatgcaggcaggaataccaatgggaccaatgccagcagcgggaatgccttacctaggacaagcacccttcctgggcatgcgtcctccaggcccacagtacactccagacatgcagaagcagtttgccgaagagcagcagaaacgatttgaacagcagcaaaaactcttagaagaagaaagaaaaagacgccagtttgaagagcagaagcaaaagctcagacttttgagcagtgtgaaacccaagacaggagagaagagtagagatgatgctttggaagccataaaaggaaatttagatgggttttccagagatgcaaaaatgcaccctactccagcatcgcaccccaagaaaccaggtgtgggagtatttccctcacaggatcctgctcagcccagaatgcctccttggatttacaatgagagtttggttccagatgcctataagaaaatcttagaaaccacaatgactccaactggaatagatactgccaaactgtatcccattctgatgtcatctgggcttcccagggaaactcttggacagatatgggccttagctaatcgaactacacctggcaaacttacaaaagaagaactttataccgttctagccatgatagcggtaacacagaggggcgttcctgcaatgagtcctgatgctttaaaccagttcccagcagctcctattccaactttaagtggcttttctatgactctgcctacaccggtgagtcagccaactgtgataccttcaggtcctgcgggctccatgcccctcagccttggacagccagtcatgggcattaaccttgttggaccagtgggtggagctgcagcccaggcttctagtggtttcataccaacctaccctgcaaatcaggtagtaaagccagaagaagatgacttccaggattttcaagatgcttctaagtcaggatcccttgatgactcattcagtgatttccaagagttgcctgcttcttcaaaaacaagtaactcccagcatggaaacagtgccccttctttgttgatgccacttcctggaactaaagcattgccttcaatggacaaatatgctgtgtttaaaggaattgcagctgacaagtcctctgaaaatactgttccacctggagatcctggtgataaatatagtgctttcagagaacttgaacagacagcagagaataaacctttaggagaaagctttgcagaattcagatctgcaggaactgatgatggtttcaccgattttaaaacagccgatagtgtatcaccactagagccaccaacaaaagacaaaacttttccaccatccttcccctcaggaactatacaacagaaacaacaaacacaagtgaaaaaccctctgaacttagcagacctagatatgttttcctcagttaattgcagcagcgagaaaccattgtctttttcagctgtgtttagcacatcaaaatcagtttctacaccacagtcaacaggttctgctgctactatgacagcattggcagcaacaaaaacttctagtttggctgatgattttggagaattcagcctttttggggaatattctggtctagcacctgttggggagcaggatgactttgcagattttatggctttcagtaatagctctatttcatctgagcaaaagccggatgacaaatatgatgcccttaaagaggaagccagtcctgttcctctaaccagcaacgtgggcagcacagtgaagggtggacaaaactcgactgctgcgtctaccaagtacgatgtcttcagacaactttctctggaagggtctggactaggtgttgaagacctgaaagataacactccttcaggaaaaagtgatgatgattttgctgacttccactccagtaaattttcttccataaactcggacaaatccctgggagagaaagcagtggctttcagacacaccaaagaagactctgcatcagtgaagtccttagatctcccttccattggtggcagcagtgttggcaaggaggactctgaagatgcactctctgttcagtttgacatgaaattggctgatgtgggaggagatcttaagcatgtcatgtctgatagctctttggatttaccaacagttagtggccagcatcctcctgctgcagatatagaggacttaaaatatgctgcttttggaagctacagtagcaattttgcagtgagcacacttacaagctatgactggtcagacagggatgatgcaactcagggcagaaaactctctccatttgtcctctcagcaggaagtggatccccctcagccacctcaattcttcaaaagaaagagacttcatttggcagttctgaaaacatcaccatgacatctctctccaaagtaacgacctttgtaagtgaagatgctcttccagagaccaccttcccagctcttgccagttttaaagacacgattcctcagaccagtgagcaaaaggaatatgaaaacagagactataaagatttcacaaaacaggacctgcctacggctgaacggagccaggaggccacgtgtcccagcccagcgtccagtggtgcctctcaagaaaccccgaacgaatgttcggatgactttggagagtttcaaagtgaaaagcccaaaatcagcaaatttgacttcttagtagccacttcacaaagcaaaatgaaatccagtgaagaaatgatcaaaagtgagctggcaacctttgacctttctgttcaaggatcacacaagaggagtttgagccttggtgataaagaaataagccgttcttctccttctccagctttggagcagcctttcagagaccgttccaatactctgaatgagaagcccgccctgcccgtcatccgagacaagtacaaagacctgacgggagaggtggaggaaaatgagagatatgcatatgaatggcagagatgcctggggagtgccctgaatgtcattaagaaggcaaatgataccttaaatggaatcagtagtagttctgtttgcacagaagtaattcagtcagctcaaggcatggaatatttattaggtgttgttgaagtgtacagggtaaccaagcgtgtggagctggggataaaagccactgcagtgtgcagtgagaaactccagcagttgctgaaggacatcgataaagtatggaataacctaatcggcttcatgtcactcgccacactcacaccagatgaaaactcgctggatttttcctcctgtatgttacggcctgggattaaaaatgctcaggagcttgcctgtggagtgtgcctcttgaatgtggactcgaggagccgggcattcaactcagaaacagacagtttcaagctggcctatggagggcaccagtatcacgccagctgtgccaacttctggatcaactgtgtcgaaccaaagcctcctggcctcgtcctgcctgacctgctctgaacaactcctctgtgaagcattgacttttttttttctgtgacaccccacggggtgacagggaccaataaatagaatgcgagcactgcacagttcgcttccctgaatcgatatgaagaacaccgcaagggacggggcccccgtcatccccacggccagtctgcaggacttcaggtaaaattgtcccacccaaactgcacgtggcaccagaagcttgctcacttatctctacttaagattttctgaaatacggaccacggctttcttgatctaaggaagaacttgctgctgcagtattgaaactgtgaagaactgacatttgaagaaaaatagattaccgttgcgggactagaatgggcgactgcttggagccagtgcttgtttttatctaggacacttactgtcctgtgaagtagaatacatttatctgcatttagtttgttaatgtctgaaatgaataaaaagaggaaattgcgattaaactgatgttctgctttttatggagaagattctgcccatctcccctggacagtagcaggcaggtgagggcagattttacccacttggttgtcacaactgaaccagttctctactccttcccttcacttctgtccactctcaagactttttcccaaaacatgcctgggcactctgcagccgtgaagaatgctcattttgacagaggcccaaatcctgtgtattaggataatatccttccccccgggagccttcgctgcaaacctgttctgccgcatgcaaagactgtgaccatggagttttctcagacaagatttggaaaggcagtggaatgaaatctctttgcagtggcctctctccaaatttccaaagatgactgcatagggaccaacactgcctgactttgcagtatctgtgagaaaaacctgaaaattaattcagggtgaaaatgtggagctctcggcctagtgtaaagtatcaagatgtatatttatgggatagatacatgacttagaagaagtagaagaaaattgtccagaaacagtactgaattttagatagaaaaggctcatgcttcctggagtagggaattgtctttgccatttaatgtgaatgcataaaattaggggaaaaacc

SEQ ID NO: 188305 - DNA, 485 bp, Homo sapiens
  Payload ID: 17055
  Gene Symbol: SYNRG
  Gene Name: synergin, gamma
  ENST ID: ENST00000620424
  CDS Start-End: 110-485
cccatcgcccggtccgcggcgaggtggggcctggtgtttgacccggaagtggctgtgttcagctgacagctgctgataaggtggcggcggcgaaggcagcggcagcttcatgtttcctgttgcaggtgggataagaccccctcaaggcctgatgccgatgcagcaacaaggatttcctatggtctctgtcatgcagcctaatatgcaaggcattatgggaatgaattacagctctcagatgtcccaaggacctattgctatgcaggcaggaataccaatgggaccaatgccagcagcgggaatgccttacctaggacaagcacccttcctgggcatgcgtcctccaggcccacagtacactccagacatgcagaagcagtttgccgaagagcagcagaaacgatttgaacagcagcaaaaactcttagaagaagaaagaaaaagacgccagtttgaagagcagaagcaaaagctcagacttttga

SEQ ID NO: 188306 - DNA, 709 bp, Homo sapiens
  Payload ID: 17055
  Gene Symbol: SYNRG
  Gene Name: synergin, gamma
  ENST ID: ENST00000614196
  CDS Start-End: 1-709
gagacttcatttggcagttctgaaaacatcaccatgacatctctctccaaagtaacgacctttgtaagtgaagatgctcttccagagaccaccttcccagctcttgccagttttaaagacacgattcctcagaccagtgagcaaaaggaatatgaaaacagagactataaagatttcacaaaacaggacctgcctacggctgaacggagccaggaggccacgtgtcccagcccagcgtccagtggtgcctctcaagaaaccccgaacgaatgttcggatgactttggagagtttcaaagtgaaaagcccaaaatcagcaaatttgacttcttagtagccacttcacaaagcaaaatgaaatccagtgaagaaatgatcaaaagtgagctggcaacctttgacctttctgttcaagctttggagcagcctttcagagaccgttccaatactctgaatgagaagcccgccctgcccgtcatccgagacaagtacaaagacctgacgggagaggtggaggaaaatgagagatatgcatatgaatggcagagatgcctggggagtgccctgaatgtcattaagaaggcaaatgataccttaaatggaatcagtagtagttctgtttgcacagaagtaattcagtcagctcaaggcatggaatatttattaggtgttgttgaagtgtacagggtaaccaagcgtgtggagctgg

SEQ ID NO: 188307 - DNA, 4050 bp, Homo sapiens
  Payload ID: 17055
  Gene Symbol: SYNRG
  Gene Name: synergin, gamma
  Uniprot ID: Q9UMZ2
  ENST ID: ENST00000616179
  CDS Start-End: 32-3571
gcggcgaaggcagcggcaggtcgggagcaagatggcgctgcggccaggagctggttctggtggcggcggggccgcgggagctggcgcggggtccgccgggggaggcggcttcatgtttcctgttgcaggtgggataagaccccctcaagcaggcctgatgccgatgcagcaacaaggatttcctatggtctctgtcatgcagcctaatatgcaaggcattatgggaatgaattacagctctcagatgtcccaaggacctattgctatgcaggcaggaataccaatgggaccaatgccagcagcgggaatgccttacctaggacaagcacccttcctgggcatgcgtcctccaggcccacagtacactccagacatgcagaagcagtttgccgaagagcagcagaaacgatttgaacagcagcaaaaactcttagaagaagaaagaaaaagacgccagtttgaagagcagaagcaaaagctcagacttttgagcagtgtgaaacccaagacaggagagaagagtagagatgatgctttggaagccataaaaggaaatttagatgggttttccagagatgcaaaaatgcaccctactccagcatcgcaccccaagaaaccaggtgtgggagtatttccctcacaggatcctgctcagcccagaatgcctccttggatttacaatgagagtttggttccagatgcctataagaaaatcttagaaaccacaatgactccaactggaatagatactgccaaactgtatcccattctgatgtcatctgggcttcccagggaaactcttggacagatatgggccttagctaatcgaactacacctggcaaacttacaaaagaagaactttataccgttctagccatgatagcggtaacacagaggggcgttcctgcaatgagtcctgatgctttaaaccagttcccagcagctcctattccaactttaagtggcttttctatgactctgcctacaccggtgagtcagccaactgtgataccttcaggtcctgcgggctccatgcccctcagccttggacagccagtcatgggcattaaccttgttggaccagtgggtggagctgcagcccaggcttctagtggtttcataccaacctaccctgcaaatcaggtagtaaagccagaagaagatgacttccaggattttcaagatgcttctaagtcaggatcccttgatgactcattcagtgatttccaagagttgcctgcttcttcaaaaacaagtaactcccagcatggaaacagtgccccttctttgttgatgccacttcctggaactaaagcattgccttcaatggacaaatatgctgtgtttaaaggaattgcagctgacaagtcctctgaaaatactgttccacctggagatcctggtgataaatatagtgctttcagagaacttgaacagacagcagagaataaacctttaggagaaagctttgcagaattcagatctgcaggaactgatgatggtttcaccgattttaaaacagccgatagtgtatcaccactagagccaccaacaaaagacaaaacttttccaccatccttcccctcaggaactatacaacagaaacaacaaacacaagtgaaaaaccctctgaacttagcagacctagatatgttttcctcagttaattgcagcagcgagaaaccattgtctttttcagctgtgtttagcacatcaaaatcagtttctacaccacagtcaacaggttctgctgctactatgacagcattggcagcaacaaaaacttctagtttggctgatgattttggagaattcagcctttttggggaatattctggtctagcacctgttggggagcaggatgactttgcagattttatggctttcagtaatagctctatttcatctgagcaaaagccggatgacaaatatgatgcccttaaagaggaagccagtcctgttcctctaaccagcaacgtgggcagcacagtgaagggtggacaaaactcgactgctgcgtctaccaagtacgatgtcttcagacaactttctctggaagggtctggactaggtgttgaagacctgaaagataacactccttcaggaaaaagtgatgatgattttgctgacttccactccagtaaattttcttccataaactcggacaaatccctgggagagaaagcagtggctttcagacacaccaaagaagactctgcatcagtgaagtccttagatctcccttccattggtggcagcagtgttggcaaggaggactctgaagatgcactctctgttcagtttgacatgaaattggctgatgtgggaggagatcttaagcatgtcatgtctgatagctctttggatttaccaacagttagtggccagcatcctcctgctgcagcaggaagtggatccccctcagccacctcaattcttcaaaagaaagagacttcatttggcagttctgaaaacatcaccatgacatctctctccaaagtaacgacctttgtaagtgaagatgctcttccagagaccaccttcccagctcttgccagttttaaagacacgattcctcagaccagtgagcaaaaggaatatgaaaacagagactataaagatttcacaaaacaggacctgcctacggctgaacggagccaggaggccacgtgtcccagcccagcgtccagtggtgcctctcaagaaaccccgaacgaatgttcggatgactttggagagtttcaaagtgaaaagcccaaaatcagcaaatttgacttcttagtagccacttcacaaagcaaaatgaaatccagtgaagaaatgatcaaaagtgagctggcaacctttgacctttctgttcaaggatcacacaagaggagtttgagccttggtgataaagaaataagccgttcttctccttctccagctttggagcagcctttcagagaccgttccaatactctgaatgagaagcccgccctgcccgtcatccgagacaagtacaaagacctgacgggagaggtggaggaaaatgagagatatgcatatgaatggcagagatgcctggggagtgccctgaatgtcattaagaaggcaaatgataccttaaatggaatcagtagtagttctgtttgcacagaagtaattcagtcagctcaaggcatggaatatttattaggtgttgttgaagtgtacagggtaaccaagcgtgtggagctggggataaaagccactgcagtgtgcagtgagaaactccagcagttgctgaaggacatcgataaagtatggaataacctaatcggcttcatgtcactcgccacactcacaccagatgaaaactcgctggatttttcctcctgtatgttacggcctgggattaaaaatgctcaggagcttgcctgtggagtgtgcctcttgaatgtggactcgaggagccgggcattcaactcagaaacagacagtttcaagctggcctatggagggcaccagtatcacgccagctgtgccaacttctggatcaactgtgtcgaaccaaagcctcctggcctcgtcctgcctgacctgctctgaacaactcctctgtgaagcattgacttttttttttctgtgacaccccacggggtgacagggaccaataaatagaatgcgagcactgcacagttcgcttccctgaatcgatatgaagaacaccgcaagggacggggcccccgtcatccccacggccagtctgcaggacttcaggtaaaattgtcccacccaaactgcacgtggcaccagaagcttgctcacttatctctacttaagattttctgaaatacggaccacggctttcttgatctaaggaagaacttgctgctgcagtattgaaactgtgaagaactgacatttgaagaaaaatagattaccgttgcgggactagaatgggcgactgcttggagccagtgcttgtttttatctaggacacttactgtcctgtgaagtagaatacatttatctgcatttagtttgttaatgtctgaaatgaataaaaagaggaaattgcgattaaa

SEQ ID NO: 188308 - DNA, 3859 bp, Homo sapiens
  Payload ID: 17055
  Gene Symbol: SYNRG
  Gene Name: synergin, gamma
  Uniprot ID: Q9UMZ2
  ENST ID: ENST00000622045
  CDS Start-End: 27-3806
gaaggcagcggcaggtcgggagcaagatggcgctgcggccaggagctggttctggtggcggcggggccgcgggagctggcgcggggtccgccgggggaggcggcttcatgtttcctgttgcaggtgggataagaccccctcaagcaggcctgatgccgatgcagcaacaaggatttcctatggtctctgtcatgcagcctaatatgcaaggcattatgggaatgaattacagctctcagatgtcccaaggacctattgctatgcaggcaggaataccaatgggaccaatgccagcagcgggaatgccttacctaggacaagcacccttcctgggcatgcgtcctccaggcccacagtacactccagacatgcagaagcagtttgccgaagagcagcagaaacgatttgaacagcagcaaaaactcttagaagaagaaagaaaaagacgccagtttgaagagcagaagcaaaagctcagacttttgagcagtgtgaaacccaagacaggagagaagagtagagatgatgctttggaagccataaaaggaaatttagatgggttttccagagatgcaaaaatgcaccctactccagcatcgcaccccaagaaaccaggtgtgggagtatttccctcacaggatcctgctcagcccagaatgcctccttggatttacaatgagagtttggttccagatgcctataagaaaatcttagaaaccacaatgactccaactggaatagatactgccaaactgtatcccattctgatgtcatctgggcttcccagggaaactcttggacagatatgggccttagctaatcgaactacacctggcaaacttacaaaagaagaactttataccgttctagccatgatagcggtaacacagaggggcgttcctgcaatgagtcctgatgctttaaaccagttcccagcagctcctattccaactttaagtggcttttctatgactctgcctacaccggtgagtcagccaactgtgataccttcaggtcctgcgggctccatgcccctcagccttggacagccagtcatgggcattaaccttgttggaccagtgggtggagctgcagcccaggcttctagtggtttcataccaacctaccctgcaaatcaggtagtaaagccagaagaagatgacttccaggattttcaagatgcttctaagtcaggatcccttgatgactcattcagtgatttccaagagttgcctgcttcttcaaaaacaagtaactcccagcatggaaacagtgccccttctttgttgatgccacttcctggaactaaagcattgccttcaatggacaaatatgctgtgtttaaaggaattgcagctgacaagtcctctgaaaatactgttccacctggagatcctggtgataaatatagtgctttcagagaacttgaacagacagcagagaataaacctttaggagaaagctttgcagaattcagatctgcaggaactgatgatggtttcaccgattttaaaacagccgatagtgtatcaccactagagccaccaacaaaagacaaaacttttccaccatccttcccctcaggaactatacaacagaaacaacaaacacaagtgaaaaaccctctgaacttagcagacctagatatgttttcctcagttaattgcagcagcgagaaaccattgtctttttcagctgtgtttagcacatcaaaatcagtttctacaccacagtcaacaggttctgctgctactatgacagcattggcagcaacaaaaacttctagtttggctgatgattttggagaattcagcctttttggggaatattctggtctagcacctgttggggagcaggatgactttgcagattttatggctttcagtaatagctctatttcatctgagcaaaagccggatgacaaatatgatgcccttaaagaggaagccagtcctgttcctctaaccagcaacgtgggcagcacagtgaagggtggacaaaactcgactgctgcgtctaccaagtacgatgtcttcagacaactttctctggaagggtctggactaggtgttgaagacctgaaagataacactccttcaggaaaaagtgatgatgattttgctgacttccactccagtaaattttcttccataaactcggacaaatccctgggagagaaagcagtggctttcagacacaccaaagaagactctgcatcagtgaagtccttagatctcccttccattggtggcagcagtgttggcaaggaggactctgaagatgcactctctgttcagtttgacatgaaattggctgatgtgggaggagatcttaagcatgtcatgtctgatagctctttggatttaccaacagttagtggccagcatcctcctgctgcagatatagaggacttaaaatatgctgcttttggaagctacagtagcaattttgcagtgagcacacttacaagctatgactggtcagacagggatgatgcaactcagggcagaaaactctctccatttgtcctctcagcaggaagtggatccccctcagccacctcaattcttcaaaagaaagagacttcatttggcagttctgaaaacatcaccatgacatctctctccaaagtaacgacctttgtaagtgaagatgctcttccagagaccaccttcccagctcttgccagttttaaagacacgattcctcagaccagtgagcaaaaggaatatgaaaacagagactataaagatttcacaaaacaggacctgcctacggctgaacggagccaggaggccacgtgtcccagcccagcgtccagtggtgcctctcaagaaaccccgaacgaatgttcggatgactttggagagtttcaaagtgaaaagcccaaaatcagcaaatttgacttcttagtagccacttcacaaagcaaaatgaaatccagtgaagaaatgatcaaaagtgagctggcaacctttgacctttctgttcaaggatcacacaagaggagtttgagccttggtgataaagaaataagccgttcttctccttctccagctttggagcagcctttcagagaccgttccaatactctgaatgagaagcccgccctgcccgtcatccgagacaagtacaaagacctgacgggagaggtggaggaaaatgagagatatgcatatgaatggcagagatgcctggggagtgccctgaatgtcattaagaaggcaaatgataccttaaatggaatcagtagtagttctgtttgcacagaagtaattcagtcagctcaaggcatggaatatttattaggtgttgttgaagtgtacagggtaaccaagcgtgtggagctggggataaaagccactgcagtgtgcagtgagaaactccagcagttgctgaaggacatcgataaagtatggaataacctaatcggcttcatgtcactcgccacactcacatgctgctgggaaaagatgactgtgattacaaagcatctctctccttaccatgagctcttagaagaaaagccagatgaaaactcgctggatttttcctcctgtatgttacggcctgggattaaaaatgctcaggagcttgcctgtggagtgtgcctcttgaatgtggactcgaggagccggaaagaagagaagcctgcagaagaacatcctaaaaaagcattcaactcagaaacagacagtttcaagctggcctatggagggcaccagtatcacgccagctgtgccaacttctggatcaactgtgtcgaaccaaagcctcctggcctcgtcctgcctgacctgctctgaacaactcctctgtgaagcattgacttttttttttctgtgacaccccacggggt

SEQ ID NO: 188309 - DNA, 3859 bp, Homo sapiens; identical to SEQ ID NO: 188308
  Payload ID: 17055
  Gene Symbol: SYNRG
  Gene Name: synergin, gamma
  Uniprot ID: Q9UMZ2
  ENST ID: ENST00000613407
  CDS Start-End: 27-3806

SEQ ID NO: 188310 - DNA, 8229 bp, Homo sapiens; identical to SEQ ID NO: 188302
  Payload ID: 17055
  Gene Symbol: SYNRG
  Gene Name: synergin, gamma
  Uniprot ID: Q9UMZ2
  ENST ID: ENST00000612223
  CDS Start-End: 142-4086

SEQ ID NO: 188311 - DNA, 4841 bp, Homo sapiens; identical to SEQ ID NO: 188304
  Payload ID: 17055
  Gene Symbol: SYNRG
  Gene Name: synergin, gamma
  Uniprot ID: Q9UMZ2
  ENST ID: ENST00000621136
  CDS Start-End: 57-3731

SEQ ID NO: 188312 - DNA, 4050 bp, Homo sapiens; identical to SEQ ID NO: 188307
  Payload ID: 17055
  Gene Symbol: SYNRG
  Gene Name: synergin, gamma
  Uniprot ID: Q9UMZ2
  ENST ID: ENST00000632841
  CDS Start-End: 32-3571

SEQ ID NO: 188313 - DNA, 485 bp, Homo sapiens; identical to SEQ ID NO: 188305
  Payload ID: 17055
  Gene Symbol: SYNRG
  Gene Name: synergin, gamma
  ENST ID: ENST00000632310
  CDS Start-End: 110-485

SEQ ID NO: 188314 - DNA, 3787 bp, Homo sapiens; identical to SEQ ID NO: 188299
  Payload ID: 17055
  Gene Symbol: SYNRG
  Gene Name: synergin, gamma
  Uniprot ID: Q9UMZ2
  ENST ID: ENST00000633429
  CDS Start-End: 27-3734

SEQ ID NO: 188315 - DNA, 527 bp, Homo sapiens
  Payload ID: 17055
  Gene Symbol: SYNRG
  Gene Name: synergin, gamma
  ENST ID: ENST00000633203
  CDS Start-End: 1-323
agcaaaaactcttagaagaagaaagaaaaagacgccagtttgaagagcagaagcaaaagctcagacttttgagcagtgtgaaacccaagacaggagagaagagtagagatgatgctttggaagccataaaaggaaatttagatgggttttccagagatgcaaaaatgcaccctactccagcatcgcaccccaagaaaccaggtagttttaagaggcattatatttttcttttctgggaaggtgatttatgtagtccctgtttctttacctcgccattatatgtgtgtgtgaaaagtcaatgtagaactcttccttcaagctaagtacagatttggatgttctcaaatatacagtggcttaagagctctggtctggataacaactgtcttgggaggaaaaaacctctttgtcttctaagtaaatatcagtatgacaatttcacctgtaagttttctgtatataaatatgttaacattagtaaaatctattcactcagagcaaatgtaataaaggagtttaccatttaa

SEQ ID NO: 188316 - DNA, 656 bp, Homo sapiens
  Payload ID: 17056
  Gene Symbol: SYNJ2BP-COX16
  Gene Name: SYNJ2BP-COX16 readthrough
  ENST ID: ENST00000618385
  CDS Start-End: 22-144
aagccagacgagctgtaaaacatgaacggaagagtggattatttggtcactgaggaagagatcaatcttaccagagggccctcaggtaaatggccaagacctaaagaacctgctgcaccaggatgctgtagacctctttcgtaatgcaggctatgctgtgtctctgagagtgcagcacaggttacaggtgcagaatggacctataggacatcgaggtgaaggggacccaagtggtattcccatatttatggtgctggtgccagtgtttgccctcaccatggtagcagcctgggctttcatgagataccggcaacaactttgaaaaacttgctctctttcaatactcccaatgaagatacatttcactcaccctccacccctgctattctgccatgtctttccctctctctgcatagccagatttgaagtgactgatacccaccccaaaccttgctgttcacagtctccaattcttcatattctaatgggaaagtaaagcggaaaccattcactaaggaccgagcaccaaataaccaaggaaaaggaagtgagttaaggacgtactcgtcttggtgagagcgtgagctgctgagatttgggagtctgcgctaggcccgcttggagttctgagccgatggaagagttcactcatgttt

SEQ ID NO: 188317 - DNA, 580 bp, Homo sapiens
  Payload ID: 17056
  Gene Symbol: SYNJ2BP-COX16
  Gene Name: SYNJ2BP-COX16 readthrough
  ENST ID: ENST00000617196
  CDS Start-End: 22-580
aagccagacgagctgtaaaacatgaacggaagagtggattatttggtcactgaggaagagatcaatcttaccagagggccctcagggctgggcttcaacatcgtcggtgggacagatcagcagtatgtctccaacgacagtggcatctacgtcagccgcatcaaagaaaatggggctgcggccctggatgggcggctccaggagggtgataagatcctttcggtaaatggccaagacctaaagaacctgctgcaccaggatgctgtagacctctttcgtaatgcaggctatgctgtgtctctgagagtgcagcacaggttacaggtgcagaatggacctataggacatcgaggtgaaggggacccaagtggtattcccatatttatggtgctggtgccagtgtttgccctcaccatgatggatcctgagcttgaaaaaaaactgaaagagaataaaatatctttagagtcggaatatgagaaaatcaaagactccaagtttgatgactggaagaatattcgaggacccaggccttgggaagatcctgacctcctccaaggaagaaatccagaaagcctta

SEQ ID NO: 188318 - DNA, 318 bp, Homo sapiens
  Payload ID: 17056
  Gene Symbol: SYNJ2BP-COX16
  Gene Name: SYNJ2BP-COX16 readthrough
  ENST ID: ENST00000555276
  CDS Start-End: 158-318
aagccagacgagctgtaaaacatgaacggaagagtggattatttggtcactgaggaagagatcaatcttaccagagggccctcagttgctgattgttggaggttcttttggtcttcgtgagttttctcaaatccgatatgatgctgtgaagagtaaaatggatcctgagcttgaaaaaaaactgaaagagaataaaatatctttagagtcggaatatgagaaaatcaaagactccaagtttgatgactggaagaatattcgaggacccaggccttgggaagatcctgacctcctccaaggaagaaatccagaaagcct

SEQ ID NO: 188319 - DNA, 929 bp, Homo sapiens
  Payload ID: 17056
  Gene Symbol: SYNJ2BP-COX16
  Gene Name: SYNJ2BP-COX16 readthrough
  ENST ID: ENST00000621525
  CDS Start-End: 112-660
ggctgctgaaaccgaaaccgctgtgctgtgggcgcagcgccgagattgattcaccttcacctgtgctgcactccagctgacccaagtaggaagccagacgagctgtaaaacatgaacggaagagtggattatttggtcactgaggaagagatcaatcttaccagagggccctcagggctgggcttcaacatcgtcggtgggacagatcagcagtatgtctccaacgacagtggcatctacgtcagccgcatcaaagaaaatggggctgcggccctggatgggcggctccaggagggtgataagatcctttcggtaaatggccaagacctaaagaacctgctgcaccaggatgctgtagacctctttcgtaatgcaggctatgctgtgtctctgagagtgcagcacaggttgctgattgttggaggttcttttggtcttcgtgagttttctcaaatccgatatgatgctgtgaagagtaaaatggatcctgagcttgaaaaaaaactgaaagagaataaaatatctttagagtcggaatatgagaaaatcaaagactccaagtttgatgactggaagaatattcgaggacccaggccttgggaagatcctgacctcctccaaggaagaaatccagaaagccttaagactaagacaacttgactctgctgattcttttttccttttttttttttttaaataaaaatattattaactggacttcctaatatatacttctatcaagtggaaaggaaattccaggcccatggaaacttggatatgggtaatttgatgacaaataatcttcactaaaggtcatgtacaggtttttatacttcccagctattccatctgtggatgaaagtaacaatgttggccacgtatattttacacctcgaaataaaaaatgtgaatactgctccaaaaacaga

SEQ ID NO: 188320 - DNA, 479 bp, Homo sapiens
  Payload ID: 17056
  Gene Symbol: SYNJ2BP-COX16
  Gene Name: SYNJ2BP-COX16 readthrough
  ENST ID: ENST00000617124
  CDS Start-End: 22-479
aagccagacgagctgtaaaacatgaacggaagagtggattatttggtcactgaggaagagatcaatcttaccagagggccctcagggctgggcttcaacatcgtcggtgggacagatcagcagtatgtctccaacgacagtggcatctacgtcagccgcatcaaagaaaatggggctgcggccctggatgggcggctccaggagggtgataagatcctttcggtaaatggccaagacctaaagaacctgctgcaccaggatgctgtagacctctttcgtaatgcaggctatgctgtgtctctgagagtgcagcacaggatggatcctgagcttgaaaaaaaactgaaagagaataaaatatctttagagtcggaatatgagaaaatcaaagactccaagtttgatgactggaagaatattcgaggacccaggccttgggaagatcctgacctcctccaaggaagaaatccagaaagcct

SEQ ID NO: 188321 - DNA, 3048 bp, Homo sapiens
  Payload ID: 17057
  Gene Symbol: SYVN1
  Gene Name: synovial apoptosis inhibitor 1, synoviolin
  Uniprot ID: Q86TM6
  ENST ID: ENST00000294256
  CDS Start-End: 95-1945
gggggtggggagtgttgttaaccggaggggcagccgcagtcgcgcggattgagcgggctcgcggcgctgggttcctggtctccgggccagggcaatgttccgcacggcagtgatgatggcggccagcctggcgctgaccggggctgtggtggctcacgcctactacctcaaacaccagttctaccccactgtggtgtacctgaccaagtccagccccagcatggcagtcctgtacatccaggcctttgtccttgtcttccttctgggcaaggtgatgggcaaggtgttctttgggcaactgagggcagcagagatggagcaccttctggaacgttcctggtacgccgtcacagagacttgtctggccttcaccgtttttcgggatgacttcagcccccgctttgttgcactcttcactcttcttctcttcctcaaatgtttccactggctggctgaggaccgtgtggactttatggaacgcagccccaacatctcctggctctttcactgccgcattgtctctcttatgttcctcctgggcatcctggacttcctcttcgtcagccacgcctatcacagcatcctgacccgtggggcctctgtgcagctggtgtttggctttgagtatgccatcctgatgacgatggtgctcaccatcttcatcaagtatgtgctgcactccgtggacctccagagtgagaacccctgggacaacaaggctgtgtacatgctctacacagagctgtttacaggcttcatcaaggttctgctgtacatggccttcatgaccatcatgatcaaggtgcacaccttcccactctttgccatccggcccatgtacctggccatgagacagttcaagaaagctgtgacagatgccatcatgtctcgccgagccatccgcaacatgaacaccctgtatccagatgccaccccagaggagctccaggcaatggacaatgtctgcatcatctgccgagaagagatggtgactggtgccaagagactgccctgcaaccacattttccataccagctgcctgcgctcctggttccagcggcagcagacctgccccacctgccgtatggatgtccttcgtgcatcgctgccagcgcagtcaccaccacccccggagcctgcggatcaggggccaccccctgccccccaccccccaccactcttgcctcagccccccaacttcccccagggcctcctgcctccttttcctccaggcatgttcccactgtggccccccatgggcccctttccacctgtcccgcctccccccagctcaggagaggctgtggctcctccatccaccagtgcagccctttctcggcccagtggagcagctacaaccacagctgctggcaccagtgctactgctgcttctgccacagcatctggcccaggctctggctctgccccagaggctggccctgcccctggtttccccttccctcctccctggatgggtatgcccctgcctccaccctttgccttccccccaatgcctgtgccccctgcgggctttgctgggctgaccccagaggagctacgagctctggagggccatgagcggcagcacctggaggcccggctgcagagcctgcgtaacatccacacactgctggacgccgccatgctgcagatcaaccagtacctcaccgtgctggcctccttggggcccccccggcctgccacttcagtcaactccactgaggagactgccactacagttgttgctgctgcctcctccaccagcatccctagctcagaggccacgaccccaaccccaggagcctccccaccagcccctgaaatggaaaggcctccagctcctgagtcagtgggcacagaggagatgcctgaggatggagagcccgatgcagcagagctccgccggcgccgcctgcagaagctggagtctcctgttgcccactgacactgccccagcccagccccagcctctgctcttttgagcagccctcgctggaacatgtcctgccaccaagtgccagctccctctctgtctgcaccagggagtagtacccccagctctgagaaagaggcggcatcccctaggccaagtggaaagaggctggggttcccatttgactccagtcccaggcagccatggggatctcgggtcagttccagccttcctctccaactcttcagccctgtgttctgctggggccatgaaggcagaaggtttagcctctgagaagccctcttcttcccccacccctttccaggagaaggggctgcccctccaagccctacttgtatgtgcggagtcacactgcagtgccgaacagtattagctcccgttcccaagtgtggactccagaggggctggaggcaagctatgaacttgctcgctggcccacccctaagactggtacccatttccttttcttaccctgatctccccagaagcctcttgtggtggtggctgtgccccctatgccctgtggcatttctgcgtcttactggcaaccacacaactcagggaaaggaatgcctgggagtgggggtgcaggcgggcagcactgagggaccctgccccgcccctccccccaggcccctttcctctgcagcttctcaagtgagactgacctgtctcacccagcagccactgcccagccgcactccaggcaagggccagtgcgcctgctcctgaccactgcaatcccagcgcccaaggaaggccacttctcaactggcagaacttctgaagtttagaattggaattacttccttactagtgtcttttggcttaaattttgtcttttgaagttgaatgcttaatcccgggaaagaggaacaggagtgccagactcctggtctttccagtttagaaaaggctctgtgccaaggagggaccacaggagctgggacctgcctgcccctgtcttttccccttggttttgtgttacaagagttgttggagacagtttcagatgattatttaatttgtaaatattgtacaaattttaatagcttaaattgtatatacagccaaataaaaacttgcattaacaa

SEQ ID NO: 188322 - DNA, 2841 bp, Homo sapiens
  Payload ID: 17057
  Gene Symbol: SYVN1
  Gene Name: synovial apoptosis inhibitor 1, synoviolin
  Uniprot ID: Q86TM6
  ENST ID: ENST00000307289
  CDS Start-End: 43-1740
gcgggctcgcggcgctgggttcctggtctccgggccagggcaatgttccgcacggcagtgatgatggcggccagcctggcgctgaccggggctgtggtggctcacgcctactacctcaaacaccagttctaccccactgtggtgtacctgaccaagtccagccccagcatggcagtcctgtacatccaggcctttgtccttgtcttccttctgggcaaggtgatgggcaaggtgttctttgggcaactgagggcagcagagatggagcaccttctggaacgttcctggtacgccgtcacagagacttgtctggccttcaccgtttttcgggatgacttcagcccccgctttgttgcactcttcactcttcttctcttcctcaaatgtttccactggctggctgaggaccgtgtggacttttatgccatcctgatgacgatggtgctcaccatcttcatcaagtatgtgctgcactccgtggacctccagagtgagaacccctgggacaacaaggctgtgtacatgctctacacagagctgtttacaggcttcatcaaggttctgctgtacatggccttcatgaccatcatgatcaaggtgcacaccttcccactctttgccatccggcccatgtacctggccatgagacagttcaagaaagctgtgacagatgccatcatgtctcgccgagccatccgcaacatgaacaccctgtatccagatgccaccccagaggagctccaggcaatggacaatgtctgcatcatctgccgagaagagatggtgactggtgccaagagactgccctgcaaccacattttccataccagctgcctgcgctcctggttccagcggcagcagacctgccccacctgccgtatggatgtccttcgtgcatcgctgccagcgcagtcaccaccacccccggagcctgcggatcaggggccaccccctgccccccaccccccaccactcttgcctcagccccccaacttcccccagggcctcctgcctccttttcctccaggcatgttcccactgtggccccccatgggcccctttccacctgtcccgcctccccccagctcaggagaggctgtggctcctccatccaccagtgcagccctttctcggcccagtggagcagctacaaccacagctgctggcaccagtgctactgctgcttctgccacagcatctggcccaggctctggctctgccccagaggctggccctgcccctggtttccccttccctcctccctggatgggtatgcccctgcctccaccctttgccttccccccaatgcctgtgccccctgcgggctttgctgggctgaccccagaggagctacgagctctggagggccatgagcggcagcacctggaggcccggctgcagagcctgcgtaacatccacacactgctggacgccgccatgctgcagatcaaccagtacctcaccgtgctggcctccttggggcccccccggcctgccacttcagtcaactccactgaggagactgccactacagttgttgctgctgcctcctccaccagcatccctagctcagaggccacgaccccaaccccaggagcctccccaccagcccctgaaatggaaaggcctccagctcctgagtcagtgggcacagaggagatgcctgaggatggagagcccgatgcagcagagctccgccggcgccgcctgcagaagctggagtctcctgttgcccactgacactgccccagcccagccccagcctctgctcttttgagcagccctcgctggaacatgtcctgccaccaagtgccagctccctctctgtctgcaccagggagtagtacccccagctctgagaaagaggcggcatcccctaggccaagtggaaagaggctggggttcccatttgactccagtcccaggcagccatggggatctcgggtcagttccagccttcctctccaactcttcagccctgtgttctgctggggccatgaaggcagaaggtttagcctctgagaagccctcttcttcccccacccctttccaggagaaggggctgcccctccaagccctacttgtatgtgcggagtcacactgcagtgccgaacagtattagctcccgttcccaagtgtggactccagaggggctggaggcaagctatgaacttgctcgctggcccacccctaagactggtacccatttccttttcttaccctgatctccccagaagcctcttgtggtggtggctgtgccccctatgccctgtggcatttctgcgtcttactggcaaccacacaactcagggaaaggaatgcctgggagtgggggtgcaggcgggcagcactgagggaccctgccccgcccctccccccaggcccctttcctctgcagcttctcaagtgagactgacctgtctcacccagcagccactgcccagccgcactccaggcaagggccagtgcgcctgctcctgaccactgcaatcccagcgcccaaggaaggccacttctcaactggcagaacttctgaagtttagaattggaattacttccttactagtgtcttttggcttaaattttgtcttttgaagttgaatgcttaatcccgggaaagaggaacaggagtgccagactcctggtctttccagtttagaaaaggctctgtgccaaggagggaccacaggagctgggacctgcctgcccctgtcttttccccttggttttgtgttacaagagttgttggagacagtttcagatgattatttaatttgtaaatattgtacaaattttaatagcttaaattgtatatacagccaaataaaaacttgcattaac

SEQ ID NO: 188323 - DNA, 3052 bp, Homo sapiens
  Payload ID: 17057
  Gene Symbol: SYVN1
  Gene Name: synovial apoptosis inhibitor 1, synoviolin
  Uniprot ID: Q86TM6
  ENST ID: ENST00000377190
  CDS Start-End: 96-1949
agggggtggggagtgttgttaaccggaggggcagccgcagtcgcgcggattgagcgggctcgcggcgctgggttcctggtctccgggccagggcaatgttccgcacggcagtgatgatggcggccagcctggcgctgaccggggctgtggtggctcacgcctactacctcaaacaccagttctaccccactgtggtgtacctgaccaagtccagccccagcatggcagtcctgtacatccaggcctttgtccttgtcttccttctgggcaaggtgatgggcaaggtgttctttgggcaactgagggcagcagagatggagcaccttctggaacgttcctggtacgccgtcacagagacttgtctggccttcaccgtttttcgggatgacttcagcccccgctttgttgcactcttcactcttcttctcttcctcaaatgtttccactggctggctgaggaccgtgtggactttatggaacgcagccccaacatctcctggctctttcactgccgcattgtctctcttatgttcctcctgggcatcctggacttcctcttcgtcagccacgcctatcacagcatcctgacccgtggggcctctgtgcagctggtgtttggctttgagtatgccatcctgatgacgatggtgctcaccatcttcatcaagtatgtgctgcactccgtggacctccagagtgagaacccctgggacaacaaggctgtgtacatgctctacacagagctgtttacaggcttcatcaaggttctgctgtacatggccttcatgaccatcatgatcaaggtgcacaccttcccactctttgccatccggcccatgtacctggccatgagacagttcaagaaagctgtgacagatgccatcatgtctcgccgagccatccgcaacatgaacaccctgtatccagatgccaccccagaggagctccaggcaatggacaatgtctgcatcatctgccgagaagagatggtgactggtgccaagagactgccctgcaaccacattttccataccagctgcctgcgctcctggttccagcggcagcagacctgccccacctgccgtatggatgtccttcgtgcatcgctgccagcgcagtcaccaccacccccggagcctgcggatcaggggccaccccctgccccccaccccccaccactcttgcctcagccccccaacttcccccagggcctcctgcctccttttcctccaggcatgttcccactgtggccccccatgggcccctttccacctgtcccgcctccccccagctcaggagaggctgtggctcctccatccaccagtgcagcagccctttctcggcccagtggagcagctacaaccacagctgctggcaccagtgctactgctgcttctgccacagcatctggcccaggctctggctctgccccagaggctggccctgcccctggtttccccttccctcctccctggatgggtatgcccctgcctccaccctttgccttccccccaatgcctgtgccccctgcgggctttgctgggctgaccccagaggagctacgagctctggagggccatgagcggcagcacctggaggcccggctgcagagcctgcgtaacatccacacactgctggacgccgccatgctgcagatcaaccagtacctcaccgtgctggcctccttggggcccccccggcctgccacttcagtcaactccactgaggagactgccactacagttgttgctgctgcctcctccaccagcatccctagctcagaggccacgaccccaaccccaggagcctccccaccagcccctgaaatggaaaggcctccagctcctgagtcagtgggcacagaggagatgcctgaggatggagagcccgatgcagcagagctccgccggcgccgcctgcagaagctggagtctcctgttgcccactgacactgccccagcccagccccagcctctgctcttttgagcagccctcgctggaacatgtcctgccaccaagtgccagctccctctctgtctgcaccagggagtagtacccccagctctgagaaagaggcggcatcccctaggccaagtggaaagaggctggggttcccatttgactccagtcccaggcagccatggggatctcgggtcagttccagccttcctctccaactcttcagccctgtgttctgctggggccatgaaggcagaaggtttagcctctgagaagccctcttcttcccccacccctttccaggagaaggggctgcccctccaagccctacttgtatgtgcggagtcacactgcagtgccgaacagtattagctcccgttcccaagtgtggactccagaggggctggaggcaagctatgaacttgctcgctggcccacccctaagactggtacccatttccttttcttaccctgatctccccagaagcctcttgtggtggtggctgtgccccctatgccctgtggcatttctgcgtcttactggcaaccacacaactcagggaaaggaatgcctgggagtgggggtgcaggcgggcagcactgagggaccctgccccgcccctccccccaggcccctttcctctgcagcttctcaagtgagactgacctgtctcacccagcagccactgcccagccgcactccaggcaagggccagtgcgcctgctcctgaccactgcaatcccagcgcccaaggaaggccacttctcaactggcagaacttctgaagtttagaattggaattacttccttactagtgtcttttggcttaaattttgtcttttgaagttgaatgcttaatcccgggaaagaggaacaggagtgccagactcctggtctttccagtttagaaaaggctctgtgccaaggagggaccacaggagctgggacctgcctgcccctgtcttttccccttggttttgtgttacaagagttgttggagacagtttcagatgattatttaatttgtaaatattgtacaaattttaatagcttaaattgtatatacagccaaataaaaacttgcattaacaa

SEQ ID NO: 188324 - DNA, 826 bp, Homo sapiens
  Payload ID: 17057
  Gene Symbol: SYVN1
  Gene Name: synovial apoptosis inhibitor 1, synoviolin
  ENST ID: ENST00000531018
  CDS Start-End: 117-826
tgcatgatgagtcccaaggagaggaaagcagaaagtgacctcaaaccacagcctctccccactcctaggtcctgtacatccaggcctttgtccttgtcttccttctgggcaaggtgatgggcaaggtgttctttgggcaactgagggcagcagagatggagcaccttctggaacgttcctggtacgccgtcacagagacttgtctggccttcaccgtttttcgggatgacttcagcccccgctttgttgcactcttcactcttcttctcttcctcaaatgtttccactggctggctgaggaccgtgtggactttatggaacgcagccccaacatctcctggctctttcactgccgcattgtctctcttatgttcctcctgggcatcctggacttcctcttcgtcagccacgcctatcacagcatcctgacccgtggggcctctgtgcagctggtgtttggctttgagtatgccatcctgatgacgatggtgctcaccatcttcatcaagtatgtgctgcactccgtggacctccagagtgagaacccctgggacaacaaggctgtgtacatgctctacacagagctgtttacaggcttcatcaaggttctgctgtacatggccttcatgaccatcatgatcaaggtgcacaccttcccactctttgccatccggcccatgtacctggccatgagacagttcaagaaagctgtgacagatgccatcatgtctcgccgagccatccgcaacatgaacaccctgtatccagatgccaccccagaggagctccaggcaatggacaatgtctgcatcatctgccgagaaga

SEQ ID NO: 188325 - DNA, 775 bp, Homo sapiens
  Payload ID: 17057
  Gene Symbol: SYVN1
  Gene Name: synovial apoptosis inhibitor 1, synoviolin
  ENST ID: ENST00000528487
  CDS Start-End: 63-775
gccgcagtcgcgcggattgagcgggctcgcggcgctgggttcctggtctccgggccagggcaatgttccgcacggcagtgatgatggcggccagcctggcgctgaccggggctgtggtggctcacgcctactacctcaaacaccagttctaccccactgtggtgtacctgaccaagtccagccccagcatggcagtgatgggcaaggtgttctttgggcaactgagggcagcagagatggagcaccttctggaacgttcctggtacgccgtcacagagacttgtctggccttcaccgtttttcgggatgacttcagcccccgctttgttgcactcttcactcttcttctcttcctcaaatgtttccactggctggctgaggaccgtgtggactttatggaacgcagccccaacatctcctggctctttcactgccgcattgtctctcttatgttcctcctgggcatcctggacttcctcttcgtcagccacgcctatcacagcatcctgacccgtggggcctctgtgcagctggtgtttggctttgagtatgccatcctgatgacgatggtgctcaccatcttcatcaagtatgtgctgcactccgtggacctccagagtgagaacccctgggacaacaaggctgtgtacatgctctacacagagctgtttacaggcttcatcaaggttctgctgtacatggccttcatgaccatcatgatcaaggtgcacaccttcccactctttgccatccggcccatgtacctggccatgag

SEQ ID NO: 188326 - DNA, 709 bp, Homo sapiens
  Payload ID: 17057
  Gene Symbol: SYVN1
  Gene Name: synovial apoptosis inhibitor 1, synoviolin
  ENST ID: ENST00000532771
  CDS Start-End: 1-448
ggtggctcacgcctactacctcaaacaccagttctaccccactgtggtgtacctgaccaagtccagccccagcatggcagtcctgtacatccaggcctttgtccttgtcttccttctgggcaaggtgatgggcaaggtgttctttgggcaactgagggcagcagagatggagcaccttctggaacgttcctggtacgccgtcacagagacttgtctggccttcaccgtttttcgggatgacttcagcccccgctttgttgcactcttcactcttcttctcttcctcaaatgtttccactggctggctgaggaccgtgtggactttatggaacgcagccccaacatctcctggctctttcactgccgcattgtcttatgccatcctgatgacgatggtgctcaccatcttcatcaagtatgtgctgcactccgtggacctccagagtgagaacccctgggacaacaaggctgtgtacatgctctacacagagctgtttacaggcttcatcaaggttctgctgtacatggccttcatgaccatcatgatcaaggtgcacaccttcccactctttgccatccggcccatgtacctggccatgagacagttcaagaaagctgtgacagatgccatcatgtctcgccgagccatccgcaacatgaacaccctgtatccagatgccaccccagaggagctccaggcaatggacaa

SEQ ID NO: 188327 - DNA, 796 bp, Homo sapiens
  Payload ID: 17057
  Gene Symbol: SYVN1
  Gene Name: synovial apoptosis inhibitor 1, synoviolin
  ENST ID: ENST00000527142
  CDS Start-End: 16-465
ctccgggccagggcaatgttccgcacggcagtgatgatggcggccagcctggcgctgaccggggctgtggtggctcacgcctactacctcaaacaccagttctaccccactgtggtgtacctgaccaagtccagccccagcatggcagtcctgtacatccaggcctttgtccttgtcttccttctgggcaaggtgatgggcaaggtgttctttgggcaactgagggcagcagagatggagcaccttctggaacgttcctggtacgccgtcacagagacttgtctggccttcaccgtttttcgggatgacttcagcccccgctttgttgcactcttcactcttcttctcttcctcaaatgtttccactggctggctgaggaccgtgtggactttatggaacgcagccccaacatctcctggctctttcactgccgcattgtctccacgcctatcacagcatcctgacccgtggggcctctgtgcagctggtgtttggctttgagtatgccatcctgatgacgatggtgctcaccatcttcatcaagtatgtgctgcactccgtggacctccagagtgagaacccctgggacaacaaggctgtgtacatgctctacacagagctgtttacaggcttcatcaaggttctgctgtacatggccttcatgaccatcatgatcaaggtgcacaccttcccactctttgccatccggcccatgtacctggccatgagacagttcaagaaagctgtgacagatgccatcatgtctcgccgagccatccgcaacatgaacaccct

SEQ ID NO: 188328 - DNA, 3144 bp, Homo sapiens
  Payload ID: 17057
  Gene Symbol: SYVN1
  Gene Name: synovial apoptosis inhibitor 1, synoviolin
  Uniprot ID: Q86TM6
  ENST ID: ENST00000526060
  CDS Start-End: 194-2044
ttgtggttggggtcgggacccgaaccttccccttgaggtctccggagtcggcacgcccctcagccccgccgcacgctttcggcctgtcagctggccggagacctcagacgccggtgcggccgctttgctcaagcctgggccctgcctgcgacgcccgcaactcctggtgctcacaggtctccgggccagggcaatgttccgcacggcagtgatgatggcggccagcctggcgctgaccggggctgtggtggctcacgcctactacctcaaacaccagttctaccccactgtggtgtacctgaccaagtccagccccagcatggcagtcctgtacatccaggcctttgtccttgtcttccttctgggcaaggtgatgggcaaggtgttctttgggcaactgagggcagcagagatggagcaccttctggaacgttcctggtacgccgtcacagagacttgtctggccttcaccgtttttcgggatgacttcagcccccgctttgttgcactcttcactcttcttctcttcctcaaatgtttccactggctggctgaggaccgtgtggactttatggaacgcagccccaacatctcctggctctttcactgccgcattgtctctcttatgttcctcctgggcatcctggacttcctcttcgtcagccacgcctatcacagcatcctgacccgtggggcctctgtgcagctggtgtttggctttgagtatgccatcctgatgacgatggtgctcaccatcttcatcaagtatgtgctgcactccgtggacctccagagtgagaacccctgggacaacaaggctgtgtacatgctctacacagagctgtttacaggcttcatcaaggttctgctgtacatggccttcatgaccatcatgatcaaggtgcacaccttcccactctttgccatccggcccatgtacctggccatgagacagttcaagaaagctgtgacagatgccatcatgtctcgccgagccatccgcaacatgaacaccctgtatccagatgccaccccagaggagctccaggcaatggacaatgtctgcatcatctgccgagaagagatggtgactggtgccaagagactgccctgcaaccacattttccataccagctgcctgcgctcctggttccagcggcagcagacctgccccacctgccgtatggatgtccttcgtgcatcgctgccagcgcagtcaccaccacccccggagcctgcggatcaggggccaccccctgccccccaccccccaccactcttgcctcagccccccaacttcccccagggcctcctgcctccttttcctccaggcatgttcccactgtggccccccatgggcccctttccacctgtcccgcctccccccagctcaggagaggctgtggctcctccatccaccagtgcagccctttctcggcccagtggagcagctacaaccacagctgctggcaccagtgctactgctgcttctgccacagcatctggcccaggctctggctctgccccagaggctggccctgcccctggtttccccttccctcctccctggatgggtatgcccctgcctccaccctttgccttccccccaatgcctgtgccccctgcgggctttgctgggctgaccccagaggagctacgagctctggagggccatgagcggcagcacctggaggcccggctgcagagcctgcgtaacatccacacactgctggacgccgccatgctgcagatcaaccagtacctcaccgtgctggcctccttggggcccccccggcctgccacttcagtcaactccactgaggagactgccactacagttgttgctgctgcctcctccaccagcatccctagctcagaggccacgaccccaaccccaggagcctccccaccagcccctgaaatggaaaggcctccagctcctgagtcagtgggcacagaggagatgcctgaggatggagagcccgatgcagcagagctccgccggcgccgcctgcagaagctggagtctcctgttgcccactgacactgccccagcccagccccagcctctgctcttttgagcagccctcgctggaacatgtcctgccaccaagtgccagctccctctctgtctgcaccagggagtagtacccccagctctgagaaagaggcggcatcccctaggccaagtggaaagaggctggggttcccatttgactccagtcccaggcagccatggggatctcgggtcagttccagccttcctctccaactcttcagccctgtgttctgctggggccatgaaggcagaaggtttagcctctgagaagccctcttcttcccccacccctttccaggagaaggggctgcccctccaagccctacttgtatgtgcggagtcacactgcagtgccgaacagtattagctcccgttcccaagtgtggactccagaggggctggaggcaagctatgaacttgctcgctggcccacccctaagactggtacccatttccttttcttaccctgatctccccagaagcctcttgtggtggtggctgtgccccctatgccctgtggcatttctgcgtcttactggcaaccacacaactcagggaaaggaatgcctgggagtgggggtgcaggcgggcagcactgagggaccctgccccgcccctccccccaggcccctttcctctgcagcttctcaagtgagactgacctgtctcacccagcagccactgcccagccgcactccaggcaagggccagtgcgcctgctcctgaccactgcaatcccagcgcccaaggaaggccacttctcaactggcagaacttctgaagtttagaattggaattacttccttactagtgtcttttggcttaaattttgtcttttgaagttgaatgcttaatcccgggaaagaggaacaggagtgccagactcctggtctttccagtttagaaaaggctctgtgccaaggagggaccacaggagctgggacctgcctgcccctgtcttttccccttggttttgtgttacaagagttgttggagacagtttcagatgattatttaatttgtaaatattgtacaaattttaatagcttaaattgtatatacagccaaataaaaacttgcattaa

SEQ ID NO: 188329 - DNA, 4493 bp, Homo sapiens
  Payload ID: 17058
  Gene Symbol: SS18L1
  Gene Name: synovial sarcoma translocation gene on chromosome 18-like 1
  Uniprot ID: O75177
  ENST ID: ENST00000331758
  CDS Start-End: 27-1217
cacgggctgagccccgcgccgccaccatgtccgtggccttcgcgtctgcccggccaagaggcaaaggggaggttacgcagcaaaccatccagaagatgctggacgagaaccaccacctgatccagtgcatcctggagtaccagagcaagggcaagacggccgagtgcacgcagtaccagcagatcctgcaccggaacctggtatacctggccacgatcgcagactccaaccagaacatgcagtccctgcttcctgccccgcccacgcagaacatgaacctgggccctggagccctgactcagagcggctccagccagggcctgcactctcagggcagcctgagtgacgccatcagcacgggcctgccaccctcctccctcctgcagggccagattggcaacgggccgagccacgtgtccatgcagcagacggcgcctaacacgctgcccaccacctccatgagcatctctgggcccggctacagccacgcgggacccgcctcgcagggcgtccccatgcaggggcaaggcaccatcggcaactacgtgtctcggaccaacatcaacatgcagtccaacccagtctccatgatgcagcagcaggcggccacgtcgcactacagctcggcgcagggcggcagccagcactaccagggccagtcgtccatcgccatgatggggcagggcagccaggggagcagcatgatggggcagcggcccatggcgccctaccggccctcccagcaaggctcttcccagcagtacctgggccaggaggagtactatggcgagcagtacagccacagccagggcgccgcggagcccatgggccagcagtactaccccgacggccatggcgattacgcctaccagcagtcatcctacacggagcagagctacgaccggtccttcgaggagtccacgcagcactactatgaggggggaaactcccagtacagccagcagcaggccgggtaccagcagggtgccgcgcagcagcagacgtactcccagcagcagtaccccagccagcagagctaccccgggcagcagcagggctacgggtctgcccagggagccccgtcacagtaccccggctaccagcaaggccaaggccagcagtacggaagctaccgagcaccgcagacagcgccgtctgcccagcagcagcggccctacggctatgaacagggccagtatggaaattaccagcagtaagggacacacattctggctggagcccttgtggtagcgtgttcatccaggggccggatgggctggcggcagctctggtgaattgtgacatgttggttacctgttcgcccagtgccacgtctgcatgtgaagcgtgctcatttcatgctgggtatgacgccgagcgcacaccactggcgtgagacagcgcttggtggtgtgatacttttggtgctgtgtatagtattgtatgtcggtacacggagaggtatcctttttttgtcccccgcccccttctcaatgtttctagctagctttgggggtcattttgtcatcagagcattctgtgcccagggacaggacagatctcgaggacaccacagtccacctgttcccgtcaacagacgttaggtctcattttcctcctcatgcagtgttgtagtgtgggttgtcaacttttctttaactggctacgccacagctggacacacatgcagcccctggagggcagcctcttcctgtgcctcgatggggtgggtgggagggcatcttctgtgcgttgggtcagtttctgttacgtaacgaaaaggataaacatctcccacgggagaggccacagatggccacttccagagcttgcccattgcctgtctctcgccaattccgtttatccaaaaaggtacatgtttttgtattaaaaagtaaacagggatcagtgactgtattccaaataaatatgaatccctaagggccgtggacaaattgcctaacccagggccagcggtattgctgaaggaaaggggcagctctctgggaagtgggccctcagagattactctggctttgacccttgtttagctgatggtcatttctgggattggaatatttaataagcccaattctaagttgataggtaattttaaatattcaaaccaaatcttcccaacagttggcaagttgtttattttatattatttcttccaggacctacttgctcagatctccaagcaagcatttcttttcttttagggatgtctgaaagtcacatccagttacattactgtgttctttctaatgaaaagtaaaggttttatatagagaaacttgagtaatttttacatttctaagacattaaatcccatttaaattctgtgtgaacattaaagacagcacacttgcaaaagtatggtcaaaggaaaaaaatcccacatttcaattaacaagtagcatggacatttgatcaacctttagttggaataataatattcatatttgctatgaatccttttaaaaaaatctttggataaatgctgacagatttccaagaactaccaagaaaatacaagagatatccaatgcttgatatatgaggcctagtaataacgatatttctctttaattgatgttttgttttaaaagttaaaagtaattcttggcgtggtggttcacgcctgtaatcccagcactttgggaggccgaagcgggcggatcacctgaggtcgggagttcgagaccagcctgaccaacatggagaaaccccgtccctactaaaaatacaaaattagccaggtatggtggtgcatacctgtaatcccagctactcgggaacctgaggcaggagaatggcttgaacccaggagacagaggttgtggtggggcaagatcgcaccattgcacccgagcctaggcaacaagagtgaaattccgtctcaaaaaaataaataaataaataaataaataagttaaaattaattctttatccagagtcgggtgctttagaatttataagtcacttatgtgttttgcttgaattaattctgacagcccctatgaggaaatctggaggcaggtaacagttcccattttagagatgaagaactgaggcacagattaaaggacttgcctgtgttgaataccagtcctgttctaggacattctcccctctcctaggagacggatgtcacgcacaaatggggagagaagtgtttattttgtaggcactaagggtttctaaaacccttaacactggtaagggctcaaaaataaacgtatgtgttcatattcgatcaccgaaatgagagttcttaattgctaattgacaaacgcgttagcaatttcagttagggagtcatctcccttgattgtgttcttttcctgtcaattttcatagacctaatttgcaaactcaatcggggactaaaatttcccactgaaaatgttaaacattttagataactgtgaagatagtttatttttattccttgccaatctgggaatatgccttttttgtgtgtttgtgtgtttttttaagtgctgtattaataatactttctgaaagaaaaggacacttaccccaaaacttcaatctgaaatgtcttacattaagaatatcttgaatgttgtgtatatattttaaaaagcactttgcaaaatagtttgtacatttatttcctaatttatacatgatttttggtgttaatatatttaatgattaataacagaatgtttatttaatgtgctgtccatttttatgtaatattatggggaaagtgatgccagcagttccttttcattattctatcttctgtcatatgaatgttgagcaaagcttaggccaacatgaattgtttgtgaagtgtggttgatggtgctttgtttttttctgactacttctatggaaggccagtgaagaagcaaaggaagacatgaaaattgacgctcattcttcttcctattgttccctgacatccagcaaattgtgaatttgaaaaatgatggccagttttcagaagtgctgacaaattcatattggtatgcaaaagctcatcacccattaaggtttgttgttgaatcaacagtactcagcatattaaaacagtacatcagaactcatgccaacagtctttatgatgggattaaggtggacaagatctcctaagatctgtgaatgggattaaggtggacaagatctcctaagatctgaaaagaaaccttaatacgctcatatggttggagtgttaagtgaacctctgattttgtcagggtttttctacgtgtaggcgtgaatagggggcaccccttcaaaactgtacaaagaagacgactgttttccatttccatttaaacatttttagccacttcatttctatttattgaacaggtcaaatttgtcttgttatttgtgagtacagtacatttaaaaaacatccttatcggttatttttttttcagtcggagtttgacgtataaattgtttatgcttttggtgtaatctcttaataaactggttcttcaaaaatc

SEQ ID NO: 188330 - DNA, 1238 bp, Homo sapiens
  Payload ID: 17058
  Gene Symbol: SS18L1
  Gene Name: synovial sarcoma translocation gene on chromosome 18-like 1
  Uniprot ID: O75177
  ENST ID: ENST00000370848
  CDS Start-End: 34-978
acttcctgttgcctgcagccgcccacgcagaacatgaacctgggccctggagccctgactcagagcggctccagccagggcctgcactctcagggcagcctgagtgacgccatcagcacgggcctgccaccctcctccctcctgcagggccagattggcaacgggccgagccacgtgtccatgcagcagacggcgcctaacacgctgcccaccacctccatgagcatctctgggcccggctacagccacgcgggacccgcctcgcagggcgtccccatgcaggggcaaggcaccatcggcaactacgtgtctcggaccaacatcaacatgcagtccaacccagtctccatgatgcagcagcaggcggccacgtcgcactacagctcggcgcagggcggcagccagcactaccagggccagtcgtccatcgccatgatggggcagggcagccaggggagcagcatgatggggcagcggcccatggcgccctaccggccctcccagcaaggctcttcccagcagtacctgggccaggaggagtactatggcgagcagtacagccacagccagggcgccgcggagcccatgggccagcagtactaccccgacggccatggcgattacgcctaccagcagtcatcctacacggagcagagctacgaccggtccttcgaggagtccacgcagcactactatgaggggggaaactcccagtacagccagcagcaggccgggtaccagcagggtgccgcgcagcagcagacgtactcccagcagcagtaccccagccagcagagctaccccgggcagcagcagggctacgggtctgcccagggagccccgtcacagtaccccggctaccagcaaggccaaggccagcagtacggaagctaccgagcaccgcagacagcgccgtctgcccagcagcagcggccctacggctatgaacagggccagtatggaaattaccagcagtaagggacacacattctggctggagcccttgtggtagcgtgttcatccaggggccggatgggctggcggcagctctggtgaattgtgacatgttggttacctgttcgcccagtgccacgtctgcatgtgaagcgtgctcatttcatgctgggacctacttgctcagatctccaagcaagcatttcttttcttttagggatgtctgaaagtcacatccagttacattactgtgttctttctaatgaaaagtaaaggttttatat

SEQ ID NO: 188331 - DNA, 781 bp, Homo sapiens
  Payload ID: 17058
  Gene Symbol: SS18L1
  Gene Name: synovial sarcoma translocation gene on chromosome 18-like 1
  ENST ID: ENST00000450482
  CDS Start-End: 397-781
cacgggctgagccccgcgccgccaccatgtccgtggccttcgcgtctgcccggccaagaggcaaaggggaggttacgcagcaaaccatccagaagtttttgaagaatgccggccagtcatcgagtgcccttggtttgggtacaaggtgcgttttcctaacttgcgggtctgaaagtgcgtccattcccccttcacgcctggttgcggtttcggcggactagaatttctacgcagaagtctccctcaggatcagaccgtagcccttccggaaacctccatgatgctggacgagaaccaccacctgatccagtgcatcctggagtaccagagcaagggcaagacggccgagtgcacgcagtgagtgcccgccatacaccggaacacttggagggtgtcatgcagagtctaagcacagaggccagatacgtcccaagagtcccccagcacagagatcagataagtcccaggagtccccagcacggaggccagatatgtcccaggagtcccctgcacagaggccagatatgtcccaggagtcccccagcacggaggtaccagcagatcctgcaccggaacctggtatacctggccacgatcgcagactccaaccagaacatgcagtccctgcttcctgccccgcccacgcagaacatgaacctgggccctggagccctgactcagagcggctccagccagggcctgcactctcagggcagcctgagtgacgccatcagcacgggcctgccaccctcctccctcctgcagggccagattggcaacg

SEQ ID NO: 188332 - DNA, 899 bp, Homo sapiens
  Payload ID: 17058
  Gene Symbol: SS18L1
  Gene Name: synovial sarcoma translocation gene on chromosome 18-like 1
  ENST ID: ENST00000492466
  CDS Start-End: 1-635
tctccatgatgcagcagcaggcggccacgtcgcactacagctcggcgcagggcggcagccagcactaccagggccagtcgtccatcgccatgatggggcagggcagccaggggagcagcatgatggggcagcggcccatggcgccctaccggccctcccagcaaggctcttcccagcagtacctgggccaggaggagtactatggcgagcagtacagccacagccagggcgccgcggagcccatgggccagcagtactaccccgacggccatggcgattacgcctaccagcagtcatcctacacggagcagagctacgaccggtccttcgaggagtccacgcagcactactatgaggggggaaactcccagtacagccagcagcaggccgggtaccagcagggtgccgcgcagcagcagacgtactcccagcagcagtaccccagccagcagagctaccccgggcagcagcagggctacgggtctgcccagggagccccgtcacagtaccccggctaccagcaaggccaaggccagcagtacggaagctaccgagcaccgcagacagcgccgtctgcccagcagcagcggccctacggctatgaacagggccagtatggaaattaccagcagtaagggacacacattctggctggagcccttgtggtagcgtgttcatccaggggccggatgggctggcggcagctctggtgaattgtgacatgttggttacctgttcgcccagtgccacgtctgcatgtgaagcgtgctcatttcatgctgggacctacttgctcagatctccaagcaagcatttcttttcttttagggatgtctgaaagtcacatccagttacattactgtgttctttctaatgaaaagtaaaggttttatatagag

SEQ ID NO: 188333 - DNA, 815 bp, Homo sapiens
  Payload ID: 17059
  Gene Symbol: SS18L2
  Gene Name: synovial sarcoma translocation gene on chromosome 18-like 2
  Uniprot ID: Q9UHA2
  ENST ID: ENST00000011691
  CDS Start-End: 93-326
taggcgggagcatccaatcaacttcgagagcgtaggccccacctatcgtgggtcgagttgcttggcggtcgtggttccggaggttcctcgggatgtcggtggccttcgtaccggactggctgaggggcaaggcggaagtcaatcaagagactatccagcggctccttgaggagaatgaccagctgatccgctgtattgtggagtatcagaacaagggccgcgggaacgagtgcgtgcagtaccagcatgtgttacatagaaatctcatttatttggctaccattgcagatgccagtccaaccagcacttcaaaagcaatggaataatctttcaaaagcaatagaataatcttccatttggctgtcgtgaggagtaattgaatgtaatccatctcttacaaaatggagacagggtctttaccaactcaactggttaaaacatgaatgaaacctctgtggctctttcgaaacgtgaaaatgtgaagaaagctactaacttagctgtattctcatgtaaatattttttaaataattaagcaaatccctcaataagttgagcccaggtgtcctctttcctgaacttggagcatgtttggataacaaagacatcactgggatgttcaagtctactttttagtttcaacctgaagaggaaactcagtaggtgttgggcaggaattggtgagattcctgacttgataccttgctaaatggacatgtaactgtgtgctccttcctatcagtttgtaaatgtggtccccctgactgctgttttcagattgctttgaaataaagcttatttttctataaaatact

SEQ ID NO: 188334 - DNA, 1047 bp, Homo sapiens
  Payload ID: 17059
  Gene Symbol: SS18L2
  Gene Name: synovial sarcoma translocation gene on chromosome 18-like 2
  Uniprot ID: Q9UHA2
  ENST ID: ENST00000447630
  CDS Start-End: 209-442
cctcacctcgcccggacggcggccttcggaagtcggcgcctgccagctacccgccgcctcctcagcaatcttagccgaccgggagggctcggcccaggtcaccggcagcccaggcgcaggcgggagcatccaatcaacttcgagagcgtaggccccacctatcgtgggtcgagttgcttggcggtcgtggttccggaggttcctcgggatgtcggtggccttcgtaccggactggctgaggggcaaggcggaagtcaatcaagagactatccagcggctccttgaggagaatgaccagctgatccgctgtattgtggagtatcagaacaagggccgcgggaacgagtgcgtgcagtaccagcatgtgttacatagaaatctcatttatttggctaccattgcagatgccagtccaaccagcacttcaaaagcaatggaataatctttcaaaagcaatagaataatcttccatttggctgtcgtgaggagtaattgaatgtaatccatctcttacaaaatggagacagggtctttaccaactcaactggttaaaacatgaatgaaacctctgtggctctttcgaaacgtgaaaatgtgaagaaagctactaacttagctgtattctcatgtaaatattttttaaataattaagcaaatccctcaataagttgagcccaggtgtcctctttcctgaacttggagcatgtttggataacaaagacatcactgggatgttcaagtctactttttagtttcaacctgaagaggaaactcagtaggtgttgggcaggaattggtgagattcctgacttgataccttgctaaatggacatgtaactgtgtgctccttcctatcagtttgtaaatgtggtccccctgactgctgttttcagattgctttgaaataaagcttatttttctataaaatactgatgtggaggtatagaagttttcatgtaataagtattccatttggttttcaagaataactgtgaggacttaaccataaagtatataaaaacaatactattatcattgccaacaaaa

SEQ ID NO: 188335 - DNA, 1836 bp, Homo sapiens
  Payload ID: 17060
  Gene Symbol: SS18
  Gene Name: synovial sarcoma translocation, chromosome 18
  Uniprot ID: Q15532
  ENST ID: ENST00000269137
  CDS Start-End: 333-1496
tttcctgaatcgctgaagcggagggaggactagggcgcgactctaccattagcgcaaagggccagggggtgcccataaggagagctcgggggatgcagggacggtcaagaaagttcggccagggctaggggtcccccagagtgcgcagaagcgagacatccctggccagagtgcctccttcaggcctgccccgccgcccgtccgcttggccccggagcatcccccctccccgcattcccgaggtggttcagcccgagaggccggcgtctctcccccagtttgccgttcacccggagcgctcgggacttgccgatagtggtgacggcggcaacatgtctgtggctttcgcggccccgaggcagcgaggcaagggggagatcactcccgctgcgattcagaagatgttggatgacaataaccatcttattcagtgtataatggactctcagaataaaggaaagacctcagagtgttctcagtatcagcagatgttgcacacaaacttggtataccttgctacaatagcagattctaatcaaaatatgcagtctcttttaccagcaccacccacacagaatatgcctatgggtcctggagggatgaatcagagcggccctcccccacctccacgctctcacaacatgccttcagatggaatggtaggtgggggtcctcctgcaccgcacatgcagaaccagatgaacggccagatgcctgggcctaaccatatgcctatgcagggacctggacccaatcaactcaatatgacaaacagttccatgaatatgccttcaagtagccatggatccatgggaggttacaaccattctgtgccatcatcacagagcatgccagtacagaatcagatgacaatgagtcagggacaaccaatgggaaactatggtcccagaccaaatatgagtatgcagccaaaccaaggtccaatgatgcatcagcagcctccttctcagcaatacaatatgccacagggaggcggacagcattaccaaggacagcagccacctatgggaatgatgggtcaagttaaccaaggcaatcatatgatgggtcagagacagattcctccctatagacctcctcaacagggcccaccacagcagtactcaggccaggaagactattacggggaccaatacagtcatggtggacaaggtcctccagaaggcatgaaccagcaatattaccctgatggaaattcacagtatggccaacagcaagatgcataccagggaccacctccacaacagggatatccaccccagcagcagcagtacccagggcagcaaggttacccaggacagcagcagggctacggtccttcacagggtggtccaggtcctcagtatcctaactacccacagggacaaggtcagcagtatggaggatatagaccaacacagcctggaccaccacagccaccccagcagaggccttatggatatgaccagggacagtatggaaattaccagcagtgaaaaagtacttacattccagtagccagtatctattagcagccatattgtcacctcagcactgtggacacctccctgtgaagagatccttccattccatctagtttttggaaaaaccttgtggataagtggctgtttcatcagtaagcagcctttgtggtttagttataaaaggctttagtagctcaaaaatactcttgatttcacatttctactctagatggcaacattggacagaaaatgcaatgacataaccaatttgtaatgattttggaactgtgtttcaaatggactgttacagactgaaaggtgtgaacagctttgtatgtttatgaagggtaag

SEQ ID NO: 188336 - DNA, 1548 bp, Homo sapiens
  Payload ID: 17060
  Gene Symbol: SS18
  Gene Name: synovial sarcoma translocation, chromosome 18
  ENST ID: ENST00000269138
  CDS Start-End: 30-215
gacttgccgatagtggtgacggcggcaacatgtctgtggctttcgcggccccgaggcagcgaggcaagggggagatcactcccgctgcgattcagaagatgttggatgacaataaccatcttattcagtgtataatggactctcagaataaaggaaagacctcagagtgttctcaccacccacacagaatatgcctatgggtcctggagggatgaatcagagcggccctcccccacctccacgctctcacaacatgccttcagatggaatggtaggtgggggtcctcctgcaccgcacatgcagaaccagatgaacggccagatgcctgggcctaaccatatgcctatgcagggacctggacccaatcaactcaatatgacaaacagttccatgaatatgccttcaagtagccatggatccatgggaggttacaaccattctgtgccatcatcacagagcatgccagtacagaatcagatgacaatgagtcagggacaaccaatgggaaactatggtcccagaccaaatatgagtatgcagccaaaccaaggtccaatgatgcatcagcagcctccttctcagcaatacaatatgccacagggaggcggacagcattaccaaggacagcagccacctatgggaatgatgggtcaagttaaccaaggcaatcatatgatgggtcagagacagattcctccctatagacctcctcaacagggcccaccacagcagtactcaggccaggaagactattacggggaccaatacagtcatggtggacaaggtcctccagaaggcatgaaccagcaatattaccctgatggtcataatgattacggttatcagcaaccgtcgtatcctgaacaaggctacgataggccttatgaggattcctcacaacattactacgaaggaggaaattcacagtatggccaacagcaagatgcataccagggaccacctccacaacagggatatccaccccagcagcagcagtacccagggcagcaaggttacccaggacagcagcagggctacggtccttcacagggtggtccaggtcctcagtatcctaactacccacagggacaaggtcagcagtatggaggatatagaccaacacagcctggaccaccacagccaccccagcagaggccttatggatatgaccagggacagtatggaaattaccagcagtgaaaaagtacttacattccagtagccagtatctattagcagccatattgtcacctcagcactgtggacacctccctgtgaagagatccttccattccatctagtttttggaaaaaccttgtggataagtggctgtttcatcagtaagcagcctttgtggtttagttataaaaggctttagtagctcaaaaatactcttgatttcacatttctactctagatggcaacattggacagaaaatgcaatgacataaccaatttgtaatgattttggaactgtgtttcaaatggactgttacagactgaaaggtgtgaacagctttgtatgtttatgaagggtaagggaattt

SEQ ID NO: 188337 - DNA, 3414 bp, Homo sapiens
  Payload ID: 17060
  Gene Symbol: SS18
  Gene Name: synovial sarcoma translocation, chromosome 18
  Uniprot ID: Q15532
  ENST ID: ENST00000415083
  CDS Start-End: 57-1313
agtttgccgttcacccggagcgctcgggacttgccgatagtggtgacggcggcaacatgtctgtggctttcgcggccccgaggcagcgaggcaagggggagatcactcccgctgcgattcagaagatgttggatgacaataaccatcttattcagtgtataatggactctcagaataaaggaaagacctcagagtgttctcagtatcagcagatgttgcacacaaacttggtataccttgctacaatagcagattctaatcaaaatatgcagtctcttttaccagcaccacccacacagaatatgcctatgggtcctggagggatgaatcagagcggccctcccccacctccacgctctcacaacatgccttcagatggaatggtaggtgggggtcctcctgcaccgcacatgcagaaccagatgaacggccagatgcctgggcctaaccatatgcctatgcagggacctggacccaatcaactcaatatgacaaacagttccatgaatatgccttcaagtagccatggatccatgggaggttacaaccattctgtgccatcatcacagagcatgccagtacagaatcagatgacaatgagtcagggacaaccaatgggaaactatggtcccagaccaaatatgagtatgcagccaaaccaaggtccaatgatgcatcagcagcctccttctcagcaatacaatatgccacagggaggcggacagcattaccaaggacagcagccacctatgggaatgatgggtcaagttaaccaaggcaatcatatgatgggtcagagacagattcctccctatagacctcctcaacagggcccaccacagcagtactcaggccaggaagactattacggggaccaatacagtcatggtggacaaggtcctccagaaggcatgaaccagcaatattaccctgatggtcataatgattacggttatcagcaaccgtcgtatcctgaacaaggctacgataggccttatgaggattcctcacaacattactacgaaggaggaaattcacagtatggccaacagcaagatgcataccagggaccacctccacaacagggatatccaccccagcagcagcagtacccagggcagcaaggttacccaggacagcagcagggctacggtccttcacagggtggtccaggtcctcagtatcctaactacccacagggacaaggtcagcagtatggaggatatagaccaacacagcctggaccaccacagccaccccagcagaggccttatggatatgaccagggacagtatggaaattaccagcagtgaaaaagtacttacattccagtagccagtatctattagcagccatattgtcacctcagcactgtggacacctccctgtgaagagatccttccattccatctagtttttggaaaaaccttgtggataagtggctgtttcatcagtaagcagcctttgtggtttagttataaaaggctttagtagctcaaaaatactcttgatttcacatttctactctagatggcaacattggacagaaaatgcaatgacataaccaatttgtaatgattttggaactgtgtttcaaatggactgttacagactgaaaggtgtgaacagctttgtatgtttatgaagggtaagggaatttaatacttttccacagatttttttgtaaggggaagagggaaatgtacactttttacagcagcaatattttgtatattatgtttatttcatgtggtgaatatgcaaggcggtacactacgcactggacagcatcagaaatcctctgttaatgtggactggaacatggtagatgcttgattgttttggtctcaaaatggtgtgctataaagataaaggtgaggggaagacaaagcacaccatatgtccactgttctgttctcatagaggaaattcaaatcccttttatctattagataatcaagggcactgtgatacagttttgagtaaaaagacattttttaaaagccttccagttttgtggattaaacctttttataaagatcatttataatactgttttaaaatgtgaggcaataagaattactttgtgttggatctgaggaggctttggtaaaacagtttcatctaaatgaaagtggtaatcctcttctaaaatagcaataactgaaaatgaaagtgttaattttaccttgtttgagttatcagggaacttagtaagtaatatcaaagcattttataaatgatatcaaagaagagtcaacattgatccagtcattttattttgtaatattgagggataattggttattaaactgaatagttcaggagactttacaaacctttgtttcaactttcttatctggaaataatatcatttataaagggacacttttatgtttttcccttttttatgttggttgatataacacaaagagatatttaggaaaatgcttattgatgaggtttattctatctgtttttaaagcaccgaggttgcattctagataaccttgtttattagcatggcatattttaatcattatttgagactgtcctgtgcctgattattttagctaaattcagggagattgcgtggggcaggaaagcatgcattgaaaaatttctaaccacggttatttaagcataatctgaaaacatctagcccaaaggtaagttgctattttcatcacagttgcctatgcccagggaataagatgtattctttataattgaattggtttttcccacgtctaactggaaacaaaacagaaggggcgtcataaatttgaataagcagaacatactgttctcaacatactgtaatcaaaaggaggaatttcagtgggtctctgtgtgtgtatgagagagagagtgtgtgtttgtgtgtttcaaggtcagaacaggtttttttgtttttgttttttgttctttgtttttttttttgagatggagtcttgctcttgtcgcccaggctggagtgcagtggcgcaatctcagctcactgcaacctccgcctcccaggttcaagcagttctcctgcctcagcctcctgagtagctgggatgacaggcacccgccaccacacccagctaatttttgtacttttagtagagacgaggtttcgccatgttggccaggctggtctcgaactcctgacctcaggtgatccacccgcctcggccttccaaagtgctgggattacaggcgtgagccaccgtgcctggccagaataggttttttctttcaacttgatcagtagaaaatggacatcaagtttgaacagataaatcatggacagccttattgtgattgaaatgcttgtaggttctgtgccaattttccaccactgtgtactttgttgctatttaaaactgtatcaactctaacggaagaataaattatttgtgattttaa

SEQ ID NO: 188338 - DNA, 2321 bp, Homo sapiens
  Payload ID: 17060
  Gene Symbol: SS18
  Gene Name: synovial sarcoma translocation, chromosome 18
  ENST ID: ENST00000542420
  CDS Start-End: 123-1310
ccttccacctctgccctatctcggcagatgctccacggatttgcacgaactcccgagtcttgacctccctcccctctccgggctgccgggacaactcggggcggccactcttgccaggaggcatgttggatgacaataaccatcttattcagtgtataatggactctcagaataaaggaaagacctcagagtgttctcagtatcagcagatgttgcacacaaacttggtataccttgctacaatagcagattctaatcaaaatatgcagtctcttttaccagcaccacccacacagaatatgcctatgggtcctggagggatgaatcagagcggccctcccccacctccacgctctcacaacatgccttcagatggaatggtaggtgggggtcctcctgcaccgcacatgcagaaccagatgaacggccagatgcctgggcctaaccatatgcctatgcagggacctggacccaatcaactcaatatgacaaacagttccatgaatatgccttcaagtagccatggatccatgggaggttacaaccattctgtgccatcatcacagagcatgccagtacagaatcagatgacaatgagtcagggacaaccaatgggaaactatggtcccagaccaaatatgagtatgcagccaaaccaaggtccaatgatgcatcagcagcctccttctcagcaatacaatatgccacagggaggcggacagcattaccaaggacagcagccacctatgggaatgatgggtcaagttaaccaaggcaatcatatgatgggtcagagacagattcctccctatagacctcctcaacagggcccaccacagcagtactcaggccaggaagactattacggggaccaatacagtcatggtggacaaggtcctccagaaggcatgaaccagcaatattaccctgatggtcataatgattacggttatcagcaaccgtcgtatcctgaacaaggctacgataggccttatgaggattcctcacaacattactacgaaggaggaaattcacagtatggccaacagcaagatgcataccagggaccacctccacaacagggatatccaccccagcagcagcagtacccagggcagcaaggttacccaggacagcagcagggctacggtccttcacagggtggtccaggtcctcagtatcctaactacccacagggacaaggtcagcagtatggaggatatagaccaacacagcctggaccaccacagccaccccagcagaggccttatggatatgaccagggacagtatggaaattaccagcagtgaaaaagtacttacattccagtagccagtatctattagcagccatattgtcacctcagcactgtggacacctccctgtgaagagatccttccattccatctagtttttggaaaaaccttgtggataagtggctgtttcatcagtaagcagcctttgtggtttagttataaaaggctttagtagctcaaaaatactcttgatttcacatttctactctagatggcaacattggacagaaaatgcaatgacataaccaatttgtaatgattttggaactgtgtttcaaatggactgttacagactgaaaggtgtgaacagctttgtatgtttatgaagggtaagggaatttaatacttttccacagatttttttgtaaggggaagagggaaatgtacactttttacagcagcaatattttgtatattatgtttatttcatgtggtgaatatgcaaggcggtacactacgcactggacagcatcagaaatcctctgttaatgtggactggaacatggtagatgcttgattgttttggtctcaaaatggtgtgctataaagataaaggtgaggggaagacaaagcacaccatatgtccactgttctgttctcatagaggaaattcaaatcccttttatctattagataatcaagggcactgtgatacagttttgagtaaaaagacattttttaaaagccttccagttttgtggattaaacctttttataaagatcatttataatactgttttaaaatgtgaggcaataagaattactttgtgttggatctgaggaggctttggtaaaacagtttcatctaaatgaaagtggtaatcctcttctaaaatagcaataactgaaaatgaaagtgttaattttaccttgtttgagttatcagggaacttagtaagtaatatcaaagcattttataaatgatatcaaagaagagtcaacattgatccagtcattttattttgtaatattgagggataattggttattaaactgaatagttca

SEQ ID NO: 188339 - DNA, 977 bp, Homo sapiens
  Payload ID: 17060
  Gene Symbol: SS18
  Gene Name: synovial sarcoma translocation, chromosome 18
  ENST ID: ENST00000539244
  CDS Start-End: 45-170
acccggagcgctcgggacttgccgatagtggtgacggcggcaacatgtctgtggctttcgcggccccgaggcagcgaggcaagggggagatcactcccgctgcgattcagaaggtatcagcagatgttgcacacaaacttggtataccttgctacaatagcagattctaatcaaaatatgcagtctcttttaccagcaccacccacacagaatatgcctatgggtcctggagggatgaatcagagcggccctcccccacctccacgctctcacaacatgccttcagatggaatggtaggtgggggtcctcctgcaccgcacatgcagaaccagatgaacggccagatgcctgggcctaaccatatgcctatgcagggacctggacccaatcaactcaatatgacaaacagttccatgaatatgccttcaagtagccatggatccatgggaggttacaaccattctgtgccatcatcacagagcatgccagtacagaatcagatgacaatgagtcagggacaaccaatgggaaactatggtcccagaccaaatatgagtatgcagccaaaccaaggtccaatgatgcatcagcagcctccttctcagcaatacaatatgccacagggaggcggacagcattaccaaggacagcagccacctatgggaatgatgggtcaagttaaccaaggcaatcatatgatgggtcagagacagattcctccctatagacctcctcaacagggcccaccacagcagtactcaggccaggaagactattacggggaccaatacagtcatggtggacaaggtcctccagaaggcatgaaccagcaatattaccctgatggtcataatgattacggttatcagcaaccgtcgtatcctgaacaaggctacgataggccttatgaggattcctcacaacattactacgaaggaggaaattcacagtatggccaacagcaagatgcatacca

SEQ ID NO: 188340 - DNA, 545 bp, Homo sapiens
  Payload ID: 17060
  Gene Symbol: SS18
  Gene Name: synovial sarcoma translocation, chromosome 18
  ENST ID: ENST00000580642
  CDS Start-End: 57-233
agtttgccgttcacccggagcgctcgggacttgccgatagtggtgacggcggcaacatgtctgtggctttcgcggccccgaggcagcgaggcaagggggagatcactcccgctgcgattcagaagatgttggatgacaataaccatcttattcagtgtataatggactctcagaataaaggaaagacctcagagtgttctcaggtgagtccaaactattccagagttgcataaatttcaaacaacaaaaaaaattagtgtcgatcattcatcgtaatttaaaagagttgtttaaatctgtagtttggaagataacttttattctataaagtgcattcccgttgtctaataaatattcatagcttctagggtcatgaataaaccacatctgttagtatggtttggtcagtggtcctcagaaaatctcatgtcgtgcaaccatactaatactcaagcaaaggaaaacttgaaggcctagactgaaacaggtatcagcagatgttgcacacaaacttggtataccttgctacaatagcagattctaat

SEQ ID NO: 188341 - DNA, 1840 bp, Homo sapiens
  Payload ID: 17060
  Gene Symbol: SS18
  Gene Name: synovial sarcoma translocation, chromosome 18
  ENST ID: ENST00000579640
  CDS Start-End: 42-218
cggagcgctcgggacttgccgatagtggtgacggcggcaacatgtctgtggctttcgcggccccgaggcagcgaggcaagggggagatcactcccgctgcgattcagaagatgttggatgacaataaccatcttattcagtgtataatggactctcagaataaaggaaagacctcagagtgttctcaggtgagtccaaactattccagagttgcataaatttcaaacaacaaaaaaaattagtgtcgatcattcatcgtaatttaaaagagttgtttaaatctgtagtttggaagataacttttattctataaagtgcattcccgttgtctaataaatattcatagcttctaggtatcagcagatgttgcacacaaacttggtataccttgctacaatagcagattctaatcaaaatatgcagtctcttttaccagcaccacccacacagaatatgcctatgggtcctggagggatgaatcagagcggccctcccccacctccacgctctcacaacatgccttcagatggaatggtaggtgggggtcctcctgcaccgcacatgcagaaccagatgaacggccagatgcctgggcctaaccatatgcctatgcagggacctggacccaatcaactcaatatgacaaacagttccatgaatatgccttcaagtagccatggatccatgggaggttacaaccattctgtgccatcatcacagagcatgccagtacagaatcagatgacaatgagtcagggacaaccaatgggaaactatggtcccagaccaaatatgagtatgcagccaaaccaaggtccaatgatgcatcagcagcctccttctcagcaatacaatatgccacagggaggcggacagcattaccaaggacagcagccacctatgggaatgatgggtcaagttaaccaaggcaatcatatgatgggtcagagacagattcctccctatagacctcctcaacagggcccaccacagcagtactcaggccaggaagactattacggggaccaatacagtcatggtggacaaggtcctccagaaggcatgaaccagcaatattaccctgatggaaattcacagtatggccaacagcaagatgcataccagggaccacctccacaacagggatatccaccccagcagcagcagtacccagggcagcaaggttacccaggacagcagcagggctacggtccttcacagggtggtccaggtcctcagtatcctaactacccacagggacaaggtcagcagtatggaggatatagaccaacacagcctggaccaccacagccaccccagcagaggccttatggatatgaccagggacagtatggaaattaccagcagtgaaaaagtacttacattccagtagccagtatctattagcagccatattgtcacctcagcactgtggacacctccctgtgaagagatccttccattccatctagtttttggaaaaaccttgtggataagtggctgtttcatcagtaagcagcctttgtggtttagttataaaaggctttagtagctcaaaaatactcttgatttcacatttctactctagatggcaacattggacagaaaatgcaatgacataaccaatttgtaatgattttggaactgtgtttcaaatggactgttacagactgaaaggtgtgaacagctttgtatgtttatgaagggtaagggaatttaatacttttccacagatttttttgtaaggggaagagggaaatgtacactttttacagcagcaatattttgtatattatgtttatttcatgtggtgaatatgcaaggcggtacactacgcact

SEQ ID NO: 188342 - DNA, 646 bp, Homo sapiens
  Payload ID: 17060
  Gene Symbol: SS18
  Gene Name: synovial sarcoma translocation, chromosome 18
  ENST ID: ENST00000579061
  CDS Start-End: 190-646
agatgctccacggatttgcacgaactcccgagtcttgacctccctcccctctccgggctgccgggacaactcggggcggccactcttgccaggaggcgtaagtaaggatgaagttggaaaaactgaactaggtctagggcacgctctgcaacacagtcggggagacgcttcagagggccggagagggagatgttggatgacaataaccatcttattcagtgtataatggactctcagaataaaggaaagacctcagagtgttctcagtatcagcagatgttgcacacaaacttggtataccttgctacaatagcagattctaatcaaaatatgcagtctcttttaccagcaccacccacacagaatatgcctatgggtcctggagggatgaatcagagcggccctcccccacctccacgctctcacaacatgccttcagatggaatggtaggtgggggtcctcctgcaccgcacatgcagaaccagatgaacggccagatgcctgggcctaaccatatgcctatgcagggacctggacccaatcaactcaatatgacaaacagttccatgaatatgccttcaagtagccatggatccatgggaggttacaaccattctgtgccatcatcacagagcatgccagtac

SEQ ID NO: 188343 - DNA, 1545 bp, Homo sapiens
  Payload ID: 17060
  Gene Symbol: SS18
  Gene Name: synovial sarcoma translocation, chromosome 18
  ENST ID: ENST00000585121
  CDS Start-End: 29-283
acttgccgatagtggtgacggcggcaacatgtctgtggctttcgcggccccgaggcagcgaggcaagggggagatcactcccgctgcgattcagaagatgttggatgacaataaccatcttattcagtgtataatggactctcagaataaaggaaagacctcagagtgttctcaggtcatgaataaaccacatctgttagtatggtttggtcagtggtcctcagaaaatctcatgtcgtgcaaccatactaatactcaagcaaaggaaaacttgaaggcctagactgaaacaggtatcagcagatgttgcacacaaacttggtataccttgctacaatagcagattctaatcaaaatatgcagtctcttttaccagcaccacccacacagaatatgcctatgggtcctggagggatgaatcagagcggccctcccccacctccacgctctcacaacatgccttcagatggaatggtaggtgggggtcctcctgcaccgcacatgcagaaccagatgaacggccagatgcctgggcctaaccatatgcctatgcagggacctggacccaatcaactcaatatgacaaacagttccatgaatatgccttcaagtagccatggatccatgggaggttacaaccattctgtgccatcatcacagagcatgccagtacagaatcagatgacaatgagtcagggacaaccaatgggaaactatggtcccagaccaaatatgagtatgcagccaaaccaaggtccaatgatgcatcagcagcctccttctcagcaatacaatatgccacagggaggcggacagcattaccaaggacagcagccacctatgggaatgatgggtcaagttaaccaaggcaatcatatgatgggtcagagacagattcctccctatagacctcctcaacagggcccaccacagcagtactcaggccaggaagactattacggggaccaatacagtcatggtggacaaggtcctccagaaggcatgaaccagcaatattaccctgatggaaattcacagtatggccaacagcaagatgcataccagggaccacctccacaacagggatatccaccccagcagcagcagtacccagggcagcaaggttacccaggacagcagcagggctacggtccttcacagggtggtccaggtcctcagtatcctaactacccacagggacaaggtcagcagtatggaggatatagaccaacacagcctggaccaccacagccaccccagcagaggccttatggatatgaccagggacagtatggaaattaccagcagtgaaaaagtacttacattccagtagccagtatctattagcagccatattgtcacctcagcactgtggacacctccctgtgaagagatccttccattccatctagtttttggaaaaaccttgtggataagtggctgtttcatcagtaagcagcctttgtggtttagttataaaaggctttagtagctcaaaaatactcttgatttcacatttctactctagatggcaacattggacag

SEQ ID NO: 188344 - DNA, 588 bp, Homo sapiens
  Payload ID: 17060
  Gene Symbol: SS18
  Gene Name: synovial sarcoma translocation, chromosome 18
  ENST ID: ENST00000581021
  CDS Start-End: 379-588
actttggcgtcgccccgccccgcgtgccgcggctgcttcgtgcggaccccaccgcgggtcgcggcaggcagaggggaagtcggtgcgctggtcgccgccctgcaaactcagccgagtttgggagctcgcaggaggacttggggaacgctggagggaaccttagtatagagtttgaggagcgggcaaggaaggtccccatggactctggggttgtccccagagcctcttcttcccttctgcatcgccgcctattcatttattctgcagcaaatatttattgagcgcctattttaggcgctgaggctactgtggtgagtcatggtccttgccttcctggagcttacagtctaatggtggagactgtcgtgaccagttaatatgttggatgacaataaccatcttattcagtgtataatggactctcagaataaaggaaagacctcagagtgttctcagtatcagcagatgttgcacacaaacttggtataccttgctacaatagcagattctaatcaaaatatgcagtctcttttaccagcaccacccacacagaatatgcctatgggtcctggagggatgaatcagagc

SEQ ID NO: 188345 - DNA, 510 bp, Homo sapiens
  Payload ID: 17060
  Gene Symbol: SS18
  Gene Name: synovial sarcoma translocation, chromosome 18
  ENST ID: ENST00000577572
  CDS Start-End: 57-263
agtttgccgttcacccggagcgctcgggacttgccgatagtggtgacggcggcaacatgtctgtggctttcgcggccccgaggcagcgaggcaagggggagatcactcccgctgcgattcagaagatgttggatgacaataaccatcttattcagtgtataatggactctcagaataaaggaaagacctcagagtgttctcattggagattgcctattcattgccttctctatatgctgtgtcctgatagatgggtagtataaacacagtgggcctaagttgttggtcattgctacagtagtgaaaaggaaaaaaaggtatcagcagatgttgcacacaaacttggtataccttgctacaatagcagattctaatcaaaatatgcagtctcttttaccagcagtgtgattcaagtaaggtgaaggaacacatgcttagagctgtggaacattttgaagattagcagccacccacacagaatatgcctatgggtcctggagggatgaatca

SEQ ID NO: 188346 - DNA, 531 bp, Homo sapiens
  Payload ID: 17060
  Gene Symbol: SS18
  Gene Name: synovial sarcoma translocation, chromosome 18
  ENST ID: ENST00000582792
  CDS Start-End: 29-313
acttgccgatagtggtgacggcggcaacatgtctgtggctttcgcggccccgaggcagcgaggcaagggggagatcactcccgctgcgattcagaagatgttggatgacaataaccatcttattcagtgtataatggactctcagaataaaggaaagacctcagagtgttctcatacaaaaattggctggacgtggtggtggatacctgtaatcccaactgcttgggaggctgaggcaggagaatcacttgaacctgggaggcggagattacaagtgagccaagatcgcaccactgcactccagcctagctgacagtatcagcagatgttgcacacaaacttggtataccttgctacaatagcagattctaatcaaaatatgcagtctcttttaccagcaccacccacacagaatatgcctatgggtcctggagggatgaatcagagcggccctcccccacctccacgctctcacaacatgccttcagatggaatggtaggtgggggtcctcctgcaccgcacatgcagaa

SEQ ID NO: 188347 - DNA, 580 bp, Homo sapiens
  Payload ID: 17060
  Gene Symbol: SS18
  Gene Name: synovial sarcoma translocation, chromosome 18
  ENST ID: ENST00000577636
  CDS Start-End: 98-265
agatgctccacggatttgcacgaactcccgagtcttgacctccctcccctctccgggctgccgggacaactcggggcggccactcttgccaggaggcatgttggatgacaataaccatcttattcagtgtataatggactctcagaataaaggaaagacctcagagtgttctcagtatcagcagatgttgcacacaaacttggtataccttgctacaatagcagattctaatcaaaatatgcagtctcttttaccagcagtgtgattcaagtaaggtgaaggaacacatgcttagagctgtggaacattttgaagattagcagccacccacacagaatatgcctatgggtcctggagggatgaatcagagcggccctcccccacctccacgctctcacaacatgccttcagatggaatggtaggtgggggtcctcctgcaccgcacatgcagaaccagatgaacggccagatgcctgggcctaaccatatgcctatgcagggacctggacccaatcaactcaatatgacaaacagttccatgaatatgccttcaagtagccatggatccatgggaggtta

SEQ ID NO: 188348 - DNA, 663 bp, Homo sapiens
  Payload ID: 17060
  Gene Symbol: SS18
  Gene Name: synovial sarcoma translocation, chromosome 18
  ENST ID: ENST00000584083
  CDS Start-End: 273-663
gtgcggaccccaccgcgggtcgcggcaggcagaggggaagtcggtgcgctggtcgccgccctgcaaactcagccgagtttgggagctcgcaggaggacttggggaacgctggagggaaccttagtatagagtttgaggagcgggcaaggaaggtccccatggactctggggttgtccccagagcctcttcttcccttctgcatcgccgcctattcatttattctgcagcaaatatttattgagcgcctattttaggcgctgaggctactgtgatgttggatgacaataaccatcttattcagtgtataatggactctcagaataaaggaaagacctcagagtgttctcagtatcagcagatgttgcacacaaacttggtataccttgctacaatagcagattctaatcaaaatatgcagtctcttttaccagcaccacccacacagaatatgcctatgggtcctggagggatgaatcagagcggccctcccccacctccacgctctcacaacatgccttcagatggaatggtaggtgggggtcctcctgcaccgcacatgcagaaccagatgaacggccagatgcctgggcctaaccatatgcctatgcagggacctggacccaatcaactcaatatgacaaacagttccatgaatatgcctt

SEQ ID NO: 188349 - DNA, 547 bp, Homo sapiens
  Payload ID: 17060
  Gene Symbol: SS18
  Gene Name: synovial sarcoma translocation, chromosome 18
  ENST ID: ENST00000580751
  CDS Start-End: 57-239
agtttgccgttcacccggagcgctcgggacttgccgatagtggtgacggcggcaacatgtctgtggctttcgcggccccgaggcagcgaggcaagggggagatcactcccgctgcgattcagaagatgttggatgacaataaccatcttattcagtgtataatggactctcagaataaaggaaagacctcagagtgttctcaatctggccagtgggagcccctcaagctggcttcttgatatgtcttcattattttttgaacatttacttattttcttataccacaaaatgttctaggctcatcctggtttttttttcctgtgcagcatatctctttttttctgtagttggagattgcctattcattgccttctctatatgctgtgtcctgatagatgggtagtataaacacagtgggcctaagttgttggtcattgctacagtagtgaaaaggaaaaaaaggtatcagcagatgttgcacacaaacttggtataccttgctacaatagcagattctaatcaaaatatgcagtctcttttaccagca

SEQ ID NO: 188350 - DNA, 571 bp, Homo sapiens
  Payload ID: 17060
  Gene Symbol: SS18
  Gene Name: synovial sarcoma translocation, chromosome 18
  ENST ID: ENST00000581570
  CDS Start-End: 40-222
gagcgctcgggacttgccgatagtggtgacggcggcaacatgtctgtggctttcgcggccccgaggcagcgaggcaagggggagatcactcccgctgcgattcagaagatgttggatgacaataaccatcttattcagtgtataatggactctcagaataaaggaaagacctcagagtgttctcaatctggccagtgggagcccctcaagctggcttcttgatatgtcttcattattttttgaacatttacttattttcttataccacaaaatgttctaggctcatcctggtttttttttcctgtgcagggtgagtccaaactattccagagttgcataaatttcaaacaacaaaaaaaattagtgtcgatcattcatcgtaatttaaaagagttgtttaaatctgtagtttggaagataacttttattctataaagtgcattcccgttgtctaataaatattcatagcttctaggtatcagcagatgttgcacacaaacttggtataccttgctacaatagcagattctaatcaaaatatgcagtctcttttaccagcaccacccacaca

SEQ ID NO: 188351 - DNA, 585 bp, Homo sapiens
  Payload ID: 17060
  Gene Symbol: SS18
  Gene Name: synovial sarcoma translocation, chromosome 18
  ENST ID: ENST00000582448
  CDS Start-End: 98-205
agatgctccacggatttgcacgaactcccgagtcttgacctccctcccctctccgggctgccgggacaactcggggcggccactcttgccaggaggcatgttggatgacaataaccatcttattcagtgtataatggactctcagaataaaggaaagacctcagagtgttctcaggtgagtccaaactattccagagttgcataaatttcaaacaacaaaaaaaattagtgtcgatcattcatcgtaatttaaaagagttgtttaaatctgtagtttggaagataacttttattctataaagtgcattcccgttgtctaataaatattcatagcttctagcatatctctttttttctgtagttggagattgcctattcattgccttctctatatgctgtgtcctgatagatgggtagtataaacacagtgggcctaagttgttggtcattgctacagtagtgaaaaggaaaaaaaggtatcagcagatgttgcacacaaacttggtataccttgctacaatagcagattctaatcaaaatatgcagtctcttttaccagcaccacccacacagaatatgcctatg

SEQ ID NO: 188352 - DNA, 756 bp, Homo sapiens
  Payload ID: 17060
  Gene Symbol: SS18
  Gene Name: synovial sarcoma translocation, chromosome 18
  ENST ID: ENST00000578954
  CDS Start-End: 84-266
agcccgagaggccggcgtctctcccccagtttgccgttcacccggagcgctcgggacttgccgatagtggtgacggcggcaacatgtctgtggctttcgcggccccgaggcagcgaggcaagggggagatcactcccgctgcgattcagaagatgttggatgacaataaccatcttattcagtgtataatggactctcagaataaaggaaagacctcagagtgttctcaatctggccagtgggagcccctcaagctggcttcttgatatgtcttcattattttttgaacatttacttattttcttataccacaaaatgttctaggctcatcctggtttttttttcctgtgcaggtatcagcagatgttgcacacaaacttggtataccttgctacaatagcagattctaatcaaaatatgcagtctcttttaccagcaccacccacacagaatatgcctatgggtcctggagggatgaatcagagcggccctcccccacctccacgctctcacaacatgccttcagatggaatggtaggtgggggtcctcctgcaccgcacatgcagaaccagatgaacggccagatgcctgggcctaaccatatgcctatgcagggacctggacccaatcaactcaatatgacaaacagttccatgaatatgccttcaagtagccatggatccatgggaggttacaaccattctgtgccatcatcacagagcatgccagtacagaatcagatgacaatgagtcag

SEQ ID NO: 188353 - DNA, 575 bp, Homo sapiens
  Payload ID: 17060
  Gene Symbol: SS18
  Gene Name: synovial sarcoma translocation, chromosome 18
  ENST ID: ENST00000578700
  CDS Start-End: 122-259
cttccacctctgccctatctcggcagatgctccacggatttgcacgaactcccgagtcttgacctccctcccctctccgggctgccgggacaactcggggcggccactcttgccaggaggcatgttggatgacaataaccatcttattcagtgtataatggactctcagaataaaggaaagacctcagagtgttctcattggagattgcctattcattgccttctctatatgctgtgtcctgatagatgggtagtataaacacagtgggcctaagttgttggtcattgctacagtagtgaaaaggaaaaaaaggtatcagcagatgttgcacacaaacttggtataccttgctacaatagcagattctaatcaaaatatgcagtctcttttaccagcaccacccacacagaatatgcctatgggtcctggagggatgaatcagagcggccctcccccacctccacgctctcacaacatgccttcagatggaatggtaggtgggggtcctcctgcaccgcacatgcagaaccagatgaacggccagatgcctgggcctaaccatatgcctatgcag

SEQ ID NO: 188354 - DNA, 1298 bp, Homo sapiens
  Payload ID: 17061
  Gene Symbol: SSX1
  Gene Name: synovial sarcoma, X breakpoint 1
  Uniprot ID: Q16384
  ENST ID: ENST00000376919
  CDS Start-End: 137-703
tcctggagcaatgacattgcagaatattttctcctcctccagccacactttgtcaccaactgctgccaactcgccaccactgctgccgacctcgcaaccactgctttgtctctgaagtgagactgctcctggtgccatgaacggagacgacacctttgcaaagagacccagggatgatgctaaagcatcagagaagagaagcaaggcctttgatgatattgccacatacttctctaagaaagagtggaaaaagatgaaatactcggagaaaatcagctatgtgtatatgaagagaaactataaggccatgactaaactaggtttcaaagtcaccctcccacctttcatgtgtaataaacaggccacagacttccaggggaatgattttgataatgaccataaccgcaggattcaggttgaacatcctcagatgactttcggcaggctccacagaatcatcccgaagatcatgcccaagaagccagcagaggacgaaaatgattcgaagggagtgtcagaagcatctggcccacaaaacgatgggaaacaactgcaccccccaggaaaagcaaatatttctgagaagattaataagagatctggacccaaaagggggaaacatgcctggacccacagactgcgtgagagaaagcagctggtgatttatgaagagatcagtgaccctgaggaagatgacgagtaactcccctgggggatacgacacatgcccttgatgagaagcagaacgtggtgacctttcacgaacatgggcatggctgcggctccctcgtcatcaggtgcatagcaagtgaaagcaagtgttcacaacggtgaaacttgagcgtcatttttcttagtgtgccaagagttcgatgttagtgtttccattgtattttcttacagtgtgccattctgttagatactatccttataattgatgagcaagacatactgaatgcatatttcggtttgtgtatccatgcacctacgtcagaaaacaagtattgtcaggtattctctccatagaacagcactatcctcatctctccccagatgtgactactgagggcagttctgagtgtttaatttcagactttttcctctgcatttacacacacacacacacacacacgcacacacacacaccaagtaccagtataagcatctcccatctgcttttcccattgccatgcgtcctggtcaagcccccctcactctgtttcctgttcagcatgtactcccctcatccgattcccctgtatcagtcactgacagttaataaacctttgcaaacgttc

SEQ ID NO: 188355 - DNA, 1292 bp, Homo sapiens
  Payload ID: 17062
  Gene Symbol: SSX2
  Gene Name: synovial sarcoma, X breakpoint 2
  Uniprot ID: Q16385
  ENST ID: ENST00000337502
  CDS Start-End: 99-665
actttctctctctttcgattcttccatactcagagtacgcacggtctgattttctctttggattcttccaaaatcagagtcagactgctcccggtgccatgaacggagacgacgcctttgcaaggagacccacggttggtgctcaaataccagagaagatccaaaaggccttcgatgatattgccaaatacttctctaaggaagagtgggaaaagatgaaagcctcggagaaaatcttctatgtgtatatgaagagaaagtatgaggctatgactaaactaggtttcaaggccaccctcccacctttcatgtgtaataaacgggccgaagacttccaggggaatgatttggataatgaccctaaccgtgggaatcaggttgaacgtcctcagatgactttcggcaggctccagggaatctccccgaagatcatgcccaagaagccagcagaggaaggaaatgattcggaggaagtgccagaagcatctggcccacaaaatgatgggaaagagctgtgccccccgggaaaaccaactacctctgagaagattcacgagagatctggacccaaaaggggggaacatgcctggacccacagactgcgtgagagaaaacagctggtgatttatgaagagatcagcgaccctgaggaagatgacgagtaactcccctcagggatacgacacatgcccatgatgagaagcagaacgtggtgacctttcacgaacatgggcatggctgcggacccctcgtcatcaggtgcatagcaagtgaaagcaagtgttcacaacagtgaaaagttgagcgtcatttttcttagtgtgccaagagttcgatgttagcgtttacgttgtattttcttacactgtgtcattctgttagatactaacattttcattgatgagcaagacatacttaatgcatattttggtttgtgtatccatgcacctaccttagaaaacaagtattgtcggttacctctgcatggaacagcattaccctcctctctccccagatgtgactactgagggcagttctgagtgtttaatttcagattttttcctctgcatttacacacacacgcacacaaaccacaccacacacacacacacacacacacacacacacacacacacacaccaagtaccagtataagcatctgccatctgcttttcccattgccatgcgtcctggtcaagctcccctcactctgtttcctggtcagcatgtactcccctcatccgattcccctgtagcagtcactgacagttaataaacctttgcaaacgttc

SEQ ID NO: 188356 - DNA, 1410 bp, Homo sapiens
  Payload ID: 17062
  Gene Symbol: SSX2
  Gene Name: synovial sarcoma, X breakpoint 2
  Uniprot ID: Q16385
  ENST ID: ENST00000336777
  CDS Start-End: 71-742
ctcagagtacgcacggtctgattttctctttggattcttccaaaatcagagtcagactgctcccggtgccatgaacggagacgacgcctttgcaaggagacccacggttggtgctcaaataccagagaagatccaaaaggccttcgatgatattgccaaatacttctctaaggaagagtgggaaaagatgaaagcctcggagaaaatcttctatgtgtatatgaagagaaagtatgaggctatgactaaactaggtttcaaggccaccctcccacctttcatgtgtaataaacgggccgaagacttccaggggaatgatttggataatgaccctaaccgtgggaatcaggttgaacgtcctcagatgactttcggcaggctccagggaatctccccgaagatcatgcccaagaagccagcagaggaaggaaatgattcggaggaagtgccagaagcatctggcccacaaaatgatgggaaagagctgtgccccccgggaaaaccaactacctctgagaagattcacgagagatctggaaatagggaggcccaagaaaaggaagagagacgcggaacagctcatcggtggagcagtcagaacacacacaacattggtcgattcagtttgtcaacttctatgggtgcagttcatggtacccccaaaacaattacacacaacagggacccaaaaggggggaacatgcctggacccacagactgcgtgagagaaaacagctggtgatttatgaagagatcagcgaccctgaggaagatgacgagtaactcccctcagggatacgacacatgcccatgatgagaagcagaacgtggtgacctttcacgaacatgggcatggctgcggacccctcgtcatcaggtgcatagcaagtgaaagcaagtgttcacaacagtgaaaagttgagcgtcatttttcttagtgtgccaagagttcgatgttagcgtttacgttgtattttcttacactgtgtcattctgttagatactaacattttcattgatgagcaagacatacttaatgcatattttggtttgtgtatccatgcacctaccttagaaaacaagtattgtcggttacctctgcatggaacagcattaccctcctctctccccagatgtgactactgagggcagttctgagtgtttaatttcagattttttcctctgcatttacacacacacgcacacaaaccacaccacacacacacacacacacacacacacacacacacacacacaccaagtaccagtataagcatctgccatctgcttttcccattgccatgcgtcctggtcaagctcccctcactctgtttcctggtcagcatgtactcccctcatccgattcccctgtagcagtcactgacagttaataaacctttgcaaacgttc

SEQ ID NO: 188357 - DNA, 764 bp, Homo sapiens
  Payload ID: 17062
  Gene Symbol: SSX2
  Gene Name: synovial sarcoma, X breakpoint 2
  ENST ID: ENST00000610779
  CDS Start-End: 90-656
tcactgacttctccctccacaggatcaaagctgctgtggctggaaagactcaggctatttctcttgcaggtcagactgctcccggtgccatgaacggagacgacgcctttgcaaggagacccacggttggtgctcaaataccagagaagatccaaaaggccttcgatgatattgccaaatacttctctaaggaagagtgggaaaagatgaaagcctcggagaaaatcttctatgtgtatatgaagagaaagtatgaggctatgactaaactaggtttcaaggccaccctcccacctttcatgtgtaataaacgggccgaagacttccaggggaatgatttggataatgaccctaaccgtgggaatcaggttgaacgtcctcagatgactttcggcaggctccagggaatctccccgaagatcatgcccaagaagccagcagaggaaggaaatgattcgaagggagtgccagaagcatctggctcacagaacgatgggaaacacctgtgccctccaggaaaaccaagtacctctgagaagattaacaagacatccggacccaaaagggggaaacatgcctggacccacagactgcgtgagagaaagcagctggtgatttatgaagagatcagcgaccctgaagaagacgacgagtaactcccctcggggatacgacatatgcccatgatgagaagcagaacgtggtgacctttcacgaacatgggcatggctgcggacccctcgtcatcaggtgcatagcaagtg

SEQ ID NO: 188358 - DNA, 5835 bp, Homo sapiens
  Payload ID: 17063
  Gene Symbol: SSX2IP
  Gene Name: synovial sarcoma, X breakpoint 2 interacting protein
  Uniprot ID: Q9Y2D8
  ENST ID: ENST00000342203
  CDS Start-End: 265-2109
cctcggaaacctgcggaggccgggaggcggctgcaaggggcggggaaggcgggagcccgcagcggaggaggggccgcgggcgggaggcgctgcgaggcgctgctggccctcgggctgcgggagccgggctaggacgccgagcggtgactccccgccgctcccgggggccgtgacggagatgcctacatagaagagtgacagcagctagactaaatgtttaactgctgaactagttcctcaggtatcctggctctagagattgctatgggagattggatgactgttacagatccaggtctgtcttcagaaagcaaaactatctctcaatatacctcagaaacaaagatgtctccatcaagtttatactcacagcaagtgctatgttcttcaatacctttatcgaaaaatgtgcacagttttttcagtgccttctgcacagaagataatattgaacagagtatctcatatcttgatcaggaattgactacttttggttttccttcattatatgaagaatccaaaggtaaagagacaaagagagagttaaatatagtagctgtactaaattgtatgaatgagctgcttgtgcttcagcggaagaaccttctagctcaggaaaatgtggagacacagaatttgaagctgggaagtgatatggaccatctacagagctgctactcaaaacttaaggaacaactggaaacctccaggagggaaatgattgggcttcaggaaagagacagacagttacaatgtaagaacaggaatttgcatcagctactaaagaatgagaaagatgaggtgcaaaaattacaaaatatcattgcaagtcgagctactcagtataatcatgatatgaagagaaaagagcgtgaatataataaactgaaggaacgtctacatcaacttgttatgaacaagaaagataagaaaatagctatggacattttgaattatgtcgggagagctgatggaaaaagaggctcctggaggactggtaaaactgaagccaggaatgaagatgaaatgtataaaattctcttgaatgattatgaatatcgtcagaaacaaatcctaatggaaaatgcagaacttaagaaggttcttcaacaaatgaaaaaggaaatgatttctcttctttctccccaaaagaagaaacctagagaaagagtagatgatagtacaggaactgttatttccgatgttgaagaagatgccggggaactaagcagagagagtatgtgggacctttcctgtgaaactgtgagagagcagcttacaaacagcatcagaaaacagtggagaattttgaaaagtcatgtagaaaagcttgataaccaagtttcaaaggtacacctggaaggttttaatgatgaagatgtaatctcacgacaagaccatgaacaagaaactgaaaaactcgagttagaaattcagcagtgtaaagaaatgattaaaactcagcaacagcttttacagcagcagctcgctactgcatatgatgatgataccacttcactattacgagactgttatttgttggaagaaaaggaacgtctcaaagaagaatggtccctttttaaagagcagaaaaagaattttgagagggagagacgaagctttacagaagccgctattcgcctgggattggagagaaaggcatttgaagaagaaagagccagttggttaaagcagcagtttctaaatatgactacctttgaccaccagaactcagaaaatgtgaaacttttcagtgccttctcaggaagttctgattgggacaatcttatagtgcactcgaggcagccgcaaaagaagcctcacagtgtgtctaatgggtctccagtttgcatgtctaaacttactaaatctcttcctgcttcaccttccacttcagacttttgccagacacgttcctgcatatctgaacatagttcaatcaatgtactgaatataactgctgaagaaattaaaccaaatcaggttggaggagaatgtacaaatcaaaaatggagtgtggcatcaagacctggatcacaggaaggttgctatagtggatgctccttgagctacacaaattctcatgtagaaaaagatgacttaccttagacatgtggactggaatttttttcattaatgtgttcatcaagtttcacatctaagttgaaacagggtgtgtcataaagtcagttatctctaataacttaagatggtctgagttgtttgtttggacttccctgtcttcccccaaagagttgaaatcttaaatctatttaaaaggatataaaagctttggatatgtatttttagtaacagaagcatctggttctgtgaataaaggaatgtatagatgtttggatggaaacaaaagcactagactgagtttcctcttataggtattaaaaatagcacttttaggaaactgattattgtaaatgtttaattttgtctcaaatatagttggcattggaagtttagcctttacttgaatgtatactgtagatttttaacaaagcgagttctatatttattatgtttagtgtggtttgaaattacctctttcatatgttttaaataaagtgaaatttatgtatgttttgtacatagatacacatgattatgttaagaggctttaagatttaaaagtttcacacaaccataagtatagtatttcatgccagtaaaatttttttagtggtattctgtttacagatgtattaggaccattgatgcattacatttaagaattctctttaatacatctgggcaataaatattgaaaggtattccatgaagctgagttctttagataatcaacactactaacattacatttttgagatttttatgacattagatttttattttgtatatgtagaatattataatttttaaaaggactattgatgatagaagaataggggcaagacgacaaaagtacctttgaataaaacaatttaagaaattggtttaagatattggatgatagaagatatttaagatatctagatggtgatattttccttacaagatgggtaccagtatagtaatatctgtatactaactagggctttgtattgtcaataattttttaataattttttaatgaggtatttaccactgaagaaatatgataatataaaaccatcaaattttataattgagatgatactctggaaaaacatgtcatttcattttcagaaaactcttaagctctcttcagtctctgtaatgtttctgattgcatgtttcttcatgaaaagtatgttgttgttttgatagtaataataataaatgtaggctcagctctttcccaggattttcatcaaaaagctttaagtgcctaaccctgcttgtctctgtacatagaagcctgcacagatccaacccttgctaggtatcatagtttaggcccatttaccttcccctgtactggcagttcagccgcttacatgcactcaccctgtttgtggctattttaaattcatattattaaaaaacaaaaaaaacccacctatttgtgttgtccattcactatacgtaactatgtaactctttggagttgcatagcagcagccattttttcagggctgataggatatcattaagagtgtcttatgagacattagtggatatactcatagtaaccatatttatagttttaaagagctagctcttgagcattagtcactaccttcagcttgatgcatggtcacttctttactatttaaaatactacacattgtacaaaatatcgaagacactaccatatgctaaaggaagaaatctagctgggatataggatttttgttgtttttgtttttgtttgttttgctatttagcaataacatggtcaaaaaggcaatcagaaattttaaatacagttaatggatacatttggcaacaattttcccccgagggttttccatggtgtactttgcaagaaataagcactctaatttttaaagtaaatctcttattttagcaaatattatatttcatgacaatggagttctagaaagcagcatctgttttttgttgcgtgtttccattttaaagtgagttgagttctcaaattggaaagaaagattccttgagacgtacttttaaaatctaaagtgtgaaagaaacagcagagtaaaagccagactcattgcaccttcaatgtctgcatagatccagaagttgtacattttacctaacaacatcacttttgttgaacattccaactccagaatgatccccaatcaccctaatctcagaatgctggaatgatgtctgttggaaaacccaggactccacacacaaaactcctgggattttgtttcccatctctttctaggtgtttgcaatgtacaaataatacagctgtgctaatctcacatttagccatgatagatgatggttctagagtgtacttccatttgtaagtcctcctgataagtgctttcttgtttatcactatgtaaatctgaaatattttgtacttcatttgtttttatccattctgaattttcaaagcataaaaatgtcaaagaaaaattgagataaacattttgttcaccattaaatgtttgcatctgcagtctatgatgagaaacaatgaaattatgactaaaatttaacaaatagtattttcttatagaagcaatgtattaaatgattagatacacaggacagttcacagcaaattgtttacttacatggcataattgaaatactgttatttgtaaagagttctatactgcctaccttagctaaccagaattgttcatagacttgtgataatatggtgttatgggaaaacacattttgtgcgcatgatgaagagagcaccgtgaatctagtcttgactgcccctggtggaacatttgaaagcccttgggactccaggagagaggtttttgcagcatgtatgctaaatttgtgagttagcaagaccctgctgtgattactatgttgtacagatcttcaaagtatattgcctaatatgagtcatgttatttctagattgaatttaaagtaagtatggattatggaagtctagtaaatatacttttccctatttttgtcctttttcagtcttttggtaagcatttattaagtacctgctgtatgtcaaggcttactactgctttccaatccttggtgatatgaagacagataagcacgctgcctgctattaggaatctgagctgagtggaaggccaactattaaacctacattgtaataaacaatggtggatgctacggacacattcagtctgttcataaaacatggactgatgggtctgctccaggccacatttgttttttaacagtaacgtggctaggcttccatttataagtcttagcattatttcctttgtgaagtactatgtaacagatgattgtttgctagattttgttttctacaatcaaaatgttgacctgcaaagcagtgtaggattttctctcctcaagagcgtgtattattatctagtagaaaaagcattcccaaagacttggtccatgcagataaggataatgaaattgctcactctaatcctttttctaaatacagtgtttttcaagctggatgtaaattagagtgggtggatattgattaaattatttgatttatatgaaatcaaatgactggttgaggtttttttgaacatttacaaataatggattcctgagagctcaggaagtactgtaatgtcagtgacatatgaagctcctgataaagatccacctcattcatatatttgagcttcagaaatacatgtacctagtataatgcttaacagcacataatatttgttgatgagaaatacactgatgaaacaacac

SEQ ID NO: 188359 - DNA, 5843 bp, Homo sapiens
  Payload ID: 17063
  Gene Symbol: SSX2IP
  Gene Name: synovial sarcoma, X breakpoint 2 interacting protein
  Uniprot ID: Q9Y2D8
  ENST ID: ENST00000437941
  CDS Start-End: 354-2117
gggcgggaggcgctgcgaggcgctgctggccctcgggctgcgggagccgggctaggacgccgagcggtgactccccgccgctcccgggggccgtgacggtgagcagcagcgcctcgcgtcggggattgtgacgcgccccgccagggaggggcgggcgggggtgggcgccggcaaggggcgggcgcgcgcggaggtgagagccggcacctggctcagcgccccgttgttcggcgggaggctccgcgcggctgttggggccgttgcagggtgcgggcgagcgtcgacccgggccgctcctggaggaggaggtgggagaaagcaaaactatctctcaatatacctcagaaacaaagatgtctccatcaagtttatactcacagcaagtgctatgttcttcaatacctttatcgaaaaatgtgcacagttttttcagtgccttctgcacagaagataatattgaacagagtatctcatatcttgatcaggaattgactacttttggttttccttcattatatgaagaatccaaaggtaaagagacaaagagagagttaaatatagtagctgtactaaattgtatgaatgagctgcttgtgcttcagcggaagaaccttctagctcaggaaaatgtggagacacagaatttgaagctgggaagtgatatggaccatctacagagctgctactcaaaacttaaggaacaactggaaacctccaggagggaaatgattgggcttcaggaaagagacagacagttacaatgtaagaacaggaatttgcatcagctactaaagaatgagaaagatgaggtgcaaaaattacaaaatatcattgcaagtcgagctactcagtataatcatgatatgaagagaaaagagcgtgaatataataaactgaaggaacgtctacatcaacttgttatgaacaagaaagataagaaaatagctatggacattttgaattatgtcgggagagctgatggaaaaagaggctcctggaggactggtaaaactgaagccaggaatgaagatgaaatgtataaaattctcttgaatgattatgaatatcgtcagaaacaaatcctaatggaaaatgcagaacttaagaaggttcttcaacaaatgaaaaaggaaatgatttctcttctttctccccaaaagaagaaacctagagaaagagtagatgatagtacaggaactgttatttccgatgttgaagaagatgccggggaactaagcagagagagtatgtgggacctttcctgtgaaactgtgagagagcagcttacaaacagcatcagaaaacagtggagaattttgaaaagtcatgtagaaaagcttgataaccaagtttcaaaggtacacctggaaggttttaatgatgaagatgtaatctcacgacaagaccatgaacaagaaactgaaaaactcgagttagaaattcagcagtgtaaagaaatgattaaaactcagcaacagcttttacagcagcagctcgctactgcatatgatgatgataccacttcactattacgagactgttatttgttggaagaaaaggaacgtctcaaagaagaatggtccctttttaaagagcagaaaaagaattttgagagggagagacgaagctttacagaagccgctattcgcctgggattggagagaaaggcatttgaagaagaaagagccagttggttaaagcagcagtttctaaatatgactacctttgaccaccagaactcagaaaatgtgaaacttttcagtgccttctcaggaagttctgattgggacaatcttatagtgcactcgaggcagccgcaaaagaagcctcacagtgtgtctaatgggtctccagtttgcatgtctaaacttactaaatctcttcctgcttcaccttccacttcagacttttgccagacacgttcctgcatatctgaacatagttcaatcaatgtactgaatataactgctgaagaaattaaaccaaatcaggttggaggagaatgtacaaatcaaaaatggagtgtggcatcaagacctggatcacaggaaggttgctatagtggatgctccttgagctacacaaattctcatgtagaaaaagatgacttaccttagacatgtggactggaatttttttcattaatgtgttcatcaagtttcacatctaagttgaaacagggtgtgtcataaagtcagttatctctaataacttaagatggtctgagttgtttgtttggacttccctgtcttcccccaaagagttgaaatcttaaatctatttaaaaggatataaaagctttggatatgtatttttagtaacagaagcatctggttctgtgaataaaggaatgtatagatgtttggatggaaacaaaagcactagactgagtttcctcttataggtattaaaaatagcacttttaggaaactgattattgtaaatgtttaattttgtctcaaatatagttggcattggaagtttagcctttacttgaatgtatactgtagatttttaacaaagcgagttctatatttattatgtttagtgtggtttgaaattacctctttcatatgttttaaataaagtgaaatttatgtatgttttgtacatagatacacatgattatgttaagaggctttaagatttaaaagtttcacacaaccataagtatagtatttcatgccagtaaaatttttttagtggtattctgtttacagatgtattaggaccattgatgcattacatttaagaattctctttaatacatctgggcaataaatattgaaaggtattccatgaagctgagttctttagataatcaacactactaacattacatttttgagatttttatgacattagatttttattttgtatatgtagaatattataatttttaaaaggactattgatgatagaagaataggggcaagacgacaaaagtacctttgaataaaacaatttaagaaattggtttaagatattggatgatagaagatatttaagatatctagatggtgatattttccttacaagatgggtaccagtatagtaatatctgtatactaactagggctttgtattgtcaataattttttaataattttttaatgaggtatttaccactgaagaaatatgataatataaaaccatcaaattttataattgagatgatactctggaaaaacatgtcatttcattttcagaaaactcttaagctctcttcagtctctgtaatgtttctgattgcatgtttcttcatgaaaagtatgttgttgttttgatagtaataataataaatgtaggctcagctctttcccaggattttcatcaaaaagctttaagtgcctaaccctgcttgtctctgtacatagaagcctgcacagatccaacccttgctaggtatcatagtttaggcccatttaccttcccctgtactggcagttcagccgcttacatgcactcaccctgtttgtggctattttaaattcatattattaaaaaacaaaaaaaacccacctatttgtgttgtccattcactatacgtaactatgtaactctttggagttgcatagcagcagccattttttcagggctgataggatatcattaagagtgtcttatgagacattagtggatatactcatagtaaccatatttatagttttaaagagctagctcttgagcattagtcactaccttcagcttgatgcatggtcacttctttactatttaaaatactacacattgtacaaaatatcgaagacactaccatatgctaaaggaagaaatctagctgggatataggatttttgttgtttttgtttttgtttgttttgctatttagcaataacatggtcaaaaaggcaatcagaaattttaaatacagttaatggatacatttggcaacaattttcccccgagggttttccatggtgtactttgcaagaaataagcactctaatttttaaagtaaatctcttattttagcaaatattatatttcatgacaatggagttctagaaagcagcatctgttttttgttgcgtgtttccattttaaagtgagttgagttctcaaattggaaagaaagattccttgagacgtacttttaaaatctaaagtgtgaaagaaacagcagagtaaaagccagactcattgcaccttcaatgtctgcatagatccagaagttgtacattttacctaacaacatcacttttgttgaacattccaactccagaatgatccccaatcaccctaatctcagaatgctggaatgatgtctgttggaaaacccaggactccacacacaaaactcctgggattttgtttcccatctctttctaggtgtttgcaatgtacaaataatacagctgtgctaatctcacatttagccatgatagatgatggttctagagtgtacttccatttgtaagtcctcctgataagtgctttcttgtttatcactatgtaaatctgaaatattttgtacttcatttgtttttatccattctgaattttcaaagcataaaaatgtcaaagaaaaattgagataaacattttgttcaccattaaatgtttgcatctgcagtctatgatgagaaacaatgaaattatgactaaaatttaacaaatagtattttcttatagaagcaatgtattaaatgattagatacacaggacagttcacagcaaattgtttacttacatggcataattgaaatactgttatttgtaaagagttctatactgcctaccttagctaaccagaattgttcatagacttgtgataatatggtgttatgggaaaacacattttgtgcgcatgatgaagagagcaccgtgaatctagtcttgactgcccctggtggaacatttgaaagcccttgggactccaggagagaggtttttgcagcatgtatgctaaatttgtgagttagcaagaccctgctgtgattactatgttgtacagatcttcaaagtatattgcctaatatgagtcatgttatttctagattgaatttaaagtaagtatggattatggaagtctagtaaatatacttttccctatttttgtcctttttcagtcttttggtaagcatttattaagtacctgctgtatgtcaaggcttactactgctttccaatccttggtgatatgaagacagataagcacgctgcctgctattaggaatctgagctgagtggaaggccaactattaaacctacattgtaataaacaatggtggatgctacggacacattcagtctgttcataaaacatggactgatgggtctgctccaggccacatttgttttttaacagtaacgtggctaggcttccatttataagtcttagcattatttcctttgtgaagtactatgtaacagatgattgtttgctagattttgttttctacaatcaaaatgttgacctgcaaagcagtgtaggattttctctcctcaagagcgtgtattattatctagtagaaaaagcattcccaaagacttggtccatgcagataaggataatgaaattgctcactctaatcctttttctaaatacagtgtttttcaagctggatgtaaattagagtgggtggatattgattaaattatttgatttatatgaaatcaaatgactggttgaggtttttttgaacatttacaaataatggattcctgagagctcaggaagtactgtaatgtcagtgacatatgaagctcctgataaagatccacctcattcatatatttgagcttcagaaatacatgtacctagtataatgcttaacagcacataatatttgttgatgagaaatacactgatgaaacaacac

SEQ ID NO: 188360 - DNA, 759 bp, Homo sapiens
  Payload ID: 17063
  Gene Symbol: SSX2IP
  Gene Name: synovial sarcoma, X breakpoint 2 interacting protein
  ENST ID: ENST00000422026
  CDS Start-End: 220-759
agaagggggcggggagcagaaaacggccgggtgaatcactgggcgtaacaggtgccgcagccgcagctgcgcccgcagcgcgcgcggaccgcagggataaggtcttctttttctccgggtttttttggaggagatgcctacatagaagagtgacagcagctagactaaatgtttaactgctgaactagttcctcaggtatcctggctctagagattgctatgggagattggatgactgttacagatccaggtctgtcttcagaaagcaaaactatctctcaatatacctcagaaacaaagatgtctccatcaagtttatactcacagcaagtgctatgttcttcaatacctttatcgaaaaatgtgcacagttttttcagtgccttctgcacagaagataatattgaacagagtatctcatatcttgatcaggaattgactacttttggttttccttcattatatgaagaatccaaaggtaaagagacaaagagagagttaaatatagtagctgtactaaattgtatgaatgagctgcttgtgcttcagcggaagaaccttctagctcaggaaaatgtggagacacagaatttgaagctgggaagtgatatggaccatctacagagctgctactcaaaacttaaggaacaactggaaacctccaggagggaaatgattgggcttcaggaaagagacagacagttacaatgtaagaacaggaatttgcatcagctactaaagaatgagaaagatgaggtg

SEQ ID NO: 188361 - DNA, 2457 bp, Homo sapiens
  Payload ID: 17063
  Gene Symbol: SSX2IP
  Gene Name: synovial sarcoma, X breakpoint 2 interacting protein
  Uniprot ID: Q9Y2D8
  ENST ID: ENST00000481102
  CDS Start-End: 241-1923
gcgccggcaaggggcgggcgcgcgcggaggtgagagccggcacctggctcagcgccccgttgttcggcgggaggctccgcgcggctgttggggccgttgcagggtgcgggcgagcgtcgacccgggccgctcctggaggaggaggtgggaggagatgcctacatagaagagtgacagcagctagactaaatgtttaactgctgaactagttcctcaggtatcctggctctagagattgctatgggagattggatgactgttacagatccaggtctgtcttcagaaagcaaaactatctctcaatatacctcagaaacaaagatgtctccatcaagtttatactcacagcaagtgctatgttcttcaatacctttatcgaaaaatgtgcacagttttttcagtgccttctgcacagaagataatattgaacagagtatctcatatcttgatcaggaattgactacttttggttttccttcattatatgaagaatccaaaggtaaagagacaaagagagagttaaatatagtagctgtactaaattgtatgaatgagctgcttgtgcttcagcggaagaaccttctagctcaggaaaatgtggagacacagaatttgaagctgggaagtgatatggaccatctacagagctgctactcaaaacttaaggaacaactggaaacctccaggagggaaatgattgggcttcaggaaagagacagacagttacaatgtaagaacaggaatttgcatcagctactaaagaatgagaaagatgaggtgcaaaaattacaaaatatcattgcaagtcgagctactcagtataatcatgatatgaagagaaaagagcgtgaatataataaactgaaggaacgtctacatcaacttgttatgaacaagaaagataagaaaatagctatggacattttgaattatgtcgggagagctgatggaaaaagaggctcctggaggactggtaaaactgaagccaggaatgaagatgaaatgtataaaattctcttgaatgattatgaatatcgtcagaaacaaatcctaatggaaaatgcagaacttaagaaggttcttcaacaaatgaaaaaggaaatgatttctcttctttctccccaaaagaagaaacctagagaaagagtagatgatagtacaggaactgttatttccgatgttgaagaagatgccggggaactaagcagagagagtatgtgggacctttcctgtgaaactgtgagagagcagcttacaaacagcatcagaaaacagtggagaattttgaaaagtcatgtagaaaagcttgataaccaagtttcaaaggtacacctggaaggttttaatgatgaagatgtaatctcacgacaagaccatgaacaagaaactgaaaaactcgagttagaaattcagcagtgtaaagaaatgattaaaactcagcaacagcttttacagcagcagctcgctactgcatatgatgatgataccacttcactattacgagactgttatttgttggaagaaaaggaacgtctcaaagaagaatggtccctttttaaagagcagaaaaagaattttgagagggagagacgaagctttacagaagccgctattcgcctgggattggagagaaaggcatttgaagaagaaagagccagttggttaaagcagcagtttctaaatatgactacctttgaccaccagaactcagaaaatgtgaaacttttcagtgccttctcaggaagttctgattgggacaatcttatagtgcactcgaggcagccgcaaaagaagcctcacagtgtgtctaatgggtctccagtttgcatgtctaaacttactaaatctcttcctgcttcaccttccacttcagacttttgccagacacgttcctgcatatctgaacatagggcaaagaactgagaaaagcctgttcctgttgagtgaaaaagatttgtgcccaaggatgacagtgtaaaaaaacatggctctccaccctgggaaacccatatgttgctcttaattgctacattttggtgttttcctgtatctcaagttattatatcattttctaagataagatcaatactctgcttcagtgccaattccaagattagttttaaacgaagaagaggaagcaggtagaacattcctagtaagacagagaggaatagaaaagatcagagggttcaatcaatgtactgaatataactgctgaagaaattaaaccaaatcaggttggaggagaatgtacaaatcaaaaatggagtgtggcatcaagacctggatcacaggaaggttgctatagtggatgctccttgagctacacaaattctcatgtagaaaaagatgacttaccttagacatgtggactggaatttttttcattaatgtgttcatcaagtttcacatctaagttgaaacagggtgtgtcataaagtcagttatctctaataa

SEQ ID NO: 188362 - DNA, 1149 bp, Homo sapiens
  Payload ID: 17063
  Gene Symbol: SSX2IP
  Gene Name: synovial sarcoma, X breakpoint 2 interacting protein
  ENST ID: ENST00000603677
  CDS Start-End: 191-454
gggcgcgcgcggaggtgagagccggcacctggctcagcgccccgttgttcggcgggaggctccgcgcggctgttggggccgttgcagggtgcgggcgagcgtcgacccgggccgctcctggaggaggaggtgggagagaaaggcatttgaagaagaaagagccagttggttaaagcagcagtttctaaatatgactacctttgaccaccagaactcagaaaatgtgaaacttttcagtgccttctcaggaagttctgattgggacaatcttatagtgcactcgaggcagccgcaaaagaagcctcacagtgtgtctaatgggtctccagtttgcatgtctaaacttactaaatctcttcctgcttcaccttccacttcagacttttgccagacacgttcctgcatatctgaacataggtatttgtctataggtgatcttttcacgtgtttctaaaaattgctaaagttgcactgctaagggaaaggtggcatgtctgtagtattagcaacaatagagattttggagaggaatttagtagatgatttattcattctacaaatattgagtgtccagtatatatagacactgtgctagatgctggaaatacactagtgaacaggtagatctgttgtcttcttggaggtaaatcatatgatgtgtgtctttttatttcacatttaagatacaatttagaatgtagtcttaattataggagttaatattttaagcactttaattgtattaaatggaaggatattgttttgacagtttttgtagagtacatatcttaacacttttttccggcatgcccattttattgttgttgaagggcaaagaactgagaaaagcctgttcctgttgagtgaaaaagatttgtgcccaaggatgacagtgtaaaaaaacatggctctccaccctgggaaacccatatgttgctcttaattgctacattttggtgttttcctgtatctcaagttattatatcattttctaagataagatcaatactctgcttcagtgccaattccaagattagttttaaacgaagaagaggaagcaggtagaacattcctagtaagacagagaggaatagaaaagatcagaggggtaagttggaaagtatggtggtaatctctttgctcttaatt

SEQ ID NO: 188363 - DNA, 1933 bp, Homo sapiens
  Payload ID: 17063
  Gene Symbol: SSX2IP
  Gene Name: synovial sarcoma, X breakpoint 2 interacting protein
  Uniprot ID: Q9Y2D8
  ENST ID: ENST00000605755
  CDS Start-End: 113-1876
gctggccctcgggctgcgggagccgggctaggacgccgagcggtgactccccgccgctcccgggggccgtgacgaaagcaaaactatctctcaatatacctcagaaacaaagatgtctccatcaagtttatactcacagcaagtgctatgttcttcaatacctttatcgaaaaatgtgcacagttttttcagtgccttctgcacagaagataatattgaacagagtatctcatatcttgatcaggaattgactacttttggttttccttcattatatgaagaatccaaaggtaaagagacaaagagagagttaaatatagtagctgtactaaattgtatgaatgagctgcttgtgcttcagcggaagaaccttctagctcaggaaaatgtggagacacagaatttgaagctgggaagtgatatggaccatctacagagctgctactcaaaacttaaggaacaactggaaacctccaggagggaaatgattgggcttcaggaaagagacagacagttacaatgtaagaacaggaatttgcatcagctactaaagaatgagaaagatgaggtgcaaaaattacaaaatatcattgcaagtcgagctactcagtataatcatgatatgaagagaaaagagcgtgaatataataaactgaaggaacgtctacatcaacttgttatgaacaagaaagataagaaaatagctatggacattttgaattatgtcgggagagctgatggaaaaagaggctcctggaggactggtaaaactgaagccaggaatgaagatgaaatgtataaaattctcttgaatgattatgaatatcgtcagaaacaaatcctaatggaaaatgcagaacttaagaaggttcttcaacaaatgaaaaaggaaatgatttctcttctttctccccaaaagaagaaacctagagaaagagtagatgatagtacaggaactgttatttccgatgttgaagaagatgccggggaactaagcagagagagtatgtgggacctttcctgtgaaactgtgagagagcagcttacaaacagcatcagaaaacagtggagaattttgaaaagtcatgtagaaaagcttgataaccaagtttcaaaggtacacctggaaggttttaatgatgaagatgtaatctcacgacaagaccatgaacaagaaactgaaaaactcgagttagaaattcagcagtgtaaagaaatgattaaaactcagcaacagcttttacagcagcagctcgctactgcatatgatgatgataccacttcactattacgagactgttatttgttggaagaaaaggaacgtctcaaagaagaatggtccctttttaaagagcagaaaaagaattttgagagggagagacgaagctttacagaagccgctattcgcctgggattggagagaaaggcatttgaagaagaaagagccagttggttaaagcagcagtttctaaatatgactacctttgaccaccagaactcagaaaatgtgaaacttttcagtgccttctcaggaagttctgattgggacaatcttatagtgcactcgaggcagccgcaaaagaagcctcacagtgtgtctaatgggtctccagtttgcatgtctaaacttactaaatctcttcctgcttcaccttccacttcagacttttgccagacacgttcctgcatatctgaacatagttcaatcaatgtactgaatataactgctgaagaaattaaaccaaatcaggttggaggagaatgtacaaatcaaaaatggagtgtggcatcaagacctggatcacaggaaggttgctatagtggatgctccttgagctacacaaattctcatgtagaaaaagatgacttaccttagacatgtggactggaatttttttcattaatgtgttcatcaagtttcacatctaagttg

SEQ ID NO: 188364 - DNA, 2272 bp, Homo sapiens
  Payload ID: 17063
  Gene Symbol: SSX2IP
  Gene Name: synovial sarcoma, X breakpoint 2 interacting protein
  ENST ID: ENST00000476905
  CDS Start-End: 224-1738
aacaggtgccgcagccgcagctgcgcccgcagcgcgcgcggaccgcagggataaggtcttctttttctccgggtttttttggagatgaggaaagtgaggcccaaagaagatttatgttcaggaccatttagtctgagatgcctacatagaagagtgacagcagctagactaaatgtttaactgctgaactagttcctcaggtatcctggctctagagattgctatgggagattggatgactgttacagatccagaaagcaaaactatctctcaatatacctcagaaacaaagatgtctccatcaagtttatactcacagcaagtgctatgttcttcaatacctttatcgaaaaatgtgcacagttttttcagtgccttctgcacagaagataatattgaacagagtatctcatatcttgatcaggaattgactacttttggttttccttcattatatgaagaatccaaaggtaaagagacaaagagagagttaaatatagtagctgtactaaattgtatgaatgagctgcttgtgcttcagcggaagaaccttctagctcaggaaaatgtggagacacagaatttgaagctgggaagtgatatggaccatctacagagctgctactcaaaacttaaggaacaactggaaacctccaggagggaaatgattgggcttcaggaaagagacagacagttacaatgtaagaacaggaatttgcatcagctactaaagaatgagaaagatgaggtgcaaaaattacaaaatatcattgcaagtcgagctactcagtataatcatgatatgaagagaaaagagcgtgaatataataaactgaaggaacgtctacatcaacttgttatgaacaagaaagataagaaaatagctatggacattttgaattatgtcgggagagctgatggaaaaagaggctcctggaggactggtaaaactgaagccaggaatgaagatgaaatgtataaaattctcttgaatgattatgaatatcgtcagaaacaaatcctaatggaaaatgcagaacttaagaaggttcttcaacaaatgaaaaaggaaatgatttctcttctttctccccaaaagaagaaacctagagaaagagtagatgatagtacaggaactgttatttccgatgttgaagaagatgccggggaactaagcagagagagtatgtgggacctttcctgtgaaactgtgagagagcagcttacaaacagcatcagaaaacagtggagaattttgaaaagtcatgtagaaaagcttgataaccaagtttcaaaggtacacctggaaggttttaatgatgaagatgtaatctcacgacaagaccatgaacaagaaactgaaaaactcgagttagaaattcagcagtgtaaagaaatgattaaaactcagcaacagcttttacagcagcagctcgctactgcatatgatgatgataccacttcactattacgagactgttatttgttggaagaaaaggaacgtctcaaagaagaatggtccctttttaaagagcagaaaaagaattttgagagggagagacgaagctttacagaagccgctattcgcctgggattggagattggctttctcctgctaagtgttttacacaagaaatctcttttgggtatccatcattcatccacggtcagtaggtgtggtgtcagaagacagtgcaaccaagactatatttgctgtttaaaaaagaaaggcatttgaagaagaaagagccagttggttaaagcagcagtttctaaatatgactacctttgaccaccagaactcagaaaatgtgaaacttttcagtgccttctcaggaagttctgattgggacaatcttatagtgcactcgaggcagccgcaaaagaagcctcacagtgtgtctaatgggtctccagtttgcatgtctaaacttactaaatctcttcctgcttcaccttccacttcagacttttgccagacacgttcctgcatatctgaacatagttcaatcaatgtactgaatataactgctgaagaaattaaaccaaatcaggttggaggagaatgtacaaatcaaaaatggagtgtggcatcaagacctggatcacaggaaggttgctatagtggatgctccttgagctacacaaattctcatgtagaaaaagatgacttaccttagacatgtggactggaatttttttcattaatgtgttcatcaagtttcacatctaagttgaaacagggtgtgtcataaagtcagttatctctaat

SEQ ID NO: 188365 - DNA, 1291 bp, Homo sapiens
  Payload ID: 17064
  Gene Symbol: SSX2B
  Gene Name: synovial sarcoma, X breakpoint 2B
  Uniprot ID: Q16385
  ENST ID: ENST00000596480
  CDS Start-End: 99-665
actttctctctctttcgattcttccatactcagagtacgcacggtctgattttctctttggattcttccaaaatcagagtcagactgctcccggtgccatgaacggagacgacgcctttgcaaggagacccacggttggtgctcaaataccagagaagatccaaaaggccttcgatgatattgccaaatacttctctaaggaagagtgggaaaagatgaaagcctcggagaaaatcttctatgtgtatatgaagagaaagtatgaggctatgactaaactaggtttcaaggccaccctcccacctttcatgtgtaataaacgggccgaagacttccaggggaatgatttggataatgaccctaaccgtgggaatcaggttgaacgtcctcagatgactttcggcaggctccagggaatctccccgaagatcatgcccaagaagccagcagaggaaggaaatgattcggaggaagtgccagaagcatctggcccacaaaatgatgggaaagagctgtgccccccgggaaaaccaactacctctgagaagattcacgagagatctggacccaaaaggggggaacatgcctggacccacagactgcgtgagagaaaacagctggtgatttatgaagagatcagcgaccctgaggaagatgacgagtaactcccctcagggatacgacacatgcccatgatgagaagcagaacgtggtgacctttcacgaacatgggcatggctgcggacccctcgtcatcaggtgcatagcaagtgaaagcaagtgttcacaacagtgaaaagttgagcgtcatttttcttagtgtgccaagagttcgatgttagcgtttacgttgtattttcttacactgtgtcattctgttagatactaacattttcattgatgagcaagacatacttaatgcatattttggtttgtgtatccatgcacctaccttagaaaacaagtattgtcggttacctctgcatggaacagcattaccctcctctctccccagatgtgactactgagggcagttctgagtgtttaatttcagattttttcctctgcatttacacacacacgcacacaaaccacaccacacacacacacacacacacacacacacacacacacacacaccaagtaccagtataagcatctgccatctgcttttcccattgccatgcgtcctggtcaagctcccctcactctgtttcctggtcagcatgtactcccctcatccgattcccctgtagcagtcactgacagttaataaacctttgcaaacgtt

SEQ ID NO: 188366 - DNA, 1410 bp, Homo sapiens; identical to SEQ ID NO: 188356
  Payload ID: 17064
  Gene Symbol: SSX2B
  Gene Name: synovial sarcoma, X breakpoint 2B
  Uniprot ID: Q16385
  ENST ID: ENST00000612490
  CDS Start-End: 71-742

SEQ ID NO: 188367 - DNA, 1344 bp, Homo sapiens
  Payload ID: 17064
  Gene Symbol: SSX2B
  Gene Name: synovial sarcoma, X breakpoint 2B
  Uniprot ID: Q16385
  ENST ID: ENST00000616191
  CDS Start-End: 164-730
cccggctccagggacggaaccttctcaaagtgggggtggagactctaattttcccgcctaaagcatcccctgggattggctactttaagttcagagtacgcatgctctgactttctctctctttcgattcttccatactcagagtcagactgctcccggtgccatgaacggagacgacgcctttgcaaggagacccacggttggtgctcaaataccagagaagatccaaaaggccttcgatgatattgccaaatacttctctaaggaagagtgggaaaagatgaaagcctcggagaaaatcttctatgtgtatatgaagagaaagtatgaggctatgactaaactaggtttcaaggccaccctcccacctttcatgtgtaataaacgggccgaagacttccaggggaatgatttggataatgaccctaaccgtgggaatcaggttgaacgtcctcagatgactttcggcaggctccagggaatctccccgaagatcatgcccaagaagccagcagaggaaggaaatgattcggaggaagtgccagaagcatctggcccacaaaatgatgggaaagagctgtgccccccgggaaaaccaactacctctgagaagattcacgagagatctggacccaaaaggggggaacatgcctggacccacagactgcgtgagagaaaacagctggtgatttatgaagagatcagcgaccctgaggaagatgacgagtaactcccctcggggatacgtcacatgcccatgatgagaagtagaacgtggtgacctttcacgaacataggcatggctgcggacccctcgtcatcaggtgcatagcaagtgaaagcaagtgttcacaacagtgaaaagttgagcgtcgtttttcttagtgtgacaagagttcgatgttagtgtttccattgtattttcttacagtgtgccattctgttagatattagcgttttcattgatgagcaagacatgcttaatgtgtatttcggtttgtgtatccatgcacctacctcagaaagcaagtatagtcaggtattctctccatagaacagcactaccctcctctctccccagatgtgactactgagggcagatctgagtgtttaatttccgattttcccctctgcatttacacaccagacacacaaacacacacacacagacacacacacacacagacacaccaagtaccagtataagcatctcccatatgcttttccccattgccatgagtcctggtcaagccccccttcaatttgtttcctgttcagcatgtactcccctcctctgattccccgtatcagtcactgacagttaatacacctttgcaaacgttc

SEQ ID NO: 188368 - DNA, 1232 bp, Homo sapiens
  Payload ID: 17065
  Gene Symbol: SSX3
  Gene Name: synovial sarcoma, X breakpoint 3
  Uniprot ID: Q99909
  ENST ID: ENST00000298396
  CDS Start-End: 54-620
ctgattttctctttggattcttccaaaatcagagtcagactactccctgtgccatgaacggagatgacacctttgcaaggagacccacggttggtgctcaaataccagagaagatacaaaaggccttcgatgatattgccaaatacttctctaaggaagagtgggaaaagatgaaagtctcggagaaaatcgtctatgtgtatatgaagagaaagtatgaggccatgactaaactaggtttcaaggccatcctcccatctttcatgcgtaataaacgggtcacagacttccaggggaatgattttgataatgaccctaaccgtgggaatcaggttcaacgtcctcagatgactttcggcaggctccagggaatcttcccgaagatcatgcccaagaagccagcagaggaaggaaatgtttcgaaggaagtgccagaagcatctggcccacaaaacgatgggaaacagctgtgccccccgggaaaaccaactacctctgagaagattaacatgatatctggacccaaaaggggggaacatgcctggacccacagactgcgtgagagaaagcagctggtgatttatgaagagatcagcgatcctgaggaagatgatgagtaactccccttggggatatgacacatgcccatgatgagaagcagaacgtggtgacctttcacgaacatgggcatggctgtggacccctcgtcatcaggtgcatagcaagtgaaagcaagtgttcacaacagtgaaaagttgagcgtcatttttcttagtgtgccaagagtacgatattagcgtttccattgtattttcttgaagtgtgtcattctgttagatattaacattttcactgatgagcaagacatacttaatgcatattttggtttgtgtatccatgcacctaccttagaaaacaagtattgtcagttacctctgcatggaacagcattaccctcctctctccctagatgtgactactgagggcagttctgagtgtttaatttcagattttttcctctgcatttacacacacacacaaaccacaccacacacacacacacacacacacagacacacaccaagtaccagtataagcatctcccatctgcttttcccattgccatgcgtcctggtcaggcttccctcactctgtttcctggtcagcatgtactcccctcatccgattcccctgtagcagtcactgacagtaaataaacctttgcaaacgtt

SEQ ID NO: 188369 - DNA, 800 bp, Homo sapiens
  Payload ID: 17065
  Gene Symbol: SSX3
  Gene Name: synovial sarcoma, X breakpoint 3
  Uniprot ID: Q99909
  ENST ID: ENST00000376893
  CDS Start-End: 95-607
ctctctctttcgattcttccatactcaagagtacgcacggtctgattttctctttggattcttccaaaatcagagtcagactactccctgtgccatgaacggagatgacacctttgcaaggagacccacggttggtgctcaaataccagagaagatacaaaaggccttcgatgatattgccaaatacttctctaaggaagagtgggaaaagatgaaagtctcggagaaaatcgtctatgtgtatatgaagagaaagtatgaggccatgactaaactaggtttcaaggccatcctcccatctttcatgcgtaataaacgggtcacagacttccaggggaatgattttgataatgaccctaaccgtgggaatcaggttcaacgtcctcagatgactttcggcaggctccagggaatcttcccgaagatcatgcccaagaagccagcagaggaaggaaatgtttcgaaggaagtgccagaagcatctggcccacaaaacgatgggaaacagctgtgccccccgggaaaaccaactacctctgagaagattaacatgatatctggtgtccttcagagatactgcaggttcggttccagaccactgcaataaagaaatagggaggcccaagaaaaggaagagagacgcggaacagctcatcggtggagcagtcagaagacacaaaacattaatcgattaagtttgtcatattctatgggtgcagttcctggtacccccaaaacaattacacacaacagggtgattatagtcaataataacttaattgtacttaaaaaaactaaaa

SEQ ID NO: 188370 - DNA, 1030 bp, Homo sapiens
  Payload ID: 17065
  Gene Symbol: SSX3
  Gene Name: synovial sarcoma, X breakpoint 3
  ENST ID: ENST00000612497
  CDS Start-End: 24-632
caggtcagactactccctgtgccatgaacggagatgacacctttgcaaggagacccacggttggtgctcaaataccagagaagatacaaaaggccttcgatgatattgccaaatacttctctaaggaagagtgggaaaagatgaaagtctcggagaaaatcgtctatgtgtatatgaagagaaagtatgaggccatgactaaactaggtttcaaggccatcctcccatctttcatgcgtaataaacgggtcacagacttccaggggaatgattttgataatgaccctaaccgtgggaatcaggttcaacgtcctcagatgactttcggcaggctccagggaatcttcccgaagatcatgcccaagaagccagcagaggaaggaaatgtttcgaaggaagtgccagaagcatctggcccacaaaacgatgggaaacagctgtgccccccgggaaaaccaactacctctgagaagattaacatgatatctggtaagaggaagcaattcaggaacaatcccactggcttccctggcgacgttcaggtgtgtggactgggtgtgtggcatggatcccagataaccctgggtccaggctgggctgaggagcttgcccagctccagatgagatgttagacatgacttccagagacagactggagttgtcatccatataaaaaaaaaccacgtgacttgaggaaagtcttccaaatttcctcagctccaggttcctagtccataagatggaaataaagaatcatagttcataaattgtttggagacattaaatttaatctagaaggcctgatgacatgaaaggtgctcaagcgattctatctgtgataacctgggatcatatcttactcagctcaatgcctgttacccaatacaggtgtccttcagagatactgcaggttcggttccagaccactgcaataaagtgagtcacacacattgttttttgtttgacagtgcataaaacgttatgtttacactacagtgtagtctactaagtgtgcaatagcattatgtct

SEQ ID NO: 188371 - DNA, 1221 bp, Homo sapiens
  Payload ID: 17066
  Gene Symbol: SSX4
  Gene Name: synovial sarcoma, X breakpoint 4
  Uniprot ID: O60224
  ENST ID: ENST00000595689
  CDS Start-End: 59-625
acacgccgatttgcccttttgattcttccacaatcagggtgagactgctcccagtgccatgaacggagacgacgcctttgcaaggagacccagggatgatgctcaaatatcagagaagttacgaaaggccttcgatgatattgccaaatacttctctaagaaagagtgggaaaagatgaaatcctcggagaaaatcgtctatgtgtatatgaagctaaactatgaggtcatgactaaactaggtttcaaggtcaccctcccacctttcatgcgtagtaaacgggctgcagacttccacgggaatgattttggtaacgatcgaaaccacaggaatcaggttgaacgtcctcagatgactttcggcagcctccagagaatcttcccgaagatcatgcccaagaagccagcagaggaagaaaatggtttgaaggaagtgccagaggcatctggcccacaaaatgatgggaaacagctgtgccccccgggaaatccaagtaccttggagaagattaacaagacatctggacccaaaagggggaaacatgcctggacccacagactgcgtgagagaaagcagctggtggtttatgaagagatcagcgaccctgaggaagatgacgagtaactcccctcggggatatgacacatgcccatgatgagaagcagaacgtggtgacctttcacgaacatgggcatggctgcggacccctcgtcatcaggtgcatagcaagtgaaagcaagtgttcacaacagtgaaaagttgagcgtcatttttcttagtgtgccaagagttcgatgttggcgtttccgctgtattttcttgcagtgtgccattctgttagacattagcgttttcgttgatgagcaagacatgcttaatgcatatttcggcttgtgtatccatgcacctacctcagaaaacaagtattgtcaggtattctctccatagaacagcactaccctcctctctccccagatgtgactactgaggggaggtctgagtgtttaatttccgattttttcctctgcatttacacacacaccacacacgcacacacacacaccaagtaccagtataagcatctcccatctgcttttctccattgccatgcgacctggtcaagcccccctcactctgtttcctgttcagcatgtactcccctcatccgattccgttgtatcagtcactgacagttaataaacctttgcaaacgttcccca

SEQ ID NO: 188372 - DNA, 1092 bp, Homo sapiens
  Payload ID: 17066
  Gene Symbol: SSX4
  Gene Name: synovial sarcoma, X breakpoint 4
  Uniprot ID: O60224
  ENST ID: ENST00000620320
  CDS Start-End: 70-531
tcagagtacgcacacgccgatttgcccttttgattcttccacaatcagggtgagactgctcccagtgccatgaacggagacgacgcctttgcaaggagacccagggatgatgctcaaatatcagagaagttacgaaaggccttcgatgatattgccaaatacttctctaagaaagagtgggaaaagatgaaatcctcggagaaaatcgtctatgtgtatatgaagctaaactatgaggtcatgactaaactaggtttcaaggtcaccctcccacctttcatgcgtagtaaacgggctgcagacttccacgggaatgattttggtaacgatcgaaaccacaggaatcaggttgaacgtcctcagatgactttcggcagcctccagagaatcttcccgaaggacccaaaagggggaaacatgcctggacccacagactgcgtgagagaaagcagctggtggtttatgaagagatcagcgaccctgaggaagatgacgagtaactcccctcggggatatgacacatgcccatgatgagaagcagaacgtggtgacctttcacgaacatgggcatggctgcggacccctcgtcatcaggtgcatagcaagtgaaagcaagtgttcacaacagtgaaaagttgagcgtcatttttcttagtgtgccaagagttcgatgttggcgtttccgctgtattttcttgcagtgtgccattctgttagacattagcgttttcgttgatgagcaagacatgcttaatgcatatttcggcttgtgtatccatgcacctacctcagaaaacaagtattgtcaggtattctctccatagaacagcactaccctcctctctccccagatgtgactactgaggggaggtctgagtgtttaatttccgattttttcctctgcatttacacacacaccacacacgcacacacacacaccaagtaccagtataagcatctcccatctgcttttctccattgccatgcgacctggtcaagcccccctcactctgtttcctgttcagcatgtactcccctcatccgattccgttgtatcagtcactgacagttaataaacctttgcaaacgttc

SEQ ID NO: 188373 - DNA, 1221 bp, Homo sapiens; identical to SEQ ID NO: 188371
  Payload ID: 17067
  Gene Symbol: SSX4B
  Gene Name: synovial sarcoma, X breakpoint 4B
  Uniprot ID: O60224
  ENST ID: ENST00000595235
  CDS Start-End: 59-625

SEQ ID NO: 188374 - DNA, 1092 bp, Homo sapiens; identical to SEQ ID NO: 188372
  Payload ID: 17067
  Gene Symbol: SSX4B
  Gene Name: synovial sarcoma, X breakpoint 4B
  Uniprot ID: O60224
  ENST ID: ENST00000619890
  CDS Start-End: 70-531

SEQ ID NO: 188375 - DNA, 1261 bp, Homo sapiens
  Payload ID: 17068
  Gene Symbol: SSX5
  Gene Name: synovial sarcoma, X breakpoint 5
  Uniprot ID: O60225
  ENST ID: ENST00000347757
  CDS Start-End: 54-620
cgctctgattgtttcgattcttccaaaatcagagacagagtgctcccggtgccatgaacggagacgatgcctttgtacggagacctagggttggttctcaaataccagagaagatgcaaaaggccttcgatgatattgccaaatacttctctgagaaagagtgggaaaagatgaaagcctcggagaaaatcatctatgtgtatatgaagagaaagtatgaggccatgactaaactaggtttcaaggccaccctcccacctttcatgcgtaataaacgggtcgcagacttccaggggaatgattttgataatgaccctaaccgtgggaatcaggttgaacatcctcagatgactttcggcaggctccagggaatcttcccgaagatcacgcccgagaagccagcagaggaaggaaatgattcgaagggagtgccagaagcatctggcccacagaacaatgggaaacagctgcgcccctcaggaaaactaaatacctctgagaaggttaacaagacatctggacccaaaagggggaaacatgcctggacccacagagtgcgtgagagaaagcaactggtgatttatgaagagatcagcgaccctcaggaagatgacgagtaactcccctcggggatatgacacatgcccatgatgagaagcagaacgtggtgacctttcacgaacatgggcatggctgcggatccctcgtcatcaggtgtatagcaagtgaaagcaagtgttcacaacagtgaaaagttgagcgtcatttttcttagtgtgccaagagttcgatgttagtgtttctgttgtattttgttacagtgtgccattctgttagatattagcgttttcactgatgagcaagacatacttaatgcatatttcagtttgtgtatccatgcacctacctcagaaaacaagtatcgtcaggtattctctgcatagaacaacactaccctcctctcttcccagatgtgaccactgagggcagttctgagtgtttaatttcagattttttcctctgcatttacacaaacacacacacatgccacacagacacacatgcgcgcgcgcgcgcacacacacacacacacacacacacacacacacacacaccaagtaccagtataggcatctcccaactgcttttccccatgtgtcctggtcaagcccccctcactctgtttcctgttcagcatgtactcccctcatccgattcccctctatcagtcactgccagttaataaacctttgcaaacgtt

SEQ ID NO: 188376 - DNA, 1384 bp, Homo sapiens
  Payload ID: 17068
  Gene Symbol: SSX5
  Gene Name: synovial sarcoma, X breakpoint 5
  Uniprot ID: O60225
  ENST ID: ENST00000311798
  CDS Start-End: 54-743
cgctctgattgtttcgattcttccaaaatcagagacagagtgctcccggtgccatgaacggagacgatgcctttgtacggagacctagggttggttctcaaataccagagaagatgcaaaagcatccctggagacaagtctgtgaccgtggaatacatttggtgaatctcagtccgttctggaaggtgggaagagagccagccagcagcattaaagctctactgtgtggcaggggagaagctagggccttcgatgatattgccaaatacttctctgagaaagagtgggaaaagatgaaagcctcggagaaaatcatctatgtgtatatgaagagaaagtatgaggccatgactaaactaggtttcaaggccaccctcccacctttcatgcgtaataaacgggtcgcagacttccaggggaatgattttgataatgaccctaaccgtgggaatcaggttgaacatcctcagatgactttcggcaggctccagggaatcttcccgaagatcacgcccgagaagccagcagaggaaggaaatgattcgaagggagtgccagaagcatctggcccacagaacaatgggaaacagctgcgcccctcaggaaaactaaatacctctgagaaggttaacaagacatctggacccaaaagggggaaacatgcctggacccacagagtgcgtgagagaaagcaactggtgatttatgaagagatcagcgaccctcaggaagatgacgagtaactcccctcggggatatgacacatgcccatgatgagaagcagaacgtggtgacctttcacgaacatgggcatggctgcggatccctcgtcatcaggtgtatagcaagtgaaagcaagtgttcacaacagtgaaaagttgagcgtcatttttcttagtgtgccaagagttcgatgttagtgtttctgttgtattttgttacagtgtgccattctgttagatattagcgttttcactgatgagcaagacatacttaatgcatatttcagtttgtgtatccatgcacctacctcagaaaacaagtatcgtcaggtattctctgcatagaacaacactaccctcctctcttcccagatgtgaccactgagggcagttctgagtgtttaatttcagattttttcctctgcatttacacaaacacacacacatgccacacagacacacatgcgcgcgcgcgcgcacacacacacacacacacacacacacacacacacacaccaagtaccagtataggcatctcccaactgcttttccccatgtgtcctggtcaagcccccctcactctgtttcctgttcagcatgtactcccctcatccgattcccctctatcagtcactgccagttaataaacctttgcaaacgtt

SEQ ID NO: 188377 - DNA, 1208 bp, Homo sapiens
  Payload ID: 17068
  Gene Symbol: SSX5
  Gene Name: synovial sarcoma, X breakpoint 5
  Uniprot ID: O60225
  ENST ID: ENST00000376923
  CDS Start-End: 1-567
atgaacggagacgatgcctttgtacggagacctagggttggttctcaaataccagagaagatgcaaaaggccttcgatgatattgccaaatacttctctgagaaagagtgggaaaagatgaaagcctcggagaaaatcatctatgtgtatatgaagagaaagtatgaggccatgactaaactaggtttcaaggccaccctcccacctttcatgcgtaataaacgggtcgcagacttccaggggaatgattttgataatgaccctaaccgtgggaatcaggttgaacatcctcagatgactttcggcaggctccagggaatcttcccgaagatcacgcccgagaagccagcagaggaaggaaatgattcgaagggagtgccagaagcatctggcccacagaacaatgggaaacagctgcgcccctcaggaaaactaaatacctctgagaaggttaacaagacatctggacccaaaagggggaaacatgcctggacccacagagtgcgtgagagaaagcaactggtgatttatgaagagatcagcgaccctcaggaagatgacgagtaactcccctcggggatatgacacatgcccatgatgagaagcagaacgtggtgacctttcacgaacatgggcatggctgcggatccctcgtcatcaggtgtatagcaagtgaaagcaagtgttcacaacagtgaaaagttgagcgtcatttttcttagtgtgccaagagttcgatgttagtgtttctgttgtattttgttacagtgtgccattctgttagatattagcgttttcactgatgagcaagacatacttaatgcatatttcagtttgtgtatccatgcacctacctcagaaaacaagtatcgtcaggtattctctgcatagaacaacactaccctcctctcttcccagatgtgaccactgagggcagttctgagtgtttaatttcagattttttcctctgcatttacacaaacacacacacatgccacacagacacacatgcgcgcgcgcgcgcacacacacacacacacacacacacacacacacacacaccaagtaccagtataggcatctcccaactgcttttccccatgtgtcctggtcaagcccccctcactctgtttcctgttcagcatgtactcccctcatccgattcccctctatcagtcactgccagttaataaacctttgcaaacgtt

SEQ ID NO: 188378 - DNA, 473 bp, Homo sapiens
  Payload ID: 17068
  Gene Symbol: SSX5
  Gene Name: synovial sarcoma, X breakpoint 5
  ENST ID: ENST00000403001
  CDS Start-End: 1-387
ctcataacctctgctgcagaatgccctcatgcaactgaagtctctctagagtttggaaatctttaccaacaaagaaaaattctgatgtattctctttcagttgaacatcctcagatgactttcggcaggctccagggaatcttcccgaagatcacgcccgagaagccagcagaggaaggaaatgattcgaagggagtgccagaagcatctggcccacagaacaatgggaaacagctgcgcccctcaggaaaactaaatacctctgagaaggttaacaagacatctggacccaaaagggggaaacatgcctggacccacagagtgcgtgagagaaagcaactggtgatttatgaagagatcagcgaccctcaggaagatgacgagtaactcccctcggggatatgacacatgcccatgatgagaagcagaacgtggtgacctttcacgaacatgggcatggctgcggatccctc

SEQ ID NO: 188379 - DNA, 675 bp, Homo sapiens
  Payload ID: 17068
  Gene Symbol: SSX5
  Gene Name: synovial sarcoma, X breakpoint 5
  ENST ID: ENST00000613884
  CDS Start-End: 1-567
atgaatggagacgacgcctttgcaaggagacccagggttgatgctcaaataccagagaagatacaaaaggccttcgatgatattgccaaatacttctctaaggaagagtgggaaaagatgaaagcctcagagaaaatcctctatgtgtatatgaagagaaagtatgaggccatgactaaactaggtttcaaggccaccctcccacctttcatgcgtaataaacgggtcgcagacttccaggggaatgattttgataatgaccctaaccgtgggaatcaggttgaacatcctcagatgactttcggcaggctccagggaatcttcccgaagatcacgcccgagaagccagcagaggaaggaaatgattcgaagggagtgccagaagcatctggcccacagaacaatgggaaacagctgcgcccctcaggaaaactaaatacctctgagaaggttaacaagacatctggacccaaaagggggaaacatgcctggacccacagagtgcgtgagagaaagcaactggtgatttatgaagagatcagcgaccctcaggaagatgacgagtaactcccctcggggatatgacacatgcccatgatgagaagcagaacgtggtgacctttcacgaacatgggcatggctgcggatccctcgtcatcaggtgtatagcaagtg

SEQ ID NO: 188380 - DNA, 1311 bp, Homo sapiens
  Payload ID: 17069
  Gene Symbol: SSX7
  Gene Name: synovial sarcoma, X breakpoint 7
  Uniprot ID: Q7RTT5
  ENST ID: ENST00000298181
  CDS Start-End: 160-726
ccaggctccagggacagaaccttctcaaagtgggggtggagactctgattttcccgcctaaagcatcccctgggattggctactttaagttcagagtatgcatgctctgactttctctctcgattcttccatactcagagtcagactgctcctggtgccatgaacggagacgacgcctttgcaaggagacctagggctggtgctcaaataccagagaagatccaaaagtccttcgatgatattgccaaatacttctctaagaaagagtgggaaaagatgaaatccttggagaaaatcagctatgtgtatatgaagagaaagtatgaggccatgactaaactaggcttcaaggccaccctcccacctttcatgcataatacaggggccacagacctccaggggaatgattttgataatgaccgtaaccaagggaatcaggttgaacgtcctcagatgactttttgcaggctccagagaatcttcccgaagatcatgcccaagaagccagcagaggaaggaaatgattcgaagggagtgccagaagcatctggctcacagaacgatgggaaacacctgtgccctccaggaaaaccaagtacctctgagaagattaacaagacatccggacccaaaagggggaaacatgcctggacccacagactgcgtgagagaaagcagctggtgatttatgaagagatcagcgaccctgaagaagacgacgagtaactcccctcggggatacgacatatgcccatgatgagaagcagaacgtggtgacctttcacgaacatgggcatggctgcggacccctcgtcatcaggtgcatagcaagtgaaagcaagtgttcacaacagtgaaaagttgagcgtcgtttttcttagtgtgacaagagttcgatgttagtgtttccattgtattttcttacagtgtgccattctgttagatattagcgttttcattgatgagcaagacatgcttaatgtgtatttcggtttgtgtatccatgcacctacctcagaaagcaagtatagtcaggtattctctccatagaacagcactaccctcctctctccccagatgtgactactgagggcagatctgagtgtttaatttccgattttcccctctgcatttacacaccagacacacaaacacacacacacagacacacacacacacagacacaccaagtaccagtataagcatctcccatatgcttttccccattgccatgagtcctggtcaagccccccttcaatttgtttcctgttcagcatgtactcccctcctctgattccccgtatcagtcac

SEQ ID NO: 188381 - DNA, 2870 bp, Homo sapiens
  Payload ID: 17070
  Gene Symbol: SYBU
  Gene Name: syntabulin (syntaxin-interacting)
  Uniprot ID: Q9NX95
  ENST ID: ENST00000276646
  CDS Start-End: 159-2150
aatcggcggcagtggcggcggcggcgcgttggagcctcaccaagagccgccgcccgcagcccgcgccggctcagcgcagtctcctcgctccgtgctcgcaggtgcctcctcctggacggcggcagcggcggcgcgaggagccggcgggcagcggcgcgatggggcccctccgcgagagcaagaaggagcacagagtgcagcatcatgacaaggagatttctcgaagccgaattccccggttgattcttcggccccatatgccccaacaacagcacaaagtgtccccagcctctgagtctcctttctctgaggaagagagcagagagttcaaccccagcagctctgggcgctcagcgaggaccgttagcagcaacagcttctgctcagatgacacaggctgtcctagcagccagtcagtgtctcctgtgaagacaccctcagatgctggaaacagccccattggcttttgccctggaagtgatgaaggcttcaccagaaagaaatgcacgattggaatggttggtgaaggaagcattcagtcctctcgatataagaaggaatcaaagtcaggccttgtgaaaccaggtagtgaagctgattttagctcctcgagcagcacaggcagcatttccgctcctgaggtccatatgtcgactgcgggaagcaagcggtcttcttcttcacgcaatcgaggtcctcatgggcggagtaatggagcttcgtcacacaagcctggcagcagcccatcatccccgcgggaaaaggaccttctgtccatgctgtgcaggaatcagctgagccctgtcaatatccatcccagttatgcaccttcttccccaagcagtagcaactcaggctcctacaaaggaagcgactgtagccccatcatgaggcgttctggaaggtacatgtcttgcggtgaaaatcatggtgtcagacccccaaacccagagcagtatttgactccactgcagcagaaagaggtgacagtgagacacctcaaaaccaagctgaaggaatctgagcgccgactccatgaaagggaaagtgaaatcgtggagcttaagtcccagctggcccgcatgcgagaggactggattgaggaggagtgtcaccgggtagaggcccagttggcactcaaagaagccaggaaagagattaaacagctcaaacaggtcatcgaaaccatgcggagcagcttggctgataaagataaaggcattcagaaatattttgtggacataaacatccaaaacaagaagctggagtctctccttcagagcatggagatggcacacagtggctctctgagggacgaactgtgcctagactttccatgtgattccccagagaagagcttaaccctcaacccccctcttgacacaatggcagatgggttatctctggaagagcaggtcacgggggaaggggctgacagggagctactggtaggagatagcatagccaacagcacagatttgttcgatgagatagtgacagccaccaccacagaatctggtgacctggagcttgtgcattccacccctggggctaacgtcctggagctgctgcccatagtcatgggtcaggaggagggcagtgtggtggtggagcgagccgttcagaccgacgtggtgccctacagcccagccatctcagagctcattcagagtgtgctgcagaagctccaggacccctgtccctcgagcttggcgtcccctgatgagtctgaaccagactcgatggagagcttcccagagtccctctctgccttagtggttgatttaactccaagaaatccaaactcagccatccttttgtctcccgtggagaccccctacgccaatgtggatgcagaagttcatgcaaaccgcctcatgagagagctggattttgcagcctgcgtggaagagaggttggatggtgtcatcccactggctcgcgggggcgtcgtgaggcagtactggagcagcagcttcctggtggatctcctggctgtggctgcccccgtggtccccacggttctgtgggcattcagtactcagagagggggaacggatcctgtgtataacatcggggccttgctcaggggctgttgcgtggttgccctgcattcgctccgccgcaccgccttccgtatcaaaacctaaatagaagttgttgttaccgtgtgccaatgtgtcccatgtgggttgtgccaggtagagaaacaggaagtcaatcatctgtgacagtctctattctgtcgttttgctccttggtatttgatttgcactatatttagttgaagcctgttcactgtttaaaaccggaggtatcttcaaaggcatggagacctggttccagtaaatgtcccaccagtggggtatagaaagcatgctcatgaccctgccgtgtcgtctgaggtacccgttcttatcctagtggttcaggaagagaaaacgcagtttgcactttcaagacagcttctctaaggctggcatgttatctccttgctttgctttttgccgttttaaaatgtgtaattgttccagcattccaatggtcttgtgcatagcaggggactgtaaccaaaaataaacatgtatttgtgtaattggtttgaagaagtcttgaatagctctttactgtcttacttggggttgataagatttgagtgtttgcaattttttactaaatgtagctccaaagtcttaaatggcttgtttgttcttaaactgttaattgatgaaactgtgcataagtttacaatgtactaacttattttgcttattatatatagtgttttattggaaattgtaaccacacacttcagcatgatgaaaataaagattagtgtttccatttaaataaatgttttatcctcccat

SEQ ID NO: 188382 - DNA, 3435 bp, Homo sapiens
  Payload ID: 17070
  Gene Symbol: SYBU
  Gene Name: syntabulin (syntaxin-interacting)
  Uniprot ID: Q9NX95
  ENST ID: ENST00000399066
  CDS Start-End: 729-2711
atttttaaaaccacgaaatggcagggtacttcatgctgcgtttttaaggagaaagaaaaatctcttcttatggatgtcctgtaaggaaaacaaaaattaaagatgatgtaaaaggtggagccatcttcccgagtatcggatttgtgtttgcttttctgttggcaacaagccttgtgtaccaggatattaacgaataattaagatcctgtccagaagaggagggattttaaagataattgtgtgtgagctatcaggaaataactgttccaggtatagggttcaactttgtgaggagacaagaaaacaagtcagactgtcacagctaatttagggaaagcaaaatggaagtctgaaggctatcaagtaagccagagtgtggtgttaataaagagcctttgggaggcagaagcttgaatgtgatagaagtcagggtgggaaggtgagtcaggaccagcatagggaagtaggatggccttccagctagtgagtggaggtgtgtatatgtgtgtgtgtgtgtgtgtgtgtgtgccacacagacatgtgctattcagtagattagaaaggttaactcattggaagagttttgaagctcatttcagcaactgagataagaaggactactctgtgaagactcaatactcagaaatgtgatttcttagaaattgatccttgaaggaaccgacaggagttaagagagggaaacgcgtttccttttgttttcttttttgatgtccaattttgagaaggagcacagagtgcagcatcatgacaaggagatttctcgaagccgaattccccggttgattcttcggccccatatgccccaacaacagcacaaagtgtccccagcctctgagtctcctttctctgaggaagagagcagagagttcaaccccagcagctctgggcgctcagcgaggaccgttagcagcaacagcttctgctcagatgacacaggctgtcctagcagccagtcagtgtctcctgtgaagacaccctcagatgctggaaacagccccattggcttttgccctggaagtgatgaaggcttcaccagaaagaaatgcacgattggaatggttggtgaaggaagcattcagtcctctcgatataagaaggaatcaaagtcaggccttgtgaaaccaggtagtgaagctgattttagctcctcgagcagcacaggcagcatttccgctcctgaggtccatatgtcgactgcgggaagcaagcggtcttcttcttcacgcaatcgaggtcctcatgggcggagtaatggagcttcgtcacacaagcctggcagcagcccatcatccccgcgggaaaaggaccttctgtccatgctgtgcaggaatcagctgagccctgtcaatatccatcccagttatgcaccttcttccccaagcagtagcaactcaggctcctacaaaggaagcgactgtagccccatcatgaggcgttctggaaggtacatgtcttgcggtgaaaatcatggtgtcagacccccaaacccagagcagtatttgactccactgcagcagaaagaggtgacagtgagacacctcaaaaccaagctgaaggaatctgagcgccgactccatgaaagggaaagtgaaatcgtggagcttaagtcccagctggcccgcatgcgagaggactggattgaggaggagtgtcaccgggtagaggcccagttggcactcaaagaagccaggaaagagattaaacagctcaaacaggtcatcgaaaccatgcggagcagcttggctgataaagataaaggcattcagaaatattttgtggacataaacatccaaaacaagaagctggagtctctccttcagagcatggagatggcacacagtggctctctgagggacgaactgtgcctagactttccatgtgattccccagagaagagcttaaccctcaacccccctcttgacacaatggcagatgggttatctctggaagagcaggtcacgggggaaggggctgacagggagctactggtaggagatagcatagccaacagcacagatttgttcgatgagatagtgacagccaccaccacagaatctggtgacctggagcttgtgcattccacccctggggctaacgtcctggagctgctgcccatagtcatgggtcaggaggagggcagtgtggtggtggagcgagccgttcagaccgacgtggtgccctacagcccagccatctcagagctcattcagagtgtgctgcagaagctccaggacccctgtccctcgagcttggcgtcccctgatgagtctgaaccagactcgatggagagcttcccagagtccctctctgccttagtggttgatttaactccaagaaatccaaactcagccatccttttgtctcccgtggagaccccctacgccaatgtggatgcagaagttcatgcaaaccgcctcatgagagagctggattttgcagcctgcgtggaagagaggttggatggtgtcatcccactggctcgcgggggcgtcgtgaggcagtactggagcagcagcttcctggtggatctcctggctgtggctgcccccgtggtccccacggttctgtgggcattcagtactcagagagggggaacggatcctgtgtataacatcggggccttgctcaggggctgttgcgtggttgccctgcattcgctccgccgcaccgccttccgtatcaaaacctaaatagaagttgttgttaccgtgtgccaatgtgtcccatgtgggttgtgccaggtagagaaacaggaagtcaatcatctgtgacagtctctattctgtcgttttgctccttggtatttgatttgcactatatttagttgaagcctgttcactgtttaaaaccggaggtatcttcaaaggcatggagacctggttccagtaaatgtcccaccagtggggtatagaaagcatgctcatgaccctgccgtgtcgtctgaggtacccgttcttatcctagtggttcaggaagagaaaacgcagtttgcactttcaagacagcttctctaaggctggcatgttatctccttgctttgctttttgccgttttaaaatgtgtaattgttccagcattccaatggtcttgtgcatagcaggggactgtaaccaaaaataaacatgtatttgtgtaattggtttgaagaagtcttgaatagctctttactgtcttacttggggttgataagatttgagtgtttgcaattttttactaaatgtagctccaaagtcttaaatggcttgtttgttcttaaactgttaattgatgaaactgtgcataagtttacaatgtactaacttattttgcttattatatatagtgttttattggaaattgtaaccacacacttcagcatgatgaaaataaagattagtgtttccatttaaataaatgttttatcctcccataaaa

SEQ ID NO: 188383 - DNA, 2983 bp, Homo sapiens
  Payload ID: 17070
  Gene Symbol: SYBU
  Gene Name: syntabulin (syntaxin-interacting)
  Uniprot ID: Q9NX95
  ENST ID: ENST00000408908
  CDS Start-End: 274-2265
accacacacacaaaaaaatctcacgatgccccagaatgcagtttctttccttcgtgacgtgttgtgaagcacgtcagctgctccttgttgctgtgcagatcacccaacattaggtcaccgagagagacagcagctcttgctcacacagctgataggattaggagatggtgctttgtcagccctgattgagcccaagaaaaccccctgcatacacaggtgcctcctcctggacggcggcagcggcggcgcgaggagccggcgggcagcggcgcgatggggcccctccgcgagagcaagaaggagcacagagtgcagcatcatgacaaggagatttctcgaagccgaattccccggttgattcttcggccccatatgccccaacaacagcacaaagtgtccccagcctctgagtctcctttctctgaggaagagagcagagagttcaaccccagcagctctgggcgctcagcgaggaccgttagcagcaacagcttctgctcagatgacacaggctgtcctagcagccagtcagtgtctcctgtgaagacaccctcagatgctggaaacagccccattggcttttgccctggaagtgatgaaggcttcaccagaaagaaatgcacgattggaatggttggtgaaggaagcattcagtcctctcgatataagaaggaatcaaagtcaggccttgtgaaaccaggtagtgaagctgattttagctcctcgagcagcacaggcagcatttccgctcctgaggtccatatgtcgactgcgggaagcaagcggtcttcttcttcacgcaatcgaggtcctcatgggcggagtaatggagcttcgtcacacaagcctggcagcagcccatcatccccgcgggaaaaggaccttctgtccatgctgtgcaggaatcagctgagccctgtcaatatccatcccagttatgcaccttcttccccaagcagtagcaactcaggctcctacaaaggaagcgactgtagccccatcatgaggcgttctggaaggtacatgtcttgcggtgaaaatcatggtgtcagacccccaaacccagagcagtatttgactccactgcagcagaaagaggtgacagtgagacacctcaaaaccaagctgaaggaatctgagcgccgactccatgaaagggaaagtgaaatcgtggagcttaagtcccagctggcccgcatgcgagaggactggattgaggaggagtgtcaccgggtagaggcccagttggcactcaaagaagccaggaaagagattaaacagctcaaacaggtcatcgaaaccatgcggagcagcttggctgataaagataaaggcattcagaaatattttgtggacataaacatccaaaacaagaagctggagtctctccttcagagcatggagatggcacacagtggctctctgagggacgaactgtgcctagactttccatgtgattccccagagaagagcttaaccctcaacccccctcttgacacaatggcagatgggttatctctggaagagcaggtcacgggggaaggggctgacagggagctactggtaggagatagcatagccaacagcacagatttgttcgatgagatagtgacagccaccaccacagaatctggtgacctggagcttgtgcattccacccctggggctaacgtcctggagctgctgcccatagtcatgggtcaggaggagggcagtgtggtggtggagcgagccgttcagaccgacgtggtgccctacagcccagccatctcagagctcattcagagtgtgctgcagaagctccaggacccctgtccctcgagcttggcgtcccctgatgagtctgaaccagactcgatggagagcttcccagagtccctctctgccttagtggttgatttaactccaagaaatccaaactcagccatccttttgtctcccgtggagaccccctacgccaatgtggatgcagaagttcatgcaaaccgcctcatgagagagctggattttgcagcctgcgtggaagagaggttggatggtgtcatcccactggctcgcgggggcgtcgtgaggcagtactggagcagcagcttcctggtggatctcctggctgtggctgcccccgtggtccccacggttctgtgggcattcagtactcagagagggggaacggatcctgtgtataacatcggggccttgctcaggggctgttgcgtggttgccctgcattcgctccgccgcaccgccttccgtatcaaaacctaaatagaagttgttgttaccgtgtgccaatgtgtcccatgtgggttgtgccaggtagagaaacaggaagtcaatcatctgtgacagtctctattctgtcgttttgctccttggtatttgatttgcactatatttagttgaagcctgttcactgtttaaaaccggaggtatcttcaaaggcatggagacctggttccagtaaatgtcccaccagtggggtatagaaagcatgctcatgaccctgccgtgtcgtctgaggtacccgttcttatcctagtggttcaggaagagaaaacgcagtttgcactttcaagacagcttctctaaggctggcatgttatctccttgctttgctttttgccgttttaaaatgtgtaattgttccagcattccaatggtcttgtgcatagcaggggactgtaaccaaaaataaacatgtatttgtgtaattggtttgaagaagtcttgaatagctctttactgtcttacttggggttgataagatttgagtgtttgcaattttttactaaatgtagctccaaagtcttaaatggcttgtttgttcttaaactgttaattgatgaaactgtgcataagtttacaatgtactaacttattttgcttattatatatagtgttttattggaaattgtaaccacacacttcagcatgatgaaaataaagattagtgtttccatttaaataaatgttttatcctccc

SEQ ID NO: 188384 - DNA, 2776 bp, Homo sapiens
  Payload ID: 17070
  Gene Symbol: SYBU
  Gene Name: syntabulin (syntaxin-interacting)
  Uniprot ID: Q9NX95
  ENST ID: ENST00000408889
  CDS Start-End: 424-2058
cccatcaggatatttaagctggaagctttgtcaggctgcgtcagtgttccctgagtaagcaggaatgcaaactgcaattttagcattagcattctacttagaacaaagggaggtgcccggaagcagtacacattagtgcagagttttctggtttccctttaaagagaaggcacagccatttgactcttgagcttatttaaacaagtcaccagtccttgactccagaactgaagctttatatgttctttctatttggctgagccagtaatttttgattgcttcttcttcccaagagatgacacaggctgtcctagcagccagtcagtgtctcctgtgaagacaccctcagatgctggaaacagccccattggcttttgccctggaagtgatgaaggcttcaccagaaagaaatgcacgattggaatggttggtgaaggaagcattcagtcctctcgatataagaaggaatcaaagtcaggccttgtgaaaccaggtagtgaagctgattttagctcctcgagcagcacaggcagcatttccgctcctgaggtccatatgtcgactgcgggaagcaagcggtcttcttcttcacgcaatcgaggtcctcatgggcggagtaatggagcttcgtcacacaagcctggcagcagcccatcatccccgcgggaaaaggaccttctgtccatgctgtgcaggaatcagctgagccctgtcaatatccatcccagttatgcaccttcttccccaagcagtagcaactcaggctcctacaaaggaagcgactgtagccccatcatgaggcgttctggaaggtacatgtcttgcggtgaaaatcatggtgtcagacccccaaacccagagcagtatttgactccactgcagcagaaagaggtgacagtgagacacctcaaaaccaagctgaaggaatctgagcgccgactccatgaaagggaaagtgaaatcgtggagcttaagtcccagctggcccgcatgcgagaggactggattgaggaggagtgtcaccgggtagaggcccagttggcactcaaagaagccaggaaagagattaaacagctcaaacaggtcatcgaaaccatgcggagcagcttggctgataaagataaaggcattcagaaatattttgtggacataaacatccaaaacaagaagctggagtctctccttcagagcatggagatggcacacagtggctctctgagggacgaactgtgcctagactttccatgtgattccccagagaagagcttaaccctcaacccccctcttgacacaatggcagatgggttatctctggaagagcaggtcacgggggaaggggctgacagggagctactggtaggagatagcatagccaacagcacagatttgttcgatgagatagtgacagccaccaccacagaatctggtgacctggagcttgtgcattccacccctggggctaacgtcctggagctgctgcccatagtcatgggtcaggaggagggcagtgtggtggtggagcgagccgttcagaccgacgtggtgccctacagcccagccatctcagagctcattcagagtgtgctgcagaagctccaggacccctgtccctcgagcttggcgtcccctgatgagtctgaaccagactcgatggagagcttcccagagtccctctctgccttagtggttgatttaactccaagaaatccaaactcagccatccttttgtctcccgtggagaccccctacgccaatgtggatgcagaagttcatgcaaaccgcctcatgagagagctggattttgcagcctgcgtggaagagaggttggatggtgtcatcccactggctcgcgggggcgtcgtgaggcagtactggagcagcagcttcctggtggatctcctggctgtggctgcccccgtggtccccacggttctgtgggcattcagtactcagagagggggaacggatcctgtgtataacatcggggccttgctcaggggctgttgcgtggttgccctgcattcgctccgccgcaccgccttccgtatcaaaacctaaatagaagttgttgttaccgtgtgccaatgtgtcccatgtgggttgtgccaggtagagaaacaggaagtcaatcatctgtgacagtctctattctgtcgttttgctccttggtatttgatttgcactatatttagttgaagcctgttcactgtttaaaaccggaggtatcttcaaaggcatggagacctggttccagtaaatgtcccaccagtggggtatagaaagcatgctcatgaccctgccgtgtcgtctgaggtacccgttcttatcctagtggttcaggaagagaaaacgcagtttgcactttcaagacagcttctctaaggctggcatgttatctccttgctttgctttttgccgttttaaaatgtgtaattgttccagcattccaatggtcttgtgcatagcaggggactgtaaccaaaaataaacatgtatttgtgtaattggtttgaagaagtcttgaatagctctttactgtcttacttggggttgataagatttgagtgtttgcaattttttactaaatgtagctccaaagtcttaaatggcttgtttgttcttaaactgttaattgatgaaactgtgcataagtttacaatgtactaacttattttgcttattatatatagtgttttattggaaattgtaaccacacacttcagcatgatgaaaataaagattagtgtttccatttaaataaatgttttatcctccc

SEQ ID NO: 188385 - DNA, 3104 bp, Homo sapiens
  Payload ID: 17070
  Gene Symbol: SYBU
  Gene Name: syntabulin (syntaxin-interacting)
  Uniprot ID: Q9NX95
  ENST ID: ENST00000433638
  CDS Start-End: 395-2386
accacacacacaaaaaaatctcacgatgccccagaatgcagtttctttccttcgtgacgtgttgtgaagcacgtcagctgctccttgttgctgtgcagatcacccaacattaggtcaccgagagagacagcagctcttgctcacacagctgataggattaggagatggtgctttgtcagccctgattgagcccaagaaaaccccctgcatacacaggcatcaacaaatattgactggatcatctggacctgacttagctgccctttggaaagttctgttcaatcagctggatagagctgtttgttttcctcacctaaccctcacagctatcctagaggtgcctcctcctggacggcggcagcggcggcgcgaggagccggcgggcagcggcgcgatggggcccctccgcgagagcaagaaggagcacagagtgcagcatcatgacaaggagatttctcgaagccgaattccccggttgattcttcggccccatatgccccaacaacagcacaaagtgtccccagcctctgagtctcctttctctgaggaagagagcagagagttcaaccccagcagctctgggcgctcagcgaggaccgttagcagcaacagcttctgctcagatgacacaggctgtcctagcagccagtcagtgtctcctgtgaagacaccctcagatgctggaaacagccccattggcttttgccctggaagtgatgaaggcttcaccagaaagaaatgcacgattggaatggttggtgaaggaagcattcagtcctctcgatataagaaggaatcaaagtcaggccttgtgaaaccaggtagtgaagctgattttagctcctcgagcagcacaggcagcatttccgctcctgaggtccatatgtcgactgcgggaagcaagcggtcttcttcttcacgcaatcgaggtcctcatgggcggagtaatggagcttcgtcacacaagcctggcagcagcccatcatccccgcgggaaaaggaccttctgtccatgctgtgcaggaatcagctgagccctgtcaatatccatcccagttatgcaccttcttccccaagcagtagcaactcaggctcctacaaaggaagcgactgtagccccatcatgaggcgttctggaaggtacatgtcttgcggtgaaaatcatggtgtcagacccccaaacccagagcagtatttgactccactgcagcagaaagaggtgacagtgagacacctcaaaaccaagctgaaggaatctgagcgccgactccatgaaagggaaagtgaaatcgtggagcttaagtcccagctggcccgcatgcgagaggactggattgaggaggagtgtcaccgggtagaggcccagttggcactcaaagaagccaggaaagagattaaacagctcaaacaggtcatcgaaaccatgcggagcagcttggctgataaagataaaggcattcagaaatattttgtggacataaacatccaaaacaagaagctggagtctctccttcagagcatggagatggcacacagtggctctctgagggacgaactgtgcctagactttccatgtgattccccagagaagagcttaaccctcaacccccctcttgacacaatggcagatgggttatctctggaagagcaggtcacgggggaaggggctgacagggagctactggtaggagatagcatagccaacagcacagatttgttcgatgagatagtgacagccaccaccacagaatctggtgacctggagcttgtgcattccacccctggggctaacgtcctggagctgctgcccatagtcatgggtcaggaggagggcagtgtggtggtggagcgagccgttcagaccgacgtggtgccctacagcccagccatctcagagctcattcagagtgtgctgcagaagctccaggacccctgtccctcgagcttggcgtcccctgatgagtctgaaccagactcgatggagagcttcccagagtccctctctgccttagtggttgatttaactccaagaaatccaaactcagccatccttttgtctcccgtggagaccccctacgccaatgtggatgcagaagttcatgcaaaccgcctcatgagagagctggattttgcagcctgcgtggaagagaggttggatggtgtcatcccactggctcgcgggggcgtcgtgaggcagtactggagcagcagcttcctggtggatctcctggctgtggctgcccccgtggtccccacggttctgtgggcattcagtactcagagagggggaacggatcctgtgtataacatcggggccttgctcaggggctgttgcgtggttgccctgcattcgctccgccgcaccgccttccgtatcaaaacctaaatagaagttgttgttaccgtgtgccaatgtgtcccatgtgggttgtgccaggtagagaaacaggaagtcaatcatctgtgacagtctctattctgtcgttttgctccttggtatttgatttgcactatatttagttgaagcctgttcactgtttaaaaccggaggtatcttcaaaggcatggagacctggttccagtaaatgtcccaccagtggggtatagaaagcatgctcatgaccctgccgtgtcgtctgaggtacccgttcttatcctagtggttcaggaagagaaaacgcagtttgcactttcaagacagcttctctaaggctggcatgttatctccttgctttgctttttgccgttttaaaatgtgtaattgttccagcattccaatggtcttgtgcatagcaggggactgtaaccaaaaataaacatgtatttgtgtaattggtttgaagaagtcttgaatagctctttactgtcttacttggggttgataagatttgagtgtttgcaattttttactaaatgtagctccaaagtcttaaatggcttgtttgttcttaaactgttaattgatgaaactgtgcataagtttacaatgtactaacttattttgcttattatatatagtgttttattggaaattgtaaccacacacttcagcatgatgaaaataaagattagtgtttccatttaaataaatgttttatcctccc

SEQ ID NO: 188386 - DNA, 3072 bp, Homo sapiens
  Payload ID: 17070
  Gene Symbol: SYBU
  Gene Name: syntabulin (syntaxin-interacting)
  Uniprot ID: Q9NX95
  ENST ID: ENST00000440310
  CDS Start-End: 363-2354
actcaggctgaagggaccgattggagtgctggcttgaactcgtttttctgagttcaattccagtgctcttcccttagcagtgtgctggagctacttcctggagccgggcagctgcagggcagcgctggggaaaagactgttctctggctacatagcagcctggcttctccaagccggagggagctgcgctgaccactgaaggcctttctgatgcaaccccttccaagtagaatccatcgcagcctttcagatcccggaacccagaggctgtgtcggtcctgacgcactggcttggctgggctccggtgcctcctcctggacggcggcagcggcggcgcgaggagccggcgggcagcggcgcgatggggcccctccgcgagagcaagaaggagcacagagtgcagcatcatgacaaggagatttctcgaagccgaattccccggttgattcttcggccccatatgccccaacaacagcacaaagtgtccccagcctctgagtctcctttctctgaggaagagagcagagagttcaaccccagcagctctgggcgctcagcgaggaccgttagcagcaacagcttctgctcagatgacacaggctgtcctagcagccagtcagtgtctcctgtgaagacaccctcagatgctggaaacagccccattggcttttgccctggaagtgatgaaggcttcaccagaaagaaatgcacgattggaatggttggtgaaggaagcattcagtcctctcgatataagaaggaatcaaagtcaggccttgtgaaaccaggtagtgaagctgattttagctcctcgagcagcacaggcagcatttccgctcctgaggtccatatgtcgactgcgggaagcaagcggtcttcttcttcacgcaatcgaggtcctcatgggcggagtaatggagcttcgtcacacaagcctggcagcagcccatcatccccgcgggaaaaggaccttctgtccatgctgtgcaggaatcagctgagccctgtcaatatccatcccagttatgcaccttcttccccaagcagtagcaactcaggctcctacaaaggaagcgactgtagccccatcatgaggcgttctggaaggtacatgtcttgcggtgaaaatcatggtgtcagacccccaaacccagagcagtatttgactccactgcagcagaaagaggtgacagtgagacacctcaaaaccaagctgaaggaatctgagcgccgactccatgaaagggaaagtgaaatcgtggagcttaagtcccagctggcccgcatgcgagaggactggattgaggaggagtgtcaccgggtagaggcccagttggcactcaaagaagccaggaaagagattaaacagctcaaacaggtcatcgaaaccatgcggagcagcttggctgataaagataaaggcattcagaaatattttgtggacataaacatccaaaacaagaagctggagtctctccttcagagcatggagatggcacacagtggctctctgagggacgaactgtgcctagactttccatgtgattccccagagaagagcttaaccctcaacccccctcttgacacaatggcagatgggttatctctggaagagcaggtcacgggggaaggggctgacagggagctactggtaggagatagcatagccaacagcacagatttgttcgatgagatagtgacagccaccaccacagaatctggtgacctggagcttgtgcattccacccctggggctaacgtcctggagctgctgcccatagtcatgggtcaggaggagggcagtgtggtggtggagcgagccgttcagaccgacgtggtgccctacagcccagccatctcagagctcattcagagtgtgctgcagaagctccaggacccctgtccctcgagcttggcgtcccctgatgagtctgaaccagactcgatggagagcttcccagagtccctctctgccttagtggttgatttaactccaagaaatccaaactcagccatccttttgtctcccgtggagaccccctacgccaatgtggatgcagaagttcatgcaaaccgcctcatgagagagctggattttgcagcctgcgtggaagagaggttggatggtgtcatcccactggctcgcgggggcgtcgtgaggcagtactggagcagcagcttcctggtggatctcctggctgtggctgcccccgtggtccccacggttctgtgggcattcagtactcagagagggggaacggatcctgtgtataacatcggggccttgctcaggggctgttgcgtggttgccctgcattcgctccgccgcaccgccttccgtatcaaaacctaaatagaagttgttgttaccgtgtgccaatgtgtcccatgtgggttgtgccaggtagagaaacaggaagtcaatcatctgtgacagtctctattctgtcgttttgctccttggtatttgatttgcactatatttagttgaagcctgttcactgtttaaaaccggaggtatcttcaaaggcatggagacctggttccagtaaatgtcccaccagtggggtatagaaagcatgctcatgaccctgccgtgtcgtctgaggtacccgttcttatcctagtggttcaggaagagaaaacgcagtttgcactttcaagacagcttctctaaggctggcatgttatctccttgctttgctttttgccgttttaaaatgtgtaattgttccagcattccaatggtcttgtgcatagcaggggactgtaaccaaaaataaacatgtatttgtgtaattggtttgaagaagtcttgaatagctctttactgtcttacttggggttgataagatttgagtgtttgcaattttttactaaatgtagctccaaagtcttaaatggcttgtttgttcttaaactgttaattgatgaaactgtgcataagtttacaatgtactaacttattttgcttattatatatagtgttttattggaaattgtaaccacacacttcagcatgatgaaaataaagattagtgtttccatttaaataaatgttttatcctccc

SEQ ID NO: 188387 - DNA, 3226 bp, Homo sapiens
  Payload ID: 17070
  Gene Symbol: SYBU
  Gene Name: syntabulin (syntaxin-interacting)
  Uniprot ID: Q9NX95
  ENST ID: ENST00000422135
  CDS Start-End: 517-2508
agcggcttcttcaagaaacagatcctgcagcataatctgccagggccctggcaacaggaaccggtccttcaggcagcgagcccagggagcagaatcctggcgcccccggcgcgcggccctcagcgtgctcacgccgctgcgccccacccagcggtgcctgccctttggtcccccgcccttctctccattttgtcctcagccccagcagccgcccggctggctgcagaggccgaggggccgagggcaccggagcgcaagggattccgcggcaccacgtgtccaagccgggctaaggcgggcggagcgggccgggcccggctccccgggcctgagcgcaaaccagcagcgacgcggggtcccgtccgcaccggcacccggcccagccggggcccggtctcccgggcgcacgtaggtgcctcctcctggacagcgcgatggggcccttctgggcgagaaagggtgcctcctcctggacggcggcagcggcggcgcgaggagccggcgggcagcggcgcgatggggcccctccgcgagagcaagaaggagcacagagtgcagcatcatgacaaggagatttctcgaagccgaattccccggttgattcttcggccccatatgccccaacaacagcacaaagtgtccccagcctctgagtctcctttctctgaggaagagagcagagagttcaaccccagcagctctgggcgctcagcgaggaccgttagcagcaacagcttctgctcagatgacacaggctgtcctagcagccagtcagtgtctcctgtgaagacaccctcagatgctggaaacagccccattggcttttgccctggaagtgatgaaggcttcaccagaaagaaatgcacgattggaatggttggtgaaggaagcattcagtcctctcgatataagaaggaatcaaagtcaggccttgtgaaaccaggtagtgaagctgattttagctcctcgagcagcacaggcagcatttccgctcctgaggtccatatgtcgactgcgggaagcaagcggtcttcttcttcacgcaatcgaggtcctcatgggcggagtaatggagcttcgtcacacaagcctggcagcagcccatcatccccgcgggaaaaggaccttctgtccatgctgtgcaggaatcagctgagccctgtcaatatccatcccagttatgcaccttcttccccaagcagtagcaactcaggctcctacaaaggaagcgactgtagccccatcatgaggcgttctggaaggtacatgtcttgcggtgaaaatcatggtgtcagacccccaaacccagagcagtatttgactccactgcagcagaaagaggtgacagtgagacacctcaaaaccaagctgaaggaatctgagcgccgactccatgaaagggaaagtgaaatcgtggagcttaagtcccagctggcccgcatgcgagaggactggattgaggaggagtgtcaccgggtagaggcccagttggcactcaaagaagccaggaaagagattaaacagctcaaacaggtcatcgaaaccatgcggagcagcttggctgataaagataaaggcattcagaaatattttgtggacataaacatccaaaacaagaagctggagtctctccttcagagcatggagatggcacacagtggctctctgagggacgaactgtgcctagactttccatgtgattccccagagaagagcttaaccctcaacccccctcttgacacaatggcagatgggttatctctggaagagcaggtcacgggggaaggggctgacagggagctactggtaggagatagcatagccaacagcacagatttgttcgatgagatagtgacagccaccaccacagaatctggtgacctggagcttgtgcattccacccctggggctaacgtcctggagctgctgcccatagtcatgggtcaggaggagggcagtgtggtggtggagcgagccgttcagaccgacgtggtgccctacagcccagccatctcagagctcattcagagtgtgctgcagaagctccaggacccctgtccctcgagcttggcgtcccctgatgagtctgaaccagactcgatggagagcttcccagagtccctctctgccttagtggttgatttaactccaagaaatccaaactcagccatccttttgtctcccgtggagaccccctacgccaatgtggatgcagaagttcatgcaaaccgcctcatgagagagctggattttgcagcctgcgtggaagagaggttggatggtgtcatcccactggctcgcgggggcgtcgtgaggcagtactggagcagcagcttcctggtggatctcctggctgtggctgcccccgtggtccccacggttctgtgggcattcagtactcagagagggggaacggatcctgtgtataacatcggggccttgctcaggggctgttgcgtggttgccctgcattcgctccgccgcaccgccttccgtatcaaaacctaaatagaagttgttgttaccgtgtgccaatgtgtcccatgtgggttgtgccaggtagagaaacaggaagtcaatcatctgtgacagtctctattctgtcgttttgctccttggtatttgatttgcactatatttagttgaagcctgttcactgtttaaaaccggaggtatcttcaaaggcatggagacctggttccagtaaatgtcccaccagtggggtatagaaagcatgctcatgaccctgccgtgtcgtctgaggtacccgttcttatcctagtggttcaggaagagaaaacgcagtttgcactttcaagacagcttctctaaggctggcatgttatctccttgctttgctttttgccgttttaaaatgtgtaattgttccagcattccaatggtcttgtgcatagcaggggactgtaaccaaaaataaacatgtatttgtgtaattggtttgaagaagtcttgaatagctctttactgtcttacttggggttgataagatttgagtgtttgcaattttttactaaatgtagctccaaagtcttaaatggcttgtttgttcttaaactgttaattgatgaaactgtgcataagtttacaatgtactaacttattttgcttattatatatagtgttttattggaaattgtaaccacacacttcagcatgatgaaaataaagattagtgtttccatttaaataaatgttttatcctccc

SEQ ID NO: 188388 - DNA, 2919 bp, Homo sapiens
  Payload ID: 17070
  Gene Symbol: SYBU
  Gene Name: syntabulin (syntaxin-interacting)
  Uniprot ID: Q9NX95
  ENST ID: ENST00000446070
  CDS Start-End: 207-2195
agcacgtcagctgctccttgttgctgtgcagatcacccaacattaggtcaccgagagagacagcagctcttgctcacacagctgataggattaggagatggtgctttgtcagccctgattgagcccaagaaaaccccctgcatacacaggtgcctcctcctggacggcggcagcggcggcgcgaggagccggcgggcagcggcgcgatggggcccctccgcgagagcaaggagcacagagtgcagcatcatgacaaggagatttctcgaagccgaattccccggttgattcttcggccccatatgccccaacaacagcacaaagtgtccccagcctctgagtctcctttctctgaggaagagagcagagagttcaaccccagcagctctgggcgctcagcgaggaccgttagcagcaacagcttctgctcagatgacacaggctgtcctagcagccagtcagtgtctcctgtgaagacaccctcagatgctggaaacagccccattggcttttgccctggaagtgatgaaggcttcaccagaaagaaatgcacgattggaatggttggtgaaggaagcattcagtcctctcgatataagaaggaatcaaagtcaggccttgtgaaaccaggtagtgaagctgattttagctcctcgagcagcacaggcagcatttccgctcctgaggtccatatgtcgactgcgggaagcaagcggtcttcttcttcacgcaatcgaggtcctcatgggcggagtaatggagcttcgtcacacaagcctggcagcagcccatcatccccgcgggaaaaggaccttctgtccatgctgtgcaggaatcagctgagccctgtcaatatccatcccagttatgcaccttcttccccaagcagtagcaactcaggctcctacaaaggaagcgactgtagccccatcatgaggcgttctggaaggtacatgtcttgcggtgaaaatcatggtgtcagacccccaaacccagagcagtatttgactccactgcagcagaaagaggtgacagtgagacacctcaaaaccaagctgaaggaatctgagcgccgactccatgaaagggaaagtgaaatcgtggagcttaagtcccagctggcccgcatgcgagaggactggattgaggaggagtgtcaccgggtagaggcccagttggcactcaaagaagccaggaaagagattaaacagctcaaacaggtcatcgaaaccatgcggagcagcttggctgataaagataaaggcattcagaaatattttgtggacataaacatccaaaacaagaagctggagtctctccttcagagcatggagatggcacacagtggctctctgagggacgaactgtgcctagactttccatgtgattccccagagaagagcttaaccctcaacccccctcttgacacaatggcagatgggttatctctggaagagcaggtcacgggggaaggggctgacagggagctactggtaggagatagcatagccaacagcacagatttgttcgatgagatagtgacagccaccaccacagaatctggtgacctggagcttgtgcattccacccctggggctaacgtcctggagctgctgcccatagtcatgggtcaggaggagggcagtgtggtggtggagcgagccgttcagaccgacgtggtgccctacagcccagccatctcagagctcattcagagtgtgctgcagaagctccaggacccctgtccctcgagcttggcgtcccctgatgagtctgaaccagactcgatggagagcttcccagagtccctctctgccttagtggttgatttaactccaagaaatccaaactcagccatccttttgtctcccgtggagaccccctacgccaatgtggatgcagaagttcatgcaaaccgcctcatgagagagctggattttgcagcctgcgtggaagagaggttggatggtgtcatcccactggctcgcgggggcgtcgtgaggcagtactggagcagcagcttcctggtggatctcctggctgtggctgcccccgtggtccccacggttctgtgggcattcagtactcagagagggggaacggatcctgtgtataacatcggggccttgctcaggggctgttgcgtggttgccctgcattcgctccgccgcaccgccttccgtatcaaaacctaaatagaagttgttgttaccgtgtgccaatgtgtcccatgtgggttgtgccaggtagagaaacaggaagtcaatcatctgtgacagtctctattctgtcgttttgctccttggtatttgatttgcactatatttagttgaagcctgttcactgtttaaaaccggaggtatcttcaaaggcatggagacctggttccagtaaatgtcccaccagtggggtatagaaagcatgctcatgaccctgccgtgtcgtctgaggtacccgttcttatcctagtggttcaggaagagaaaacgcagtttgcactttcaagacagcttctctaaggctggcatgttatctccttgctttgctttttgccgttttaaaatgtgtaattgttccagcattccaatggtcttgtgcatagcaggggactgtaaccaaaaataaacatgtatttgtgtaattggtttgaagaagtcttgaatagctctttactgtcttacttggggttgataagatttgagtgtttgcaattttttactaaatgtagctccaaagtcttaaatggcttgtttgttcttaaactgttaattgatgaaactgtgcataagtttacaatgtactaacttattttgcttattatatatagtgttttattggaaattgtaaccacacacttcagcatgatgaaaataaagattagtgtttccatttaaataaatgttttatcctcccataaaa

SEQ ID NO: 188389 - DNA, 3007 bp, Homo sapiens
  Payload ID: 17070
  Gene Symbol: SYBU
  Gene Name: syntabulin (syntaxin-interacting)
  ENST ID: ENST00000424158
  CDS Start-End: 271-2277
agacagcagctcttgctcacacagctgataggattaggagatggtgctttgtcagccctgattgagcccaagaaaaccccctgcatacacaggcatcaacaaatattgactggatcatctggacctgacttagctgccctttggaaagttctgttcaatcagctggatagagctgtttgttttcctcacctaaccctcacagctatcctagaggtgcctcctcctggacggcggcagcggcggcgcgaggagccggcgggcagcggcgcgatggggcccctccgcgagagcaagatgtccaattttgagaaggagcacagagtgcagcatcatgacaaggagatttctcgaagccgaattccccggttgattcttcggccccatatgccccaacaacagcacaaagtgtccccagcctctgagtctcctttctctgaggaagagagcagagagttcaaccccagcagctctgggcgctcagcgaggaccgttagcagcaacagcttctgctcagatgacacaggctgtcctagcagccagtcagtgtctcctgtgaagacaccctcagatgctggaaacagccccattggcttttgccctggaagtgatgaaggcttcaccagaaagaaatgcacgattggaatggttggtgaaggaagcattcagtcctctcgatataagaaggaatcaaagtcaggccttgtgaaaccaggtagtgaagctgattttagctcctcgagcagcacaggcagcatttccgctcctgaggtccatatgtcgactgcgggaagcaagcggtcttcttcttcacgcaatcgaggtcctcatgggcggagtaatggagcttcgtcacacaagcctggcagcagcccatcatccccgcgggaaaaggaccttctgtccatgctgtgcaggaatcagctgagccctgtcaatatccatcccagttatgcaccttcttccccaagcagtagcaactcaggctcctacaaaggaagcgactgtagccccatcatgaggcgttctggaaggtacatgtcttgcggtgaaaatcatggtgtcagacccccaaacccagagcagtatttgactccactgcagcagaaagaggtgacagtgagacacctcaaaaccaagctgaaggaatctgagcgccgactccatgaaagggaaagtgaaatcgtggagcttaagtcccagctggcccgcatgcgagaggactggattgaggaggagtgtcaccgggtagaggcccagttggcactcaaagaagccaggaaagagattaaacagctcaaacaggtcatcgaaaccatgcggagcagcttggctgataaagataaaggcattcagaaatattttgtggacataaacatccaaaacaagaagctggagtctctccttcagagcatggagatggcacacagtggctctctgagggacgaactgtgcctagactttccatgtgattccccagagaagagcttaaccctcaacccccctcttgacacaatggcagatgggttatctctggaagagcaggtcacgggggaaggggctgacagggagctactggtaggagatagcatagccaacagcacagatttgttcgatgagatagtgacagccaccaccacagaatctggtgacctggagcttgtgcattccacccctggggctaacgtcctggagctgctgcccatagtcatgggtcaggaggagggcagtgtggtggtggagcgagccgttcagaccgacgtggtgccctacagcccagccatctcagagctcattcagagtgtgctgcagaagctccaggacccctgtccctcgagcttggcgtcccctgatgagtctgaaccagactcgatggagagcttcccagagtccctctctgccttagtggttgatttaactccaagaaatccaaactcagccatccttttgtctcccgtggagaccccctacgccaatgtggatgcagaagttcatgcaaaccgcctcatgagagagctggattttgcagcctgcgtggaagagaggttggatggtgtcatcccactggctcgcgggggcgtcgtgaggcagtactggagcagcagcttcctggtggatctcctggctgtggctgcccccgtggtccccacggttctgtgggcattcagtactcagagagggggaacggatcctgtgtataacatcggggccttgctcaggggctgttgcgtggttgccctgcattcgctccgccgcaccgccttccgtatcaaaacctaaatagaagttgttgttaccgtgtgccaatgtgtcccatgtgggttgtgccaggtagagaaacaggaagtcaatcatctgtgacagtctctattctgtcgttttgctccttggtatttgatttgcactatatttagttgaagcctgttcactgtttaaaaccggaggtatcttcaaaggcatggagacctggttccagtaaatgtcccaccagtggggtatagaaagcatgctcatgaccctgccgtgtcgtctgaggtacccgttcttatcctagtggttcaggaagagaaaacgcagtttgcactttcaagacagcttctctaaggctggcatgttatctccttgctttgctttttgccgttttaaaatgtgtaattgttccagcattccaatggtcttgtgcatagcaggggactgtaaccaaaaataaacatgtatttgtgtaattggtttgaagaagtcttgaatagctctttactgtcttacttggggttgataagatttgagtgtttgcaattttttactaaatgtagctccaaagtcttaaatggcttgtttgttcttaaactgttaattgatgaaactgtgcataagtttacaatgtactaacttattttgcttattatatatagtgttttattggaaattgtaaccacacacttcagcatgatgaaaataaagattagtgtttccatttaaataaatgttttatcctcccataaaataataa

SEQ ID NO: 188390 - DNA, 575 bp, Homo sapiens
  Payload ID: 17070
  Gene Symbol: SYBU
  Gene Name: syntabulin (syntaxin-interacting)
  ENST ID: ENST00000533821
  CDS Start-End: 88-575
aattttgtactgcaggctttgctctagaatgtgcctcctcctggacggcggcagcggcggcgcgaggagccggcgggcagcggcgcgatggggcccctccgcgagagcaaggagcacagagtgcagcatcatgacaaggagatttctcgaagccgaattccccggttgattcttcggccccatatgccccaacaacagcacaaagtgtccccagcctctgagtctcctttctctgaggaagagagcagagagttcaaccccagcagctctgggcgctcagcgaggaccgttagcagcaacagcttctgctcagatgacacaggctgtcctagcagccagtcagtgtctcctgtgaagacaccctcagatgctggaaacagccccattggcttttgccctggaagtgatgaaggcttcaccagaaagaaatgcacgattggaatggttggtgaaggaagcattcagtcctctcgatataagaaggaatcaaagtcaggccttgtgaaaccaggtagtgaagctgattttagctcctcgagcagcacaggcagcatttccgctcctgaggtccatat

SEQ ID NO: 188391 - DNA, 594 bp, Homo sapiens
  Payload ID: 17070
  Gene Symbol: SYBU
  Gene Name: syntabulin (syntaxin-interacting)
  ENST ID: ENST00000533394
  CDS Start-End: 161-594
gtgccagatgtcactgagagtgagatcctggggaaggttccactaaaggagtccaaggaaatgcagagcataatttgtgagcagagcaaaatccaattgtagtgaagctgattttagctcctcgagcagcacaggcagcatttccgctcctgaggtccatatgtcgactgcgggaagcaagcggtcttcttcttcacgcaatcgaggtcctcatgggcggagtaatggagcttcgtcacacaagcctggcagcagcccatcatccccgcgggaaaaggaccttctgtccatgctgtgcaggaatcagctgagccctgtcaatatccatcccagttatgcaccttcttccccaagcagtagcaactcaggctcctacaaaggaagcgactgtagccccatcatgaggcgttctggaaggtacatgtcttgcggtgaaaatcatggtgtcagacccccaaacccagagcagtatttgactccactgcagcagaaagaggtgacagtgagacacctcaaaaccaagctgaaggaatctgagcgccgactccatgaaagggaaagtgaaatcgtggagcttaagtcccagctggcccg

SEQ ID NO: 188392 - DNA, 559 bp, Homo sapiens
  Payload ID: 17070
  Gene Symbol: SYBU
  Gene Name: syntabulin (syntaxin-interacting)
  ENST ID: ENST00000534578
  CDS Start-End: 331-559
attttgtcctcagccccagcagccgcccggctggctgcagaggccgaggggccgagggcaccggagcgcaagggattccgcggcaccacgtgtccaagccgggctaaggcgggcggagcgggccgggcccggctccccgggcctgagcgcaaaccagcagcgacgcggggtcccgtccgcaccggcacccggcccagccggggcccggtctcccgggcgcacgtaggtgcctcctcctggacagcgcgatggggcccttctgggcgagaaagggtgcctcctcctggacggcggcagcggcggcgcgaggagccggcgggcagcggcgcgatggggcccctccgcgagagcaagaaggagcacagagtgcagcatcatgacaaggagatttctcgaagccgaattccccggttgattcttcggccccatatgccccaacaacagcacaaagtgtccccagcctctgagtctcctttctctgaggaagagagcagagagttcaaccccagcagctctgggcgctcagcgaggaccgttagcagcaacagcttctgctcag

SEQ ID NO: 188393 - DNA, 582 bp, Homo sapiens
  Payload ID: 17070
  Gene Symbol: SYBU
  Gene Name: syntabulin (syntaxin-interacting)
  ENST ID: ENST00000534184
  CDS Start-End: 272-582
agcattagcattctacttagaacaaagggaggtgcccggaagcagtacacattagtgcagagttttctggtttccctttaaagagaaggcacagccatttgactcttgagcttatttaaacaagtcaccagtccttgactccagaactgaagctttatatgttctttctatttggctgagccagtaatttttgattgcttcttcttcccaagaggtgcctcctcctggacggcggcagcggcggcgcgaggagccggcgggcagcggcgcgatggggcccctccgcgagagcaaggagcacagagtgcagcatcatgacaaggagatttctcgaagccgaattccccggttgattcttcggccccatatgccccaacaacagcacaaagtgtccccagcctctgagtctcctttctctgaggaagagagcagagagttcaaccccagcagctctgggcgctcagcgaggaccgttagcagcaacagcttctgctcagatgacacaggctgtcctagcagccagtcagtgtctcctgtgaagacaccctcagatgctggaaacagccccattggcttttgccc

SEQ ID NO: 188394 - DNA, 2995 bp, Homo sapiens
  Payload ID: 17070
  Gene Symbol: SYBU
  Gene Name: syntabulin (syntaxin-interacting)
  Uniprot ID: Q9NX95
  ENST ID: ENST00000528647
  CDS Start-End: 287-2275
gcagtgtgctggagctacttcctggagccgggcagctgcagggcagcgctggggaaaagactgttctctggctacatagcagcctggcttctccaagccggagggagctgcgctgaccactgaaggcctttctgatgcaaccccttccaagtagaatccatcgcagcctttcagatcccggaacccagaggctgtgtcggtcctgacgcactggcttggctgggctccggtgcctcctcctggacggcggcagcggcggcgcgaggagccggcgggcagcggcgcgatggggcccctccgcgagagcaaggagcacagagtgcagcatcatgacaaggagatttctcgaagccgaattccccggttgattcttcggccccatatgccccaacaacagcacaaagtgtccccagcctctgagtctcctttctctgaggaagagagcagagagttcaaccccagcagctctgggcgctcagcgaggaccgttagcagcaacagcttctgctcagatgacacaggctgtcctagcagccagtcagtgtctcctgtgaagacaccctcagatgctggaaacagccccattggcttttgccctggaagtgatgaaggcttcaccagaaagaaatgcacgattggaatggttggtgaaggaagcattcagtcctctcgatataagaaggaatcaaagtcaggccttgtgaaaccaggtagtgaagctgattttagctcctcgagcagcacaggcagcatttccgctcctgaggtccatatgtcgactgcgggaagcaagcggtcttcttcttcacgcaatcgaggtcctcatgggcggagtaatggagcttcgtcacacaagcctggcagcagcccatcatccccgcgggaaaaggaccttctgtccatgctgtgcaggaatcagctgagccctgtcaatatccatcccagttatgcaccttcttccccaagcagtagcaactcaggctcctacaaaggaagcgactgtagccccatcatgaggcgttctggaaggtacatgtcttgcggtgaaaatcatggtgtcagacccccaaacccagagcagtatttgactccactgcagcagaaagaggtgacagtgagacacctcaaaaccaagctgaaggaatctgagcgccgactccatgaaagggaaagtgaaatcgtggagcttaagtcccagctggcccgcatgcgagaggactggattgaggaggagtgtcaccgggtagaggcccagttggcactcaaagaagccaggaaagagattaaacagctcaaacaggtcatcgaaaccatgcggagcagcttggctgataaagataaaggcattcagaaatattttgtggacataaacatccaaaacaagaagctggagtctctccttcagagcatggagatggcacacagtggctctctgagggacgaactgtgcctagactttccatgtgattccccagagaagagcttaaccctcaacccccctcttgacacaatggcagatgggttatctctggaagagcaggtcacgggggaaggggctgacagggagctactggtaggagatagcatagccaacagcacagatttgttcgatgagatagtgacagccaccaccacagaatctggtgacctggagcttgtgcattccacccctggggctaacgtcctggagctgctgcccatagtcatgggtcaggaggagggcagtgtggtggtggagcgagccgttcagaccgacgtggtgccctacagcccagccatctcagagctcattcagagtgtgctgcagaagctccaggacccctgtccctcgagcttggcgtcccctgatgagtctgaaccagactcgatggagagcttcccagagtccctctctgccttagtggttgatttaactccaagaaatccaaactcagccatccttttgtctcccgtggagaccccctacgccaatgtggatgcagaagttcatgcaaaccgcctcatgagagagctggattttgcagcctgcgtggaagagaggttggatggtgtcatcccactggctcgcgggggcgtcgtgaggcagtactggagcagcagcttcctggtggatctcctggctgtggctgcccccgtggtccccacggttctgtgggcattcagtactcagagagggggaacggatcctgtgtataacatcggggccttgctcaggggctgttgcgtggttgccctgcattcgctccgccgcaccgccttccgtatcaaaacctaaatagaagttgttgttaccgtgtgccaatgtgtcccatgtgggttgtgccaggtagagaaacaggaagtcaatcatctgtgacagtctctattctgtcgttttgctccttggtatttgatttgcactatatttagttgaagcctgttcactgtttaaaaccggaggtatcttcaaaggcatggagacctggttccagtaaatgtcccaccagtggggtatagaaagcatgctcatgaccctgccgtgtcgtctgaggtacccgttcttatcctagtggttcaggaagagaaaacgcagtttgcactttcaagacagcttctctaaggctggcatgttatctccttgctttgctttttgccgttttaaaatgtgtaattgttccagcattccaatggtcttgtgcatagcaggggactgtaaccaaaaataaacatgtatttgtgtaattggtttgaagaagtcttgaatagctctttactgtcttacttggggttgataagatttgagtgtttgcaattttttactaaatgtagctccaaagtcttaaatggcttgtttgttcttaaactgttaattgatgaaactgtgcataagtttacaatgtactaacttattttgcttattatatatagtgttttattggaaattgtaaccacacacttcagcatgatgaaaataaagattagtgtttccatttaaataaatgttttatcctcccat

SEQ ID NO: 188395 - DNA, 1126 bp, Homo sapiens
  Payload ID: 17070
  Gene Symbol: SYBU
  Gene Name: syntabulin (syntaxin-interacting)
  ENST ID: ENST00000529190
  CDS Start-End: 515-1126
cggcttcttcaagaaacagatcctgcagcataatctgccagggccctggcaacaggaaccggtccttcaggcagcgagcccagggagcagaatcctggcgcccccggcgcgcggccctcagcgtgctcacgccgctgcgccccacccagcggtgcctgccctttggtcccccgcccttctctccattttgtcctcagccccagcagccgcccggctggctgcagaggccgaggggccgagggcaccggagcgcaagggattccgcggcaccacgtgtccaagccgggctaaggcgggcggagcgggccgggcccggctccccgggcctgagcgcaaaccagcagcgacgcggggtcccgtccgcaccggcacccggcccagccggggcccggtctcccgggcgcacgtaggtgcctcctcctggacagcgcgatggggcccttctgggcgagaaagggtgcctcctcctggacggcggcagcggcggcgcgaggagccggcgggcagcggcgcgatggggcccctccgcgagagcaaggagcacagagtgcagcatcatgacaaggagatttctcgaagccgaattccccggttgattcttcggccccatatgccccaacaacagcacaaagtgtccccagcctctgagtctcctttctctgaggaagagagcagagagttcaaccccagcagctctgggcgctcagcgaggaccgttagcagcaacagcttctgctcagatgacacaggctgtcctagcagccagtcagtgtctcctgtgaagacaccctcagatgctggaaacagccccattggcttttgccctggaagtgatgaaggcttcaccagaaagaaatgcacgattggaatggttggtgaaggaagcattcagtcctctcgatataagaaggaatcaaagtcaggccttgtgaaaccaggtagtgaagctgattttagctcctcgagcagcacaggcagcatttccgctcctgaggtccatatgtcgactgcgggaagcaagcggtcttcttcttcacgcaatcgaggtcctcatgggcggagtaatggagcttcgtcacacaagcctggcagcagcccatcatccccgcgggaaaaggaccttctg

SEQ ID NO: 188396 - DNA, 2645 bp, Homo sapiens
  Payload ID: 17070
  Gene Symbol: SYBU
  Gene Name: syntabulin (syntaxin-interacting)
  Uniprot ID: Q9NX95
  ENST ID: ENST00000533065
  CDS Start-End: 311-1945
aatcggcggcagtggcggcggcggcgcgttggagcctcaccaagagccgccgcccgcagcccgcgccggctcagcgcagtctcctcgctccgtgctcgcaggtgcctcctcctggacggcggcagcggcggcgcgaggagccggcgggcagcggcgcgatggggcccctccgcgagagcaagatgacacaggctgtcctagcagccagtcagtgtctcctgtgaagacaccctcagatgctggaaacagccccattggcttttgccctggaagtgatgaaggcttcaccagaaagaaatgcacgattggaatggttggtgaaggaagcattcagtcctctcgatataagaaggaatcaaagtcaggccttgtgaaaccaggtagtgaagctgattttagctcctcgagcagcacaggcagcatttccgctcctgaggtccatatgtcgactgcgggaagcaagcggtcttcttcttcacgcaatcgaggtcctcatgggcggagtaatggagcttcgtcacacaagcctggcagcagcccatcatccccgcgggaaaaggaccttctgtccatgctgtgcaggaatcagctgagccctgtcaatatccatcccagttatgcaccttcttccccaagcagtagcaactcaggctcctacaaaggaagcgactgtagccccatcatgaggcgttctggaaggtacatgtcttgcggtgaaaatcatggtgtcagacccccaaacccagagcagtatttgactccactgcagcagaaagaggtgacagtgagacacctcaaaaccaagctgaaggaatctgagcgccgactccatgaaagggaaagtgaaatcgtggagcttaagtcccagctggcccgcatgcgagaggactggattgaggaggagtgtcaccgggtagaggcccagttggcactcaaagaagccaggaaagagattaaacagctcaaacaggtcatcgaaaccatgcggagcagcttggctgataaagataaaggcattcagaaatattttgtggacataaacatccaaaacaagaagctggagtctctccttcagagcatggagatggcacacagtggctctctgagggacgaactgtgcctagactttccatgtgattccccagagaagagcttaaccctcaacccccctcttgacacaatggcagatgggttatctctggaagagcaggtcacgggggaaggggctgacagggagctactggtaggagatagcatagccaacagcacagatttgttcgatgagatagtgacagccaccaccacagaatctggtgacctggagcttgtgcattccacccctggggctaacgtcctggagctgctgcccatagtcatgggtcaggaggagggcagtgtggtggtggagcgagccgttcagaccgacgtggtgccctacagcccagccatctcagagctcattcagagtgtgctgcagaagctccaggacccctgtccctcgagcttggcgtcccctgatgagtctgaaccagactcgatggagagcttcccagagtccctctctgccttagtggttgatttaactccaagaaatccaaactcagccatccttttgtctcccgtggagaccccctacgccaatgtggatgcagaagttcatgcaaaccgcctcatgagagagctggattttgcagcctgcgtggaagagaggttggatggtgtcatcccactggctcgcgggggcgtcgtgaggcagtactggagcagcagcttcctggtggatctcctggctgtggctgcccccgtggtccccacggttctgtgggcattcagtactcagagagggggaacggatcctgtgtataacatcggggccttgctcaggggctgttgcgtggttgccctgcattcgctccgccgcaccgccttccgtatcaaaacctaaatagaagttgttgttaccgtgtgccaatgtgtcccatgtgggttgtgccaggtagagaaacaggaagtcaatcatctgtgacagtctctattctgtcgttttgctccttggtatttgatttgcactatatttagttgaagcctgttcactgtttaaaaccggaggtatcttcaaaggcatggagacctggttccagtaaatgtcccaccagtggggtatagaaagcatgctcatgaccctgccgtgtcgtctgaggtacccgttcttatcctagtggttcaggaagagaaaacgcagtttgcactttcaagacagcttctctaaggctggcatgttatctccttgctttgctttttgccgttttaaaatgtgtaattgttccagcattccaatggtcttgtgcatagcaggggactgtaaccaaaaataaacatgtatttgtgtaattggtttgaagaagtcttgaatagctctttactgtcttacttggggttgataagatttgagtgtttgcaattttttactaaatgtagctccaaagtcttaaatggcttgtttgttcttaaactgttaattgatgaaactgtgcataagtttacaatgtactaacttattttgcttattatatatagtgttttattggaaattgtaaccacacacttcagcatgatgaaaataaagattagtgtttccatttaaa

SEQ ID NO: 188397 - DNA, 3244 bp, Homo sapiens
  Payload ID: 17070
  Gene Symbol: SYBU
  Gene Name: syntabulin (syntaxin-interacting)
  Uniprot ID: Q9NX95
  ENST ID: ENST00000533895
  CDS Start-End: 328-2316
agcacgtcagctgctccttgttgctgtgcagatcacccaacattaggtcaccgagagagacagcagctcttgctcacacagctgataggattaggagatggtgctttgtcagccctgattgagcccaagaaaaccccctgcatacacaggcatcaacaaatattgactggatcatctggacctgacttagctgccctttggaaagttctgttcaatcagctggatagagctgtttgttttcctcacctaaccctcacagctatcctagaggtgcctcctcctggacggcggcagcggcggcgcgaggagccggcgggcagcggcgcgatggggcccctccgcgagagcaaggagcacagagtgcagcatcatgacaaggagatttctcgaagccgaattccccggttgattcttcggccccatatgccccaacaacagcacaaagtgtccccagcctctgagtctcctttctctgaggaagagagcagagagttcaaccccagcagctctgggcgctcagcgaggaccgttagcagcaacagcttctgctcagatgacacaggctgtcctagcagccagtcagtgtctcctgtgaagacaccctcagatgctggaaacagccccattggcttttgccctggaagtgatgaaggcttcaccagaaagaaatgcacgattggaatggttggtgaaggaagcattcagtcctctcgatataagaaggaatcaaagtcaggccttgtgaaaccaggtagtgaagctgattttagctcctcgagcagcacaggcagcatttccgctcctgaggtccatatgtcgactgcgggaagcaagcggtcttcttcttcacgcaatcgaggtcctcatgggcggagtaatggagcttcgtcacacaagcctggcagcagcccatcatccccgcgggaaaaggaccttctgtccatgctgtgcaggaatcagctgagccctgtcaatatccatcccagttatgcaccttcttccccaagcagtagcaactcaggctcctacaaaggaagcgactgtagccccatcatgaggcgttctggaaggtacatgtcttgcggtgaaaatcatggtgtcagacccccaaacccagagcagtatttgactccactgcagcagaaagaggtgacagtgagacacctcaaaaccaagctgaaggaatctgagcgccgactccatgaaagggaaagtgaaatcgtggagcttaagtcccagctggcccgcatgcgagaggactggattgaggaggagtgtcaccgggtagaggcccagttggcactcaaagaagccaggaaagagattaaacagctcaaacaggtcatcgaaaccatgcggagcagcttggctgataaagataaaggcattcagaaatattttgtggacataaacatccaaaacaagaagctggagtctctccttcagagcatggagatggcacacagtggctctctgagggacgaactgtgcctagactttccatgtgattccccagagaagagcttaaccctcaacccccctcttgacacaatggcagatgggttatctctggaagagcaggtcacgggggaaggggctgacagggagctactggtaggagatagcatagccaacagcacagatttgttcgatgagatagtgacagccaccaccacagaatctggtgacctggagcttgtgcattccacccctggggctaacgtcctggagctgctgcccatagtcatgggtcaggaggagggcagtgtggtggtggagcgagccgttcagaccgacgtggtgccctacagcccagccatctcagagctcattcagagtgtgctgcagaagctccaggacccctgtccctcgagcttggcgtcccctgatgagtctgaaccagactcgatggagagcttcccagagtccctctctgccttagtggttgatttaactccaagaaatccaaactcagccatccttttgtctcccgtggagaccccctacgccaatgtggatgcagaagttcatgcaaaccgcctcatgagagagctggattttgcagcctgcgtggaagagaggttggatggtgtcatcccactggctcgcgggggcgtcgtgaggcagtactggagcagcagcttcctggtggatctcctggctgtggctgcccccgtggtccccacggttctgtgggcattcagtactcagagagggggaacggatcctgtgtataacatcggggccttgctcaggggctgttgcgtggttgccctgcattcgctccgccgcaccgccttccgtatcaaaacctaaatagaagttgttgttaccgtgtgccaatgtgtcccatgtgggttgtgccaggtagagaaacaggaagtcaatcatctgtgacagtctctattctgtcgttttgctccttggtatttgatttgcactatatttagttgaagcctgttcactgtttaaaaccggaggtatcttcaaaggcatggagacctggttccagtaaatgtcccaccagtggggtatagaaagcatgctcatgaccctgccgtgtcgtctgaggtacccgttcttatcctagtggttcaggaagagaaaacgcagtttgcactttcaagacagcttctctaaggctggcatgttatctccttgctttgctttttgccgttttaaaatgtgtaattgttccagcattccaatggtcttgtgcatagcaggggactgtaaccaaaaataaacatgtatttgtgtaattggtttgaagaagtcttgaatagctctttactgtcttacttggggttgataagatttgagtgtttgcaattttttactaaatgtagctccaaagtcttaaatggcttgtttgttcttaaactgttaattgatgaaactgtgcataagtttacaatgtactaacttattttgcttattatatatagtgttttattggaaattgtaaccacacacttcagcatgatgaaaataaagattagtgtttccatttaaataaatgttttatcctcccataaaataataattatttctgtgattttacttctatgtataagaaagacaatgaatagcagatcttacatctttatcaatagggggtctgtaaaaattgaattaaattaggaagagggaaaaagagttagttattaaagaaaatgaagatttcctacccttacttaaaaagcatcatttctgaataaaagtagatttgtttacttttaaa

SEQ ID NO: 188398 - DNA, 1983 bp, Homo sapiens
  Payload ID: 17070
  Gene Symbol: SYBU
  Gene Name: syntabulin (syntaxin-interacting)
  ENST ID: ENST00000529690
  CDS Start-End: 129-1730
atgcagaaggctcagtctccatggataccccactctgagactgtactctactgagatatgagctgcacacactgtatttctgcaaaagacataccccagcctgtgctgggaggctgtttgcagaggcaatgtttgccatgaaagtctatggagcttaccttctaagtagtgaagctgattttagctcctcgagcagcacaggcagcatttccgctcctgaggtccatatgtcgactgcgggaagcaagcggtcttcttcttcacgcaatcgaggtcctcatgggcggagtaatggagcttcgtcacacaagcctggcagcagcccatcatccccgcgggaaaaggaccttctgtccatgctgtgcaggaatcagctgagccctgtcaatatccatcccagttatgcaccttcttccccaagcagtagcaactcaggctcctacaaaggaagcgactgtagccccatcatgaggcgttctggaaggtacatgtcttgcggtgaaaatcatggtgtcagacccccaaacccagagcagtatttgactccactgcagcagaaagaggtgacagtgagacacctcaaaaccaagctgaaggaatctgagcgccgactccatgaaagggaaagtgaaatcgtggagcttaagtcccagctggcccgcatgcgagaggactggattgaggaggagtgtcaccgggtagaggcccagttggcactcaaagaagccaggaaagagattaaacagctcaaacaggtcatcgaaaccatgcggagcagcttggctgataaagataaaggcattcagaaatattttgtggacataaacatccaaaacaagaagctggagtctctccttcagagcatggagatggcacacagtggctctctgagggacgaactgtgcctagactttccatgtgattccccagagaagagcttaaccctcaacccccctcttgacacaatggcagatgggttatctctggaagagcaggtcacgggggaaggggctgacagggagctactggtaggagatagcatagccaacagcacagatttgttcgatgagatagtgacagccaccaccacagaatctggtgacctggagcttgtgcattccacccctggggctaacgtcctggagctgctgcccatagtcatgggtcaggaggagggcagtgtggtggtggagcgagccgttcagaccgacgtggtgccctacagcccagccatctcagagctcattcagagtgtgctgcagaagctccaggacccctgtccctcgagcttggcgtcccctgatgagtctgaaccagactcgatggagagcttcccagagtccctctctgccttagtggttgatttaactccaagaaatccaaactcagccatccttttgtctcccgtggagaccccctacgccaatgtggatgcagaagttcatgcaaaccgcctcatgagagagctggattttgcagcctgcgtggaagagaggttggatggtgtcatcccactggctcgcgggggcgtcgtgaggcagtactggagcagcagcttcctggtggatctcctggctgtggctgcccccgtggtccccacggttctgtgggcattcagtactcagagagggggaacggatcctgtgtataacatcggggccttgctcaggggctgttgcgtggttgccctgcattcgctccgccgcaccgccttccgtatcaaaacctaaatagaagttgttgttaccgtgtgccaatgtgtcccatgtgggttgtgccaggtagagaaacaggaagtcaatcatctgtgacagtctctattctgtcgttttgctccttggtatttgatttgcactatatttagttgaagcctgttcactgtttaaaaccggaggtatcttcaaaggcatggagacctggttccagtaaatgtcccaccagtggggtatagaaagcatgctcatgaccctgccgtgtcgtctg

SEQ ID NO: 188399 - DNA, 582 bp, Homo sapiens
  Payload ID: 17070
  Gene Symbol: SYBU
  Gene Name: syntabulin (syntaxin-interacting)
  ENST ID: ENST00000526302
  CDS Start-End: 354-582
tttctttccttcgtgacgtgttgtgaagcacgtcagctgctccttgttgctgtgcagatcacccaacattaggtcaccgagagagacagcagctcttgctcacacagctgataggattaggagatggtgctttgtcagccctgattgagcccaagaaaaccccctgcatacacaggcatcaacaaatattgactggatcatctggacctgacttagctgccctttggaaagttctgttcaatcagctggatagagctgtttgttttcctcacctaaccctcacagctatcctagaggtgcctcctcctggacggcggcagcggcggcgcgaggagccggcgggcagcggcgcgatggggcccctccgcgagagcaagaaggagcacagagtgcagcatcatgacaaggagatttctcgaagccgaattccccggttgattcttcggccccatatgccccaacaacagcacaaagtgtccccagcctctgagtctcctttctctgaggaagagagcagagagttcaaccccagcagctctgggcgctcagcgaggaccgttagcagcaacagcttctgctcag

SEQ ID NO: 188400 - DNA, 558 bp, Homo sapiens
  Payload ID: 17070
  Gene Symbol: SYBU
  Gene Name: syntabulin (syntaxin-interacting)
  ENST ID: ENST00000528569
  CDS Start-End: 319-558
atcaggaaataactgttccaggtatagggttcaactttgtgaggagacaagaaaacaagtcagactgtcacagctaatttagggaaagcaaaatggaagtctgaaggctatcaagtaagccagagtgtggtgttaataaagagcctttgggaggcagaagcttgaatgtgatagaagtcagggtgggaagatgacacaggctgtcctagcagccagtcagtgtctcctgtgaagacaccctcagatgctggaaacagccccattggcttttgccctggaagtgatgaaggcttcaccagaaagaaatgcacgattggaatggttggtgaaggaagcattcagtcctctcgatataagaaggaatcaaagtcaggccttgtgaaaccaggtagtgaagctgattttagctcctcgagcagcacaggcagcatttccgctcctgaggtccatatgtcgactgcgggaagcaagcggtcttcttcttcacgcaatcgaggtcctcatgggcggagtaatggagcttcgtcacacaagcctggcagcagcccatcatccccg

SEQ ID NO: 188401 - DNA, 516 bp, Homo sapiens
  Payload ID: 17070
  Gene Symbol: SYBU
  Gene Name: syntabulin (syntaxin-interacting)
  ENST ID: ENST00000531230
  CDS Start-End: 414-516
ttctacttagaacaaagggaggtgcccggaagcagtacacattagtgcagagttttctggtttccctttaaagagaaggcacagccatttgactcttgagcttatttaaacaagtcaccagtccttgactccagaactgaagctttatatgttctttctatttggctgagccagtaatttttgattgcttcttcttcccaagaggtgcctcctcctggacggcggcagcggcggcgcgaggagccggcgggcagcggcgcgatggggcccctccgcgagagcaagatgacacaggctgtcctagcagccagtcagtgtctcctgtgaagacaccctcagatgctggaaacagccccattggcttttgccctggaagtgatgaaggcttcaccagaaagaaatgcacgattggaatggttggtgaaggaagcattcagtcctctcgatataagaaggaatcaaagtcaggccttgtgaaaccaggtagtgaagctgattttagctcctcgagcagca

SEQ ID NO: 188402 - DNA, 559 bp, Homo sapiens
  Payload ID: 17070
  Gene Symbol: SYBU
  Gene Name: syntabulin (syntaxin-interacting)
  ENST ID: ENST00000527600
  CDS Start-End: 339-559
atttgactcttgagcttatttaaacaagtcaccagtccttgactccagaactgaagctttatatgttctttctatttggctgagccagtaatttttgattgcttcttcttcccaagaggcatcaacaaatattgactggatcatctggacctgacttagctgccctttggaaagttctgttcaatcagctggatagagctgtttgttttcctcacctaaccctcacagctatcctagagcccgcgccggctcagcgcagtctcctcgctccgtgctcgcaggtgcctcctcctggacggcggcagcggcggcgcgaggagccggcgggcagcggcgcgatggggcccctccgcgagagcaagaaggagcacagagtgcagcatcatgacaaggagatttctcgaagccgaattccccggttgattcttcggccccatatgccccaacaacagcacaaagtgtccccagcctctgagtctcctttctctgaggaagagagcagagagttcaaccccagcagctctgggcgctcagcgaggaccgttagcagcaacagctt

SEQ ID NO: 188403 - DNA, 2498 bp, Homo sapiens
  Payload ID: 17070
  Gene Symbol: SYBU
  Gene Name: syntabulin (syntaxin-interacting)
  Uniprot ID: Q9NX95
  ENST ID: ENST00000533171
  CDS Start-End: 353-2344
cccatcaggatatttaagctggaagctttgtcaggctgcgtcagtgttccctgagtaagcaggaatgcaaactgcaattttagcattagcattctacttagaacaaagggaggtgcccggaagcagtacacattagtgcagagttttctggtttccctttaaagagaaggcacagccatttgactcttgagcttatttaaacaagtcaccagtccttgactccagaactgaagctttatatgttctttctatttggctgagccagtaatttttgattgcttcttcttcccaagaggtgcctcctcctggacggcggcagcggcggcgcgaggagccggcgggcagcggcgcgatggggcccctccgcgagagcaagaaggagcacagagtgcagcatcatgacaaggagatttctcgaagccgaattccccggttgattcttcggccccatatgccccaacaacagcacaaagtgtccccagcctctgagtctcctttctctgaggaagagagcagagagttcaaccccagcagctctgggcgctcagcgaggaccgttagcagcaacagcttctgctcagatgacacaggctgtcctagcagccagtcagtgtctcctgtgaagacaccctcagatgctggaaacagccccattggcttttgccctggaagtgatgaaggcttcaccagaaagaaatgcacgattggaatggttggtgaaggaagcattcagtcctctcgatataagaaggaatcaaagtcaggccttgtgaaaccaggtagtgaagctgattttagctcctcgagcagcacaggcagcatttccgctcctgaggtccatatgtcgactgcgggaagcaagcggtcttcttcttcacgcaatcgaggtcctcatgggcggagtaatggagcttcgtcacacaagcctggcagcagcccatcatccccgcgggaaaaggaccttctgtccatgctgtgcaggaatcagctgagccctgtcaatatccatcccagttatgcaccttcttccccaagcagtagcaactcaggctcctacaaaggaagcgactgtagccccatcatgaggcgttctggaaggtacatgtcttgcggtgaaaatcatggtgtcagacccccaaacccagagcagtatttgactccactgcagcagaaagaggtgacagtgagacacctcaaaaccaagctgaaggaatctgagcgccgactccatgaaagggaaagtgaaatcgtggagcttaagtcccagctggcccgcatgcgagaggactggattgaggaggagtgtcaccgggtagaggcccagttggcactcaaagaagccaggaaagagattaaacagctcaaacaggtcatcgaaaccatgcggagcagcttggctgataaagataaaggcattcagaaatattttgtggacataaacatccaaaacaagaagctggagtctctccttcagagcatggagatggcacacagtggctctctgagggacgaactgtgcctagactttccatgtgattccccagagaagagcttaaccctcaacccccctcttgacacaatggcagatgggttatctctggaagagcaggtcacgggggaaggggctgacagggagctactggtaggagatagcatagccaacagcacagatttgttcgatgagatagtgacagccaccaccacagaatctggtgacctggagcttgtgcattccacccctggggctaacgtcctggagctgctgcccatagtcatgggtcaggaggagggcagtgtggtggtggagcgagccgttcagaccgacgtggtgccctacagcccagccatctcagagctcattcagagtgtgctgcagaagctccaggacccctgtccctcgagcttggcgtcccctgatgagtctgaaccagactcgatggagagcttcccagagtccctctctgccttagtggttgatttaactccaagaaatccaaactcagccatccttttgtctcccgtggagaccccctacgccaatgtggatgcagaagttcatgcaaaccgcctcatgagagagctggattttgcagcctgcgtggaagagaggttggatggtgtcatcccactggctcgcgggggcgtcgtgaggcagtactggagcagcagcttcctggtggatctcctggctgtggctgcccccgtggtccccacggttctgtgggcattcagtactcagagagggggaacggatcctgtgtataacatcggggccttgctcaggggctgttgcgtggttgccctgcattcgctccgccgcaccgccttccgtatcaaaacctaaatagaagttgttgttaccgtgtgccaatgtgtcccatgtgggttgtgccaggtagagaaacaggaagtcaatcatctgtgacagtctctattctgtcgttttgctccttggtatttgatttgcactatatttagttgaagcctgttcactgttt

SEQ ID NO: 188404 - DNA, 613 bp, Homo sapiens
  Payload ID: 17070
  Gene Symbol: SYBU
  Gene Name: syntabulin (syntaxin-interacting)
  ENST ID: ENST00000534501
  CDS Start-End: 159-613
tttctgatgcaaccccttccaagtagaatccatcgcagcctttcagatcccggaacccagaggctgtgtcggtcctgacgcactggcttggctgggctccggtgcctcctcctggacggcggcagcggcggcgcgaggagccggcgggcagcggcgcgatggggcccctccgcgagagcaagaaggagcacagagtgcagcatcatgacaaggagatttctcgaagccgaattccccggttgattcttcggccccatatgccccaacaacagcacaaagtgtccccagcctctgagtctcctttctctgaggaagagagcagagagttcaaccccagcagctctgggcgctcagcgaggaccgttagcagcaacagcttctgctcagatgacacaggctgtcctagcagccagtcagtgtctcctgtgaagacaccctcagatgctggaaacagccccattggcttttgccctggaagtgatgaaggcttcaccagaaagaaatgcacgattggaatggttggtgaaggaagcattcagtcctctcgatataagaaggaatcaaagtcaggccttgtgaaaccaggtagtgaagctgattttagctcctcgag

SEQ ID NO: 188405 - DNA, 2717 bp, Homo sapiens
  Payload ID: 17070
  Gene Symbol: SYBU
  Gene Name: syntabulin (syntaxin-interacting)
  ENST ID: ENST00000529175
  CDS Start-End: 624-1997
taatcaaaattaccaatgatgcatttatgtgtgctctgtttatcttgccctgttttctcctcctcctgtatggggtaccaccttcccccatcctccaaatgaaccgcattaattttcttaccctgacatgaaccaaatgcaaatatttctaaactgaaacaggtggactagaacaaaaaccatatcttgaaaacagcctccaaaataaacagcctccaaaataaacctgagctaaatcaatattctacattgtgtatgttcttagcaggctattgggtgttatccaaaaaaagctttatggtcagaaactatttgaaagaacaacagagggagaggttgcttgtgctgatgtcacaaggagagaaaataccaggcaggtgggaagaaggccgctcctaaggacagtctacacgaataattgtattgcgcctttcaactctataaattggatttccttagatttaaggagtaagacattagcccttgggcatctgtagccccaagaattttaacatttttcattcttttctcccagtcgaggtcctcatgggcggagtaatggagcttcgtcacacaagcctggcagcagcccatcatccccgcgggaaaaggaccttctgtccatgctgtgcaggaatcagctgagccctgtcaatatccatcccagttatgcaccttcttccccaagcagtagcaactcaggctcctacaaaggaagcgactgtagccccatcatgaggcgttctggaaggtacatgtcttgcggtgaaaatcatggtgtcagacccccaaacccagagcagtatttgactccactgcagcagaaagaggtgacagtgagacacctcaaaaccaagctgaaggaatctgagcgccgactccatgaaagggaaagtgaaatcgtggagcttaagtcccagctggcccgcatgcgagaggactggattgaggaggagtgtcaccgggtagaggcccagttggcactcaaagaagccaggaaagagattaaacagctcaaacaggtcatcgaaaccatgcggagcagcttggctgataaagataaaggcattcagaaatattttgtggacataaacatccaaaacaagaagctggagtctctccttcagagcatggagatggcacacagtggctctctgagggacgaactgtgcctagactttccatgtgattccccagagaagagcttaaccctcaacccccctcttgacacaatggcagatgggttatctctggaagagcaggtcacgggggaaggggctgacagggagctactggtaggagatagcatagccaacagcacagatttgttcgatgagatagtgacagccaccaccacagaatctggtgacctggagcttgtgcattccacccctggggctaacgtcctggagctgctgcccatagtcatgggtcaggaggagggcagtgtggtggtggagcgagccgttcagaccgacgtggtgccctacagcccagccatctcagagctcattcagagtgtgctgcagaagctccaggacccctgtccctcgagcttggcgtcccctgatgagtctgaaccagactcgatggagagcttcccagagtccctctctgccttagtggttgatttaactccaagaaatccaaactcagccatccttttgtctcccgtggagaccccctacgccaatgtggatgcagaagttcatgcaaaccgcctcatgagagagctggattttgcagcctgcgtggaagagaggttggatggtgtcatcccactggctcgcgggggcgtcgtgaggcagtactggagcagcagcttcctggtggatctcctggctgtggctgcccccgtggtccccacggttctgtgggcattcagtactcagagagggggaacggatcctgtgtataacatcggggccttgctcaggggctgttgcgtggttgccctgcattcgctccgccgcaccgccttccgtatcaaaacctaaatagaagttgttgttaccgtgtgccaatgtgtcccatgtgggttgtgccaggtagagaaacaggaagtcaatcatctgtgacagtctctattctgtcgttttgctccttggtatttgatttgcactatatttagttgaagcctgttcactgtttaaaaccggaggtatcttcaaaggcatggagacctggttccagtaaatgtcccaccagtggggtatagaaagcatgctcatgaccctgccgtgtcgtctgaggtacccgttcttatcctagtggttcaggaagagaaaacgcagtttgcactttcaagacagcttctctaaggctggcatgttatctccttgctttgctttttgccgttttaaaatgtgtaattgttccagcattccaatggtcttgtgcatagcaggggactgtaaccaaaaataaacatgtatttgtgtaattggtttgaagaagtcttgaatagctctttactgtcttacttggggttgataagatttgagtgtttgcaattttttactaaatgtagctccaaagtcttaaatggcttgtttgttcttaaactgttaattgatgaaactgtgcataagtttacaatgtactaacttattttgcttattatatatagtgttttattggaaattgtaaccacacacttcagcatgatgaaaataaagattagtgtttccatttaaataaatgttttatcctcccat

SEQ ID NO: 188406 - DNA, 748 bp, Homo sapiens
  Payload ID: 17070
  Gene Symbol: SYBU
  Gene Name: syntabulin (syntaxin-interacting)
  ENST ID: ENST00000524720
  CDS Start-End: 337-748
ctcttatgggaaaacaggcagctctctccctggtaagaaaaatatgggtctccaccccaccccaccacacacacaaaaaaatctcacgatgccccagaatgcagtttctttccttcgtgacgtgttgtgaagcacgtcagctgctccttgttgctgtgcagatcacccaacattaggtcaccgagagagacagcagctcttgctcacacagctgataggattaggagatggtgctttgtcagccctgattgagcccaagaaaaccccctgcatacacaggtgcctcctcctggacggcggcagcggcggcgcgaggagccggcgggcagcggcgcgatggggcccctccgcgagagcaagaaggagcacagagtgcagcatcatgacaaggagatttctcgaagccgaattccccggttgattcttcggccccatatgccccaacaacagcacaaagtgtccccagcctctgagtctcctttctctgaggaagagagcagagagttcaaccccagcagctctgggcgctcagcgaggaccgttagcagcaacagcttctgctcagatgacacaggctgtcctagcagccagtcagtgtctcctgtgaagacaccctcagatgctggaaacagccccattggcttttgccctggaagtgatgaaggcttcaccagaaagaaatgcacgattggaatggttggtgaaggaagcattcagtcctctcgatataagaaggaatcaaagtcag

SEQ ID NO: 188407 - DNA, 545 bp, Homo sapiens
  Payload ID: 17070
  Gene Symbol: SYBU
  Gene Name: syntabulin (syntaxin-interacting)
  ENST ID: ENST00000530841
  CDS Start-End: 440-545
agcagtgtgctggagctacttcctggagccgggcagctgcagggcagcgctggggaaaagactgttctctggctacatagcagcctggcttctccaagccggagggagctgcgctgaccactgaaggcctttctgatgcaaccccttccaagtagaatccatcgcagcctttcagatcccggaacccagaggctgtgtcggtcctgacgcactggcttggctgggctccggtgcctcctcctggacggcggcagcggcggcgcgaggagccggcgggcagcggcgcgatggggcccctccgcgagagcaagatgacacaggctgtcctagcagccagtcagtgtctcctgtgaagacaccctcagatgctggaaacagccccattggcttttgccctggaagtgatgaaggcttcaccagaaagaaatgcacgattggaatggttggtgaaggaagcattcagtcctctcgatataagaaggaatcaaagtcaggccttgtgaaaccaggtagtgaagctgattttagctcctcgagcagcacag

SEQ ID NO: 188408 - DNA, 2636 bp, Homo sapiens
  Payload ID: 17070
  Gene Symbol: SYBU
  Gene Name: syntabulin (syntaxin-interacting)
  Uniprot ID: Q9NX95
  ENST ID: ENST00000528331
  CDS Start-End: 278-1912
agcacgtcagctgctccttgttgctgtgcagatcacccaacattaggtcaccgagagagacagcagctcttgctcacacagctgataggattaggagatggtgctttgtcagccctgattgagcccaagaaaaccccctgcatacacagatgacacaggctgtcctagcagccagtcagtgtctcctgtgaagacaccctcagatgctggaaacagccccattggcttttgccctggaagtgatgaaggcttcaccagaaagaaatgcacgattggaatggttggtgaaggaagcattcagtcctctcgatataagaaggaatcaaagtcaggccttgtgaaaccaggtagtgaagctgattttagctcctcgagcagcacaggcagcatttccgctcctgaggtccatatgtcgactgcgggaagcaagcggtcttcttcttcacgcaatcgaggtcctcatgggcggagtaatggagcttcgtcacacaagcctggcagcagcccatcatccccgcgggaaaaggaccttctgtccatgctgtgcaggaatcagctgagccctgtcaatatccatcccagttatgcaccttcttccccaagcagtagcaactcaggctcctacaaaggaagcgactgtagccccatcatgaggcgttctggaaggtacatgtcttgcggtgaaaatcatggtgtcagacccccaaacccagagcagtatttgactccactgcagcagaaagaggtgacagtgagacacctcaaaaccaagctgaaggaatctgagcgccgactccatgaaagggaaagtgaaatcgtggagcttaagtcccagctggcccgcatgcgagaggactggattgaggaggagtgtcaccgggtagaggcccagttggcactcaaagaagccaggaaagagattaaacagctcaaacaggtcatcgaaaccatgcggagcagcttggctgataaagataaaggcattcagaaatattttgtggacataaacatccaaaacaagaagctggagtctctccttcagagcatggagatggcacacagtggctctctgagggacgaactgtgcctagactttccatgtgattccccagagaagagcttaaccctcaacccccctcttgacacaatggcagatgggttatctctggaagagcaggtcacgggggaaggggctgacagggagctactggtaggagatagcatagccaacagcacagatttgttcgatgagatagtgacagccaccaccacagaatctggtgacctggagcttgtgcattccacccctggggctaacgtcctggagctgctgcccatagtcatgggtcaggaggagggcagtgtggtggtggagcgagccgttcagaccgacgtggtgccctacagcccagccatctcagagctcattcagagtgtgctgcagaagctccaggacccctgtccctcgagcttggcgtcccctgatgagtctgaaccagactcgatggagagcttcccagagtccctctctgccttagtggttgatttaactccaagaaatccaaactcagccatccttttgtctcccgtggagaccccctacgccaatgtggatgcagaagttcatgcaaaccgcctcatgagagagctggattttgcagcctgcgtggaagagaggttggatggtgtcatcccactggctcgcgggggcgtcgtgaggcagtactggagcagcagcttcctggtggatctcctggctgtggctgcccccgtggtccccacggttctgtgggcattcagtactcagagagggggaacggatcctgtgtataacatcggggccttgctcaggggctgttgcgtggttgccctgcattcgctccgccgcaccgccttccgtatcaaaacctaaatagaagttgttgttaccgtgtgccaatgtgtcccatgtgggttgtgccaggtagagaaacaggaagtcaatcatctgtgacagtctctattctgtcgttttgctccttggtatttgatttgcactatatttagttgaagcctgttcactgtttaaaaccggaggtatcttcaaaggcatggagacctggttccagtaaatgtcccaccagtggggtatagaaagcatgctcatgaccctgccgtgtcgtctgaggtacccgttcttatcctagtggttcaggaagagaaaacgcagtttgcactttcaagacagcttctctaaggctggcatgttatctccttgctttgctttttgccgttttaaaatgtgtaattgttccagcattccaatggtcttgtgcatagcaggggactgtaaccaaaaataaacatgtatttgtgtaattggtttgaagaagtcttgaatagctctttactgtcttacttggggttgataagatttgagtgtttgcaattttttactaaatgtagctccaaagtcttaaatggcttgtttgttcttaaactgttaattgatgaaactgtgcataagtttacaatgtactaacttattttgcttattatatatagtgttttattggaaattgtaaccacacacttcagcatgatgaaaataaagattagtgtttccatttaaataaatgttttatcctcccataaaa

SEQ ID NO: 188409 - DNA, 2765 bp, Homo sapiens
  Payload ID: 17070
  Gene Symbol: SYBU
  Gene Name: syntabulin (syntaxin-interacting)
  Uniprot ID: Q9NX95
  ENST ID: ENST00000532779
  CDS Start-End: 248-2035
ttttgtcctcagccccagcagccgcccggctggctgcagaggccgaggggccgagggcaccggagcgcaagggattccgcggcaccacgtgtccaagccgggctaaggcgggcggagcgggccgggcccggctccccgggcctgagcgcaaaccagcagcgacgcggggtcccgtccgcaccggcacccggcccagccggggcccggtctcccgggcgcacgtaggtgcctcctcctggacagcgcgatggggcccttctgggcgagaaaggatgacacaggctgtcctagcagccagtcagtgtctcctgtgaagacaccctcagatgctggaaacagccccattggcttttgccctggaagtgatgaaggcttcaccagaaagaaatgcacgattggaatggttggtgaaggaagcattcagtcctctcgatataagaaggaatcaaagtcaggccttgtgaaaccaggtagtgaagctgattttagctcctcgagcagcacaggcagcatttccgctcctgaggtccatatgtcgactgcgggaagcaagcggtcttcttcttcacgcaatcgaggtcctcatgggcggagtaatggagcttcgtcacacaagcctggcagcagcccatcatccccgcgggaaaaggaccttctgtccatgctgtgcaggaatcagctgagccctgtcaatatccatcccagttatgcaccttcttccccaagcagtagcaactcaggctcctacaaaggaagcgactgtagccccatcatgaggcgttctggaaggtacatgtcttgcggtgaaaatcatggtgtcagacccccaaacccagagcagtatttgactccactgcagcagaaagaggtgacagtgagacacctcaaaaccaagctgaaggaatctgagcgccgactccatgaaagggaaagtgaaatcgtggagcttaagtcccagctggcccgcatgcgagaggactggattgaggaggagtgtcaccgggtagaggcccagttggcactcaaagaagccaggaaagagattaaacagctcaaacaggtcatcgaaaccatgcggagcagcttggctgataaagataaaggcattcagaaatattttgtggacataaacatccaaaacaagaagctggagtctctccttcagagcatggagatggcacacagtggctctctgagggacgaactgtgcctagactttccatgtgattccccagagaagagcttaaccctcaacccccctcttgacacaatggcagatgggttatctctggaagagcaggtcacgggggaaggggctgacagggagctactggtaggagatagcatagccaacagcacagatttgttcgatgagatagtgacagccaccaccacagaatctggtgacctggagcttgtgcattccacccctggggctaacgtcctggagctgctgcccatagtcatgggtcaggaggagggcagtgtggtggtggagcgagccgttcagaccgacgtggtgccctacagcccagccatctcagagctcattcagagtgtgctgcagaagctccaggacccctgtccctcgagcttggcgtcccctgatgagtctgaaccagactcgatggagagcttcccagagtccctctctgccttagtggttgatttaactccaagaaatccaaactcagccatccttttgtctcccgtggagaccccctacgccaatgtggatgcagaagttcatgcaaaccgcctcatgagagagctggattttgcagcctgcgtggaagagaggttggatggtgtcatcccactggctcgcgggggcgtcgtgaggcagtactggagcagcagcttcctggtggatctcctggctgtggctgcccccgtggtccccacggttctgtgggcattcagtactcagagagggggaacggatcctgtgtataacatcggggccttgctcaggggctgttgcgtggttgccctgcattcgctccgccgcaccgccttccgtatcaaaacctaaatagaagttgttgttaccgtgtgccaatgtgtcccatgtgggttgtgccaggtagagaaacaggaagtcaatcatctgtgacagtctctattctgtcgttttgctccttggtatttgatttgcactatatttagttgaagcctgttcactgtttaaaaccggaggtatcttcaaaggcatggagacctggttccagtaaatgtcccaccagtggggtatagaaagcatgctcatgaccctgccgtgtcgtctgaggtacccgttcttatcctagtggttcaggaagagaaaacgcagtttgcactttcaagacagcttctctaaggctggcatgttatctccttgctttgctttttgccgttttaaaatgtgtaattgttccagcattccaatggtcttgtgcatagcaggggactgtaaccaaaaataaacatgtatttgtgtaattggtttgaagaagtcttgaatagctctttactgtcttacttggggttgataagatttgagtgtttgcaattttttactaaatgtagctccaaagtcttaaatggcttgtttgttcttaaactgttaattgatgaaactgtgcataagtttacaatgtactaacttattttgcttattatatatagtgttttattggaaattgtaaccacacacttcagcatgatgaaaataaagattagtgtttccatttaaataaatgttttatcctcccataaaataataa

SEQ ID NO: 188410 - DNA, 565 bp, Homo sapiens
  Payload ID: 17070
  Gene Symbol: SYBU
  Gene Name: syntabulin (syntaxin-interacting)
  ENST ID: ENST00000528716
  CDS Start-End: 281-565
tatttaaacaagtcaccagtccttgactccagaactgaagctttatatgttctttctatttggctgagccagtaatttttgattgcttcttcttcccaagaggcatcaacaaatattgactggatcatctggacctgacttagctgccctttggaaagttctgttcaatcagctggatagagctgtttgttttcctcacctaaccctcacagctatcctagaggtgcctcctcctggacggcggcagcggcggcgcgaggagccggcgggcagcggcgcgatggggcccctccgcgagagcaagaaggagcacagagtgcagcatcatgacaaggagatttctcgaagccgaattccccggttgattcttcggccccatatgccccaacaacagcacaaagtgtccccagcctctgagtctcctttctctgaggaagagagcagagagttcaaccccagcagctctgggcgctcagcgaggaccgttagcagcaacagcttctgctcagatgacacaggctgtcctagcagccagtcagtgtctcctgtgaagacaccctcagat

SEQ ID NO: 188411 - DNA, 564 bp, Homo sapiens
  Payload ID: 17070
  Gene Symbol: SYBU
  Gene Name: syntabulin (syntaxin-interacting)
  ENST ID: ENST00000528045
  CDS Start-End: 188-564
ttaggagatggtgctttgtcagccctgattgagcccaagaaaaccccctgcatacacagatgacacaggctgtcctagcagccagtcagtgtctcctgtgaagacaccctcagatgctggaaacagccccattggcttttgccctggaagtgatgaaggcttcaccagaaagaaatgcacgattggaatggttggtgaaggaagcattcagtcctctcgatataagaaggaatcaaagtcaggccttgtgaaaccaggtagtgaagctgattttagctcctcgagcagcacaggcagcatttccgctcctgaggtccatatgtcgactgcgggaagcaagcggtcttcttcttcacgcaatcgaggtcctcatgggcggagtaatggagcttcgtcacacaagcctggcagcagcccatcatccccgcgggaaaaggaccttctgtccatgctgtgcaggaatcagctgagccctgtcaatatccatcccagttatgcaccttcttccccaagcagtagcaactcaggctcctacaaaggaagcgactgtagccccatcatgag

SEQ ID NO: 188412 - DNA, 562 bp, Homo sapiens
  Payload ID: 17070
  Gene Symbol: SYBU
  Gene Name: syntabulin (syntaxin-interacting)
  ENST ID: ENST00000532594
  CDS Start-End: 54-197
atttctgcaaaagacataccccagcctgtgctgggaggctgtttgcagaggcaatgtttgccatgaaagtctatggagcttaccttctaagtagtgaagctgattttagctcctcgagcagcacaggcagcatttccgctcctgaggtccatatgtcgactgcgggaagcaagcggtcttcttcttcacgcaagtaggcaccatctcctgctctgtaattaagacgctttacacagtcgaggtcctcatgggcggagtaatggagcttcgtcacacaagcctggcagcagcccatcatccccgcgggaaaaggaccttctgtccatgctgtgcaggaatcagctgagccctgtcaatatccatcccagttatgcaccttcttccccaagcagtagcaactcaggctcctacaaaggaagcgactgtagccccatcatgaggcgttctggaaggtacatgtcttgcggtgaaaatcatggtgtcagacccccaaacccagagcagtatttgactccactgcagcagaaagaggtgacagtgagacacctcaaaaccaagctga

SEQ ID NO: 188413 - DNA, 573 bp, Homo sapiens
  Payload ID: 17070
  Gene Symbol: SYBU
  Gene Name: syntabulin (syntaxin-interacting)
  ENST ID: ENST00000532189
  CDS Start-End: 334-573
attctacttagaacaaagggaggtgcccggaagcagtacacattagtgcagagttttctggtttccctttaaagagaaggcacagccatttgactcttgagcttatttaaacaagtcaccagtccttgactccagaactgaagctttatatgttctttctatttggctgagccagtaatttttgattgcttcttcttcccaagagatgacacaggctgtcctagcagccagtcagtgtctcctgtgaagacaccctcagatgctggaaacagccccattggcttttgccctggaagtgatgaaggcttcaccagaaagaaatgcacgattggaatggttggtgaaggaagcattcagtcctctcgatataagaaggaatcaaagtcaggccttgtgaaaccaggtagtgaagctgattttagctcctcgagcagcacaggcagcatttccgctcctgaggtccatatgtcgactgcgggaagcaagcggtcttcttcttcacgcaatcgaggtcctcatgggcggagtaatggagcttcgtcacacaagcctggcagcagcccatcatccccg

SEQ ID NO: 188414 - DNA, 5533 bp, Homo sapiens
  Payload ID: 17071
  Gene Symbol: SNPH
  Gene Name: syntaphilin
  Uniprot ID: O15079
  ENST ID: ENST00000381867
  CDS Start-End: 643-2259
ggcggcccctgcagggcagctgaagccatggaagcctccgcaggtcgctgatcagggccaggcggctgcagcagcgactgcagaggcgctgcgccaagccgggccggagtggtgcgagccggcggggctgcggagggccagtggactcagggttgttgagaggagtcaatggcataatacgggaagccccgaaccacgggccaactgggaagttgatggtcggcgagaccagcccatcctaatttggggttcctggtcctgctccaggagtcctacagcctgcagcccctaccagagagggaggactgaacagcaagggggtgtgtgggtctgagtatcagggtcctggggaagaagcaggcctggctcgtagagtagaagactcggtgccggcagtcaggaggccctgctcctgaagcctctgtgaccttgggcacggccttcactctgtctggggcacattcactcatctggagaacacagggttggactgattacttttagccactcctgacagttgtggttttaagttgggtggtgggaacctgtgcaccagccctattcaattcactggtggaggcagccgtggtctgccaggccctcgctcctggggtgtcctgccgaagggtgagaagagaagccatgccgggcagcggccccagcgagaggatgacgtggcctggcccggccctttctgcgggccccccaacccgccctctctcctcagcccccgggataccgcccatcccaccccttactcggacccacagcctcatggccatgtccctgccaggaagtagacggacctctgctggatcacgcaggcgcacctctccacctgtgagcgtgcgggatgcctacggcacctcttcgctcagcagcagcagcaattctggctcctacaagggcagtgacagcagtcccacgccaaggcgctccatgaaatacacgctgtgcagtgacaaccatggcatcaagcccccgaccccggagcagtacctgacccccctgcagcagaaggaggtgtgcatccggcacctgaaagcccggctgaaggacacacaggaccggctccaggaccgggacacagagattgatgacctgaagacgcagctgtcacgcatgcaggaggactggattgaggaggagtgccaccgcgtggaggcccagctggccctgaaggaggcccgaaaggagatcaagcagctcaagcaggtcatcgacactgtcaagaacaacctgattgacaaggacaaggggctgcagaagtacttcgtggacatcaacatccagaacaagaagctggagacgctgctgcacagcatggaggtggcccagaatggcatggccaaggaggatggcactggggagtcagccggtgggtcccctgcccgctccctcacccgcagctccacctacaccaagctgagtgacccggctgtctgtggtgaccgccagccgggtgatccctccagcggctctgctgaggatggggcagacagtggctttgcagcagccgatgacacactgagccggacggacgcgctggaagccagcagcctgctgtcgtcgggggtggactgtggcaccgaggagacctcgctgcacagctccttcggcctgggcccccgcttccctgccagcaacacctatgagaagctgctgtgtggcatggaggctggtgtgcaggccagctgcatgcaggagcgtgccatccagacagacttcgtgcagtaccagcctgaccttgacaccatcctggagaaagtgacccaggcccaggtctgtgggacagaccctgagtcaggggacaggtgcccagagctggatgcccacccttcagggcccagagaccccaactcagcagtggtggtgacagtgggtgatgagctagaggccccagagcccatcacccgtggacccaccccacagcggcctggtgccaaccccaaccctggccagtcggtgagcgtggtgtgccccatggaagaggaggaggaggctgccgtggctgagaaggagcccaagagctactggagccgccactacatcgtggatctgctggctgtggtggtgccggccgtgcccacggtggcctggctttgccgctcccagcggcgccagggccagcccatctacaacatcagctccctgctgcggggctgctgcactgtggccttgcactccatccgcaggatcagctgccgctcgctgagccagccgagtcccagcccagcgggcggcggctcccagctctgagggggcccattctggcagcggcgcctgcggcctgaccactgattgtagggatgccgttcccccctcccttctcccatgggcatcatcttatttatttagttttgggtgtggaactgtttctttttttcaagatgttaaaacagtcccgtggaaggagcaggggttggagaaaggcatcccaaagcttcgatggagagcagggaagggggacccaaggcaggaggtacaccagctggacaaattgcagggaggggagggagcgagggccaacccggcccctctgtccccttggctcttcagacagggccagccctgctcaggaagtctctggctgtcttcatgtggggaagccgggcttgagttgcccataggcccctgccctgcaccatcctgtccagtgccctgcgcactccatgccgtctcttccaagccaccttgcccgcagcccaggctcctgggccagtgctctctcctcaaatggaggcagccatggcctgaagtgcagatcactgacccagggctcagagcagaggccagaaccactgggccggccggcattccagcctccccagactgctgcccaccttgggactcaggagctcagtcaaggccacaggctggaggagagacggggctgggcgcaaggtggcggagggcagtgtgggttctgtgtctgtctgttcatcccaggctttcccgtcatccctttcctcttggcacttctgggtgtgtcagtcattattcctgtgaggtagctaagcccggcaagctcagtgctggggtaggagggcctgcctgagtcccagctcccagctggagaatccaccagcacaagaagaggaggcaggggcagaaacccaagggggctcccccagccttccaaggtgaggccatctcatctgcaggctgggaggcagggctggactcaggaacccacagcttactgaaaaagccagaggccatgactgcccccagaaacttgccccgagtttctctggggccctcgggcccaacttctgctttgcactatgttcactttggggttggttctcagccatccaagggtctccagtgaggtggctgcttgctgtctgagatgagggttcctaaaccttaaacctctctgcctctggaggagggtggggtattctggcaggatgaatcgcaggatggcgcgtactgaagccacgatgttcatccaggccaaagcagggtgtcctgggataggtttcctaggcaggggcgtggcagagcaggtaggcgccctgcagcctccctgctcccagcccaaggccagtcggcctgggaagttcactgccccaactcttttcccgggaccatactgagtcccccagccacgctgctgacattaccattattattttaccaagtaaactcactccttttcccccacaggggttacacccatctggttgtcccacccactcttcagaggctaggccccacctctgggggttggagggaccctgtgtcttactcgcccctctggcctaagggccactctggttatctgccaaggttgcttgccctcaccccaatgctccaacagccattgcctaactcatgggctctgcccttctgctcggtgccctccacgtgaggcggggcacctgcatgcactgggagggggcggctggcccagccctcggggcaggagccccctctgccacacgctttgtgcctccaaagctccccccgccttggtcagggcctcagaccagccaacctttgtggaataagccccagcccagccaaaccaaacccagatgcctgaggcctggctggggctgcccccgcaggacactgtggccatgccacggagggggcagtggacaaaaccaatccaaagccaagccgggactggctgcggacccagcctcctgtgccgcgcactcacggagctgcgtagtctcctcagacatagtcaaagctttgccgagaaaagaaatgtatgaactatatttgacaacataaaatctctctatttttcaccactggaatttagtcaagcttcaggcccctctgctcctgtctgtgtcttgcgtctgtggccttcctattgtgtcttgtgttttggtggatgtgacagggctggggccacagtctactctgtctctgctgctagagaagccacctgtggaggactgggctgtggttgggcctgaggcctgtggaggaggtgagtgtagccagcagcggccgtctactcctgttctggcctgagaccaccggtgtgggtcacgagggccctggcccacagtgttgagggtcctctctttcgggggctctcctggggccttcgatgggcttttcttcttgtcagtggagggagcagctccccactcagccctgggacaggccctgggactgtggtggccggtggccctggcccagctctggagtgcatgtgtgtgtgctcagatcccgcatctatgcaaaggtgcaggctgcctgtgaggctccaggcggtggaggtgcggcagctgctgctcaggtgccatgccctgaagaggcagggtacacatggggctgggagggcaaagatggggcggggcctccccctgagagagctcaccctccacagtgacccttttccttcctgcctaatacctcctcccgttgggctgtgacttttcctcctgccctcagcctctgaaacagaaatctttggggcctcccctttccccagcgtctggcaagagctgatgaggtcctgaggaacagtgtccccaggaaccaccttctggagcctagcggccagacgtggcttctcctgagttctagggctcgggccagagtggcactactgcccggccagtccaggctcaggcaggaatcggacgctggggcccgggctctgcacagagagctgggcttgagtggagtttattgtagatttctcccaaggggatcacttagcttctcactgacacacccttcccaattgccacaagcgcaggggtatcttacagcactttggggaggggtgggacaaactgcaaggttctggggccaaggcctacccaggggcctctgcccagagaactcacaaccccctctctgacctgggggacaatgcaaacaggtcacagtgcattcccatattaggccatccccttcacgaagaattcaggggatgtgggaagtggggaggcggggagggatcttgactcttgtctcctttgtccttttgttcagacagagttgtacctgcagcagacaactctgaattaaagcatgaaaacacagcaag

SEQ ID NO: 188415 - DNA, 4995 bp, Homo sapiens
  Payload ID: 17071
  Gene Symbol: SNPH
  Gene Name: syntaphilin
  Uniprot ID: O15079
  ENST ID: ENST00000381873
  CDS Start-End: 237-1721
cagctagccgcctcctgcaggggctcgggagagcaattcggcggcccctgcagggcagctgaagccatggaagcctccgcaggtcgctgatcagggccaggcggctgcagcagcgactgcagaggcgctgcgccaagccgggccggagtggtgcgagccggcggggctgcggagggccagtggactcagcccccgggataccgcccatcccaccccttactcggacccacagcctcatggccatgtccctgccaggaagtagacggacctctgctggatcacgcaggcgcacctctccacctgtgagcgtgcgggatgcctacggcacctcttcgctcagcagcagcagcaattctggctcctacaagggcagtgacagcagtcccacgccaaggcgctccatgaaatacacgctgtgcagtgacaaccatggcatcaagcccccgaccccggagcagtacctgacccccctgcagcagaaggaggtgtgcatccggcacctgaaagcccggctgaaggacacacaggaccggctccaggaccgggacacagagattgatgacctgaagacgcagctgtcacgcatgcaggaggactggattgaggaggagtgccaccgcgtggaggcccagctggccctgaaggaggcccgaaaggagatcaagcagctcaagcaggtcatcgacactgtcaagaacaacctgattgacaaggacaaggggctgcagaagtacttcgtggacatcaacatccagaacaagaagctggagacgctgctgcacagcatggaggtggcccagaatggcatggccaaggaggatggcactggggagtcagccggtgggtcccctgcccgctccctcacccgcagctccacctacaccaagctgagtgacccggctgtctgtggtgaccgccagccgggtgatccctccagcggctctgctgaggatggggcagacagtggctttgcagcagccgatgacacactgagccggacggacgcgctggaagccagcagcctgctgtcgtcgggggtggactgtggcaccgaggagacctcgctgcacagctccttcggcctgggcccccgcttccctgccagcaacacctatgagaagctgctgtgtggcatggaggctggtgtgcaggccagctgcatgcaggagcgtgccatccagacagacttcgtgcagtaccagcctgaccttgacaccatcctggagaaagtgacccaggcccaggtctgtgggacagaccctgagtcaggggacaggtgcccagagctggatgcccacccttcagggcccagagaccccaactcagcagtggtggtgacagtgggtgatgagctagaggccccagagcccatcacccgtggacccaccccacagcggcctggtgccaaccccaaccctggccagtcggtgagcgtggtgtgccccatggaagaggaggaggaggctgccgtggctgagaaggagcccaagagctactggagccgccactacatcgtggatctgctggctgtggtggtgccggccgtgcccacggtggcctggctttgccgctcccagcggcgccagggccagcccatctacaacatcagctccctgctgcggggctgctgcactgtggccttgcactccatccgcaggatcagctgccgctcgctgagccagccgagtcccagcccagcgggcggcggctcccagctctgagggggcccattctggcagcggcgcctgcggcctgaccactgattgtagggatgccgttcccccctcccttctcccatgggcatcatcttatttatttagttttgggtgtggaactgtttctttttttcaagatgttaaaacagtcccgtggaaggagcaggggttggagaaaggcatcccaaagcttcgatggagagcagggaagggggacccaaggcaggaggtacaccagctggacaaattgcagggaggggagggagcgagggccaacccggcccctctgtccccttggctcttcagacagggccagccctgctcaggaagtctctggctgtcttcatgtggggaagccgggcttgagttgcccataggcccctgccctgcaccatcctgtccagtgccctgcgcactccatgccgtctcttccaagccaccttgcccgcagcccaggctcctgggccagtgctctctcctcaaatggaggcagccatggcctgaagtgcagatcactgacccagggctcagagcagaggccagaaccactgggccggccggcattccagcctccccagactgctgcccaccttgggactcaggagctcagtcaaggccacaggctggaggagagacggggctgggcgcaaggtggcggagggcagtgtgggttctgtgtctgtctgttcatcccaggctttcccgtcatccctttcctcttggcacttctgggtgtgtcagtcattattcctgtgaggtagctaagcccggcaagctcagtgctggggtaggagggcctgcctgagtcccagctcccagctggagaatccaccagcacaagaagaggaggcaggggcagaaacccaagggggctcccccagccttccaaggtgaggccatctcatctgcaggctgggaggcagggctggactcaggaacccacagcttactgaaaaagccagaggccatgactgcccccagaaacttgccccgagtttctctggggccctcgggcccaacttctgctttgcactatgttcactttggggttggttctcagccatccaagggtctccagtgaggtggctgcttgctgtctgagatgagggttcctaaaccttaaacctctctgcctctggaggagggtggggtattctggcaggatgaatcgcaggatggcgcgtactgaagccacgatgttcatccaggccaaagcagggtgtcctgggataggtttcctaggcaggggcgtggcagagcaggtaggcgccctgcagcctccctgctcccagcccaaggccagtcggcctgggaagttcactgccccaactcttttcccgggaccatactgagtcccccagccacgctgctgacattaccattattattttaccaagtaaactcactccttttcccccacaggggttacacccatctggttgtcccacccactcttcagaggctaggccccacctctgggggttggagggaccctgtgtcttactcgcccctctggcctaagggccactctggttatctgccaaggttgcttgccctcaccccaatgctccaacagccattgcctaactcatgggctctgcccttctgctcggtgccctccacgtgaggcggggcacctgcatgcactgggagggggcggctggcccagccctcggggcaggagccccctctgccacacgctttgtgcctccaaagctccccccgccttggtcagggcctcagaccagccaacctttgtggaataagccccagcccagccaaaccaaacccagatgcctgaggcctggctggggctgcccccgcaggacactgtggccatgccacggagggggcagtggacaaaaccaatccaaagccaagccgggactggctgcggacccagcctcctgtgccgcgcactcacggagctgcgtagtctcctcagacatagtcaaagctttgccgagaaaagaaatgtatgaactatatttgacaacataaaatctctctatttttcaccactggaatttagtcaagcttcaggcccctctgctcctgtctgtgtcttgcgtctgtggccttcctattgtgtcttgtgttttggtggatgtgacagggctggggccacagtctactctgtctctgctgctagagaagccacctgtggaggactgggctgtggttgggcctgaggcctgtggaggaggtgagtgtagccagcagcggccgtctactcctgttctggcctgagaccaccggtgtgggtcacgagggccctggcccacagtgttgagggtcctctctttcgggggctctcctggggccttcgatgggcttttcttcttgtcagtggagggagcagctccccactcagccctgggacaggccctgggactgtggtggccggtggccctggcccagctctggagtgcatgtgtgtgtgctcagatcccgcatctatgcaaaggtgcaggctgcctgtgaggctccaggcggtggaggtgcggcagctgctgctcaggtgccatgccctgaagaggcagggtacacatggggctgggagggcaaagatggggcggggcctccccctgagagagctcaccctccacagtgacccttttccttcctgcctaatacctcctcccgttgggctgtgacttttcctcctgccctcagcctctgaaacagaaatctttggggcctcccctttccccagcgtctggcaagagctgatgaggtcctgaggaacagtgtccccaggaaccaccttctggagcctagcggccagacgtggcttctcctgagttctagggctcgggccagagtggcactactgcccggccagtccaggctcaggcaggaatcggacgctggggcccgggctctgcacagagagctgggcttgagtggagtttattgtagatttctcccaaggggatcacttagcttctcactgacacacccttcccaattgccacaagcgcaggggtatcttacagcactttggggaggggtgggacaaactgcaaggttctggggccaaggcctacccaggggcctctgcccagagaactcacaaccccctctctgacctgggggacaatgcaaacaggtcacagtgcattcccatattaggccatccccttcacgaagaattcaggggatgtgggaagtggggaggcggggagggatcttgactcttgtctcctttgtccttttgttcagacagagttgtacctgcagcagacaactctgaattaaagcatgaaaacacagcaag

SEQ ID NO: 188416 - DNA, 5354 bp, Homo sapiens
  Payload ID: 17071
  Gene Symbol: SNPH
  Gene Name: syntaphilin
  Uniprot ID: O15079
  ENST ID: ENST00000614659
  CDS Start-End: 467-2083
agacgggaagccccgaaccacgggccaactgggaagttgatggtcggcgagaccagcccatcctaatttggggttcctggtcctgctccaggagtcctacagcctgcagcccctaccagagagggaggactgaacagcaagggggtgtgtgggtctgagtatcagggtcctggggaagaagcaggcctggctcgtagagtagaagactcggtgccggcagtcaggaggccctgctcctgaagcctctgtgaccttgggcacggccttcactctgtctggggcacattcactcatctggagaacacagggttggactgattacttttagccactcctgacagttgtggttttaagttgggtggtgggaacctgtgcaccagccctattcaattcactggtggaggcagccgtggtctgccaggccctcgctcctggggtgtcctgccgaagggtgagaagagaagccatgccgggcagcggccccagcgagaggatgacgtggcctggcccggccctttctgcgggccccccaacccgccctctctcctcagcccccgggataccgcccatcccaccccttactcggacccacagcctcatggccatgtccctgccaggaagtagacggacctctgctggatcacgcaggcgcacctctccacctgtgagcgtgcgggatgcctacggcacctcttcgctcagcagcagcagcaattctggctcctacaagggcagtgacagcagtcccacgccaaggcgctccatgaaatacacgctgtgcagtgacaaccatggcatcaagcccccgaccccggagcagtacctgacccccctgcagcagaaggaggtgtgcatccggcacctgaaagcccggctgaaggacacacaggaccggctccaggaccgggacacagagattgatgacctgaagacgcagctgtcacgcatgcaggaggactggattgaggaggagtgccaccgcgtggaggcccagctggccctgaaggaggcccgaaaggagatcaagcagctcaagcaggtcatcgacactgtcaagaacaacctgattgacaaggacaaggggctgcagaagtacttcgtggacatcaacatccagaacaagaagctggagacgctgctgcacagcatggaggtggcccagaatggcatggccaaggaggatggcactggggagtcagccggtgggtcccctgcccgctccctcacccgcagctccacctacaccaagctgagtgacccggctgtctgtggtgaccgccagccgggtgatccctccagcggctctgctgaggatggggcagacagtggctttgcagcagccgatgacacactgagccggacggacgcgctggaagccagcagcctgctgtcgtcgggggtggactgtggcaccgaggagacctcgctgcacagctccttcggcctgggcccccgcttccctgccagcaacacctatgagaagctgctgtgtggcatggaggctggtgtgcaggccagctgcatgcaggagcgtgccatccagacagacttcgtgcagtaccagcctgaccttgacaccatcctggagaaagtgacccaggcccaggtctgtgggacagaccctgagtcaggggacaggtgcccagagctggatgcccacccttcagggcccagagaccccaactcagcagtggtggtgacagtgggtgatgagctagaggccccagagcccatcacccgtggacccaccccacagcggcctggtgccaaccccaaccctggccagtcggtgagcgtggtgtgccccatggaagaggaggaggaggctgccgtggctgagaaggagcccaagagctactggagccgccactacatcgtggatctgctggctgtggtggtgccggccgtgcccacggtggcctggctttgccgctcccagcggcgccagggccagcccatctacaacatcagctccctgctgcggggctgctgcactgtggccttgcactccatccgcaggatcagctgccgctcgctgagccagccgagtcccagcccagcgggcggcggctcccagctctgagggggcccattctggcagcggcgcctgcggcctgaccactgattgtagggatgccgttcccccctcccttctcccatgggcatcatcttatttatttagttttgggtgtggaactgtttctttttttcaagatgttaaaacagtcccgtggaaggagcaggggttggagaaaggcatcccaaagcttcgatggagagcagggaagggggacccaaggcaggaggtacaccagctggacaaattgcagggaggggagggagcgagggccaacccggcccctctgtccccttggctcttcagacagggccagccctgctcaggaagtctctggctgtcttcatgtggggaagccgggcttgagttgcccataggcccctgccctgcaccatcctgtccagtgccctgcgcactccatgccgtctcttccaagccaccttgcccgcagcccaggctcctgggccagtgctctctcctcaaatggaggcagccatggcctgaagtgcagatcactgacccagggctcagagcagaggccagaaccactgggccggccggcattccagcctccccagactgctgcccaccttgggactcaggagctcagtcaaggccacaggctggaggagagacggggctgggcgcaaggtggcggagggcagtgtgggttctgtgtctgtctgttcatcccaggctttcccgtcatccctttcctcttggcacttctgggtgtgtcagtcattattcctgtgaggtagctaagcccggcaagctcagtgctggggtaggagggcctgcctgagtcccagctcccagctggagaatccaccagcacaagaagaggaggcaggggcagaaacccaagggggctcccccagccttccaaggtgaggccatctcatctgcaggctgggaggcagggctggactcaggaacccacagcttactgaaaaagccagaggccatgactgcccccagaaacttgccccgagtttctctggggccctcgggcccaacttctgctttgcactatgttcactttggggttggttctcagccatccaagggtctccagtgaggtggctgcttgctgtctgagatgagggttcctaaaccttaaacctctctgcctctggaggagggtggggtattctggcaggatgaatcgcaggatggcgcgtactgaagccacgatgttcatccaggccaaagcagggtgtcctgggataggtttcctaggcaggggcgtggcagagcaggtaggcgccctgcagcctccctgctcccagcccaaggccagtcggcctgggaagttcactgccccaactcttttcccgggaccatactgagtcccccagccacgctgctgacattaccattattattttaccaagtaaactcactccttttcccccacaggggttacacccatctggttgtcccacccactcttcagaggctaggccccacctctgggggttggagggaccctgtgtcttactcgcccctctggcctaagggccactctggttatctgccaaggttgcttgccctcaccccaatgctccaacagccattgcctaactcatgggctctgcccttctgctcggtgccctccacgtgaggcggggcacctgcatgcactgggagggggcggctggcccagccctcggggcaggagccccctctgccacacgctttgtgcctccaaagctccccccgccttggtcagggcctcagaccagccaacctttgtggaataagccccagcccagccaaaccaaacccagatgcctgaggcctggctggggctgcccccgcaggacactgtggccatgccacggagggggcagtggacaaaaccaatccaaagccaagccgggactggctgcggacccagcctcctgtgccgcgcactcacggagctgcgtagtctcctcagacatagtcaaagctttgccgagaaaagaaatgtatgaactatatttgacaacataaaatctctctatttttcaccactggaatttagtcaagcttcaggcccctctgctcctgtctgtgtcttgcgtctgtggccttcctattgtgtcttgtgttttggtggatgtgacagggctggggccacagtctactctgtctctgctgctagagaagccacctgtggaggactgggctgtggttgggcctgaggcctgtggaggaggtgagtgtagccagcagcggccgtctactcctgttctggcctgagaccaccggtgtgggtcacgagggccctggcccacagtgttgagggtcctctctttcgggggctctcctggggccttcgatgggcttttcttcttgtcagtggagggagcagctccccactcagccctgggacaggccctgggactgtggtggccggtggccctggcccagctctggagtgcatgtgtgtgtgctcagatcccgcatctatgcaaaggtgcaggctgcctgtgaggctccaggcggtggaggtgcggcagctgctgctcaggtgccatgccctgaagaggcagggtacacatggggctgggagggcaaagatggggcggggcctccccctgagagagctcaccctccacagtgacccttttccttcctgcctaatacctcctcccgttgggctgtgacttttcctcctgccctcagcctctgaaacagaaatctttggggcctcccctttccccagcgtctggcaagagctgatgaggtcctgaggaacagtgtccccaggaaccaccttctggagcctagcggccagacgtggcttctcctgagttctagggctcgggccagagtggcactactgcccggccagtccaggctcaggcaggaatcggacgctggggcccgggctctgcacagagagctgggcttgagtggagtttattgtagatttctcccaaggggatcacttagcttctcactgacacacccttcccaattgccacaagcgcaggggtatcttacagcactttggggaggggtgggacaaactgcaaggttctggggccaaggcctacccaggggcctctgcccagagaactcacaaccccctctctgacctgggggacaatgcaaacaggtcacagtgcattcccatattaggccatccccttcacgaagaattcaggggatgtgggaagtggggaggcggggagggatcttgactcttgtctcctttgtccttttgttcagacagagttgtacctgcagcagacaactctgaattaaagcatgaaaacacagc

SEQ ID NO: 188417 - DNA, 1099 bp, Homo sapiens
  Payload ID: 17072
  Gene Symbol: STX10
  Gene Name: syntaxin 10
  ENST ID: ENST00000242770
  CDS Start-End: 6-668
ctgacatgtctctcgaagaccccttttttgtagtccgaggcgaggtgcagaaggcggtgaacacggcccgcgggctgtaccagcgctggtgcgagctcctgcaggaaagcgcggcggtcggacgcgaggagctggactggacgaccaatgagctgcggaatggcctgcgcagcatcgagtgggacctcgaggacctggaagagaccatcggtatagtggaagccaacccaggcaagttcaagctcccagccggggacctgcaggagagaaaggtgttcgtggagcggatgcgagaggcagtccaggaaatgaaggaccatatggtcagcccaacagccgtagcatttttggagaggaataacagagagatactcgcaggcaagccagctgcccagaagtcacccagcgacctgctggatgccagcgcagtctcggccacatctcgctacatcgaggagcagcaggccacacagcagctgatcatggatgaacaggatcaacagctggagatggtgtctgggagcatccaggttctgaagcacatgtccggccgcgttggagaagagctggacgagcaggcatgctggatgccttcgcccaagagatggaccacacccagtcccgcatggacggggtcctcaggaagttggccaaagtatcccacatgacgagtgaccgccgacagtggtgtgccatcgccgtgctagtgggggtgcttctcctcgttctcatcttactattctctctctgaccccagccctccctggcaggctggtcccttaagcctggggagccaccaagcactttggagctggcctcgccccctaggaggagagggtccctcctgggtagctggagagtagagggtcccgcctggggagctgtccccatggctctcccctagagccagtgggacccttcaggaccctgggctggaaccaccaccactggtcctgtctcaagtgcacttagggggtggtggaggcagggacacctgagacacacctgtctccatttccagttccaggaccccaaagccatttgcccctgtgccttatacacgtgccaacctggaaataaaatgtcagccttttttata

SEQ ID NO: 188418 - DNA, 1128 bp, Homo sapiens
  Payload ID: 17072
  Gene Symbol: STX10
  Gene Name: syntaxin 10
  Uniprot ID: O60499
  ENST ID: ENST00000343587
  CDS Start-End: 174-776
cggaagtgtccgcacgtcgggcctccgaggcttctctttctcccctggcggtccggctctcgatggtggcgtgacgggggcgggggtggcggcgcgttctcctcggttgggagggaaccagcccgcgaacccaggccgggaggggggttcggcctgggggggaagggactgacatgtctctcgaagaccccttttttgtagtccgaggcgaggtgcagaaggcggtgaacacggcccgcgggctgtaccagcgctggtgcgagctcctgcaggaaagcgcggcggtcggacgcgaggagctggactggacgaccaatgagctgcggaatggcctgcgcagcatcgagtgggacctcgaggacctggaagagaccatcggtatagtggaagccaacccaggcaagccagctgcccagaagtcacccagcgacctgctggatgccagcgcagtctcggccacatctcgctacatcgaggagcagcaggccacacagcagctgatcatggatgaacaggatcaacagctggagatggtgtctgggagcatccaggttctgaagcacatgtccggccgcgttggagaagagctggacgagcagggcatcatgctggatgccttcgcccaagagatggaccacacccagtcccgcatggacggggtcctcaggaagttggccaaagtatcccacatgacgagtgaccgccgacagtggtgtgccatcgccgtgctagtgggggtgcttctcctcgttctcatcttactattctctctctgaccccagccctccctggcaggctggtcccttaagcctggggagccaccaagcactttggagctggcctcgccccctaggaggagagggtccctcctgggtagctggagagtagagggtcccgcctggggagctgtccccatggctctcccctagagccagtgggacccttcaggaccctgggctggaaccaccaccactggtcctgtctcaagtgcacttagggggtggtggaggcagggacacctgagacacacctgtctccatttccagttccaggaccccaaagccatttgcccctgtgccttatacacgtgccaacctggaaataaaatgtcagccttttttatacgta

SEQ ID NO: 188419 - DNA, 940 bp, Homo sapiens
  Payload ID: 17072
  Gene Symbol: STX10
  Gene Name: syntaxin 10
  ENST ID: ENST00000440593
  CDS Start-End: 169-390
gtgtccgcacgtcgggcctccgaggcttctctttctcccctggcggtccggctctcgatggtggcgtgacgggggcgggggtggcggcgcgttctcctcggttgggagggaaccagcccgcgaacccaggccgggaggggggttcggcctgggggggaagggactgacatgtctctcgaagaccccttttttgtagtccgaggcgaggtgcagaaggcggtgaacacggcccgcgggctgtaccagcgctggtgcgagctcctgcaggaaagcgcggcggtcggacgcgaggagctggactggacgaccaatgagctgcggaatggcctgcgcagcatcgagtgggacctcgaggacctggaagagaccatcgtctcagcccacgtatagtggaagccaacccaggcaagttcaagctcccagccggggacctgcaggagagaaaggtgttcgtggagcggatgcgagaggcagtccaggaaatgaaggaccatatggtcagcccaacagccgtagcatttttggagaggaataacagagagatactcgcaggcaagccagctgcccagaagtcacccagcgacctgctggatgccagcgcagtctcggccacatctcgctacatcgaggagcagcaggccacacagcagctgatcatggatgaacaggatcaacagctggagatggtgtctgggagcatccaggttctgaagcacatgtccggccgcgttggagaagagctggacgagcagggcatcatgctggatgccttcgcccaagagatggaccacacccagtcccgcatggacggggtcctcaggaagttggccaaagtatcccacatgacgagtggtgagtcccctcaggggaggggtcagtcctggtgggggcaggttgtaggtggtaccctctccccgtgacccctgaccttctcgttccc

SEQ ID NO: 188420 - DNA, 704 bp, Homo sapiens
  Payload ID: 17072
  Gene Symbol: STX10
  Gene Name: syntaxin 10
  ENST ID: ENST00000587318
  CDS Start-End: 1-685
ggcggtgaacacggcccgcgggctgtaccagcgctggtgcgagctcctgcaggaaagcgcggcggtcggacgcgaggagctggactggacgaccaatgagctgcggaatggcctgcgcagcatcgagtgggacctcgaggacctggaagagaccatcggtatagtggaagccaacccaggcaagttcaagctcccagccggggacctgcaggagagaaaggtgttcgtggagcggatgcgagaggcagtccaggaaatgaaggaccatatggtcagcccaacagccgtagcatttttggagaggaataacagagagatactcgcaggcaagccagctgcccagaagtcacccagcgacctgctggatgccagcgcagtctcggccacatctcgctacatcgaggagcagcaggccacacagcagctgatcatggatgaacaggatcaacagctggagatggtgtctgggagcatccaggttctgaagcacatgtccggccgcgttggagaagagctggacgagcagggcatcatgctggatgccttcgcccaagagatggaccacacccagtcccgcatggacggggtcctcaggaagttggccaaagtatcccacatgacgagtgttccaggaccccaaagccatttgcccctgtgccttatacacgtgccaacctggaaataaaatgtcagccttttttata

SEQ ID NO: 188421 - DNA, 907 bp, Homo sapiens
  Payload ID: 17072
  Gene Symbol: STX10
  Gene Name: syntaxin 10
  ENST ID: ENST00000591197
  CDS Start-End: 734-907
ctgcctctgcccacaaccaagatggctgaggagagggcggaagtgtccgcacgtcgggcctccgaggcttctctttctcccctggcggtccggctctcgatggtggcgtgacgggggcgggggtggcggcgcgttctcctcggttgggagggaaccagcccgcgaacccaggccgggaggggggttcggcctgggggggaagggactgacatgtctctcgaagaccccttttttgtagtccgagggtgagtgacaacgacgggggagggcggagggtgctctgtacccaagccagccagtgcccgggtgccggccccagcgtgcccggcgggctgggcaaggccgtcggggtgcagagtgggaggcgcacgcaggggtatataggggtctccggagtcccccatgcgtttgggtttgcagtcgggggcagaggcaggcgggaggaccgcctgcccccagccgcgcccgccgtgcccctgcccgcagcgaggtgcagaaggcggtgaacacggcccgcgggctgtaccagcgctggtgcgagctcctgcaggaaagcgcggcggtcggacgcgaggagctggactggacgaccaatgagctgcggaatggcctgcgcagcatcgagtgggacctcgaggacctggaagagaccatcggtatagtggaagccaacccaggcaagttcaagctcccagccggggacctgcaggagagaaaggtgttcgtggagcggatgcgagaggcagtccaggaaatgaaggaccatatggtcagcccaacagccgtagcatttttggagaggaataacagagagatactcgcaggcaagccagctgcccagaagtcacccagcgacctgctggatgccagcgcagtctcggccacatctcgctacatcgaggagcag

SEQ ID NO: 188422 - DNA, 1241 bp, Homo sapiens
  Payload ID: 17072
  Gene Symbol: STX10
  Gene Name: syntaxin 10
  ENST ID: ENST00000589083
  CDS Start-End: 54-794
gcccgcgaacccaggccgggaggggggttcggcctgggggggaagggactgacatgtctctcgaagaccccttttttgtagtccgaggcgaggtgcagaaggcggtgaacacggcccgcgggctgtaccagcgctggtgcgagctcctgcaggaaagcgcggcggtcggacgcgaggagctggactggacgaccaatgagctgcggaatggcctgcgcagcatcgagtgggacctcgaggacctggaagagaccatcggtatagtggaagccaacccaggcaagttcaagctcccagccggggacctgcaggagagaaaggtgttcgtggagcggatgcgagaggcagtccaggaaatgaaggaccatatggtcagcccaacagccgtagcatttttggagaggaataacagagagatactcgcaggcaagccagctgcccagaagtcacccagcgacctgctggatgccagcgcagtctcggccacatctcgctacatcgaggagcagcaggccacacagcagctgatcatggatgaacaggatcaacagctggagatggtgtctgggagcatccaggttctgaagcacatgtccggccgcgttggagaagagctggacgagcagggcatcatgctggatgccttcgcccaagagatggaccacacccagtcccgcatggacggggtcctcaggaagttggccaaagtatcccacatgacgagtggtgagtcccctcaggggaggggtcagtcctggtgggggcaggttgtaggtggtaccctctccccgtgacccctgaccttctcgttcccagaccgccgacagtggtgtgccatcgccgtgctagtgggggtgcttctcctcgttctcatcttactattctctctctgaccccagccctccctggcaggctggtcccttaagcctggggagccaccaagcactttggagctggcctcgccccctaggaggagagggtccctcctgggtagctggagagtagagggtcccgcctggggagctgtccccatggctctcccctagagccagtgggacccttcaggaccctgggctggaaccaccaccactggtcctgtctcaagtgcacttagggggtggtggaggcagggacacctgagacacacctgtctccatttccagttccaggaccccaaagccatttgcccctgtgccttatacacgtgccaacctggaaataaaatgtcagccttttttata

SEQ ID NO: 188423 - DNA, 1073 bp, Homo sapiens
  Payload ID: 17072
  Gene Symbol: STX10
  Gene Name: syntaxin 10
  ENST ID: ENST00000591843
  CDS Start-End: 115-456
tcgatggtggcgtgacgggggcgggggtggcggcgcgttctcctcggttgggagggaaccagcccgcgaacccaggccgggaggggggttcggcctgggggggaagggactgacatgtctctcgaagaccccttttttgtagtccgaggcgaggtgcagaaggcggtgaacacggcccgcgggctgtaccagcgctggtgcgagctcctgcaggaaagcgcggcggtcggacgcgaggagctggactggacgaccaatgagctgcggaatggcctgcgcagcatcgagtgggacctcgaggacctggaagagaccatcgatatcctggggctttatactcgcaggcaagccagctgcccagaagtcacccagcgacctgctggatgccagcgcagtctcggccacatctcgctacatcgaggagcagcaggccacacagcagctgatcatggatgaacaggatcaacagctggagatggtgtctgggagcatccaggttctgaagcacatgtccggccgcgttggagaagagctggacgagcagggcatcatgctggatgccttcgcccaagagatggaccacacccagtcccgcatggacggggtcctcaggaagttggccaaagtatcccacatgacgagtgaccgccgacagtggtgtgccatcgccgtgctagtgggggtgcttctcctcgttctcatcttactattctctctctgaccccagccctccctggcaggctggtcccttaagcctggggagccaccaagcactttggagctggcctcgccccctaggaggagagggtccctcctgggtagctggagagtagagggtcccgcctggggagctgtccccatggctctcccctagagccagtgggacccttcaggaccctgggctggaaccaccaccactggtcctgtctcaagtgcacttagggggtggtggaggcagggacacctgagacacacctgtctccatttccagttccaggaccccaaagccatttgcccctgtgccttatacacgtgccaacctggaaataaaatgtcagccttttttatacgta

SEQ ID NO: 188424 - DNA, 713 bp, Homo sapiens
  Payload ID: 17072
  Gene Symbol: STX10
  Gene Name: syntaxin 10
  ENST ID: ENST00000593126
  CDS Start-End: 1-606
ctgcaggaaagcgcggcggtcggacgcgaggagctggactggacgaccaatgagctgcggaatggcctgcgcagcatcgagtgggacctcgaggacctggaagagaccatcggtatagtggaagccaacccaggcaagttcaagctcccagccggggacctgcaggagagaaaggtgttcgtggagcggatgcgagaggcagtccaggaaatgaaggaccatatggtcagcccaacagccgtagcatttttggagaggaataacagagagatactcgcaggcaagccagctgcccagaagtcacccagcgacctgctggatgccagcgcagtctcggccacatctcgctacatcgaggagcagcaggccacacagcagctgatcatggatgaacaggatcaacagctggagatggtgtctgggagcatccaggttctgaagcacatgtccggccgcgttggagaagagctggacgagcagggcatcatgctggatgccttcgcccaagagatggaccacacccagtcccgcatggacggggtcctcaggaagttggccaaagtatcccacatgacgagtgccctccctggcaggctggtcccttaagcctggggagccaccaagcactttggagctggcctcgccccctaggaggagagggtccctcctgggtagctggagagtagagggtcccgcctggggagctgtcccca

SEQ ID NO: 188425 - DNA, 1136 bp, Homo sapiens
  Payload ID: 17072
  Gene Symbol: STX10
  Gene Name: syntaxin 10
  Uniprot ID: O60499
  ENST ID: ENST00000587230
  CDS Start-End: 66-815
gggagggaaccagcccgcgaacccaggccgggaggggggttcggcctgggggggaagggactgacatgtctctcgaagaccccttttttgtagtccgaggcgaggtgcagaaggcggtgaacacggcccgcgggctgtaccagcgctggtgcgagctcctgcaggaaagcgcggcggtcggacgcgaggagctggactggacgaccaatgagctgcggaatggcctgcgcagcatcgagtgggacctcgaggacctggaagagaccatcggtatagtggaagccaacccaggcaagttcaagctcccagccggggacctgcaggagagaaaggtgttcgtggagcggatgcgagaggcagtccaggaaatgaaggaccatatggtcagcccaacagccgtagcatttttggagaggaataacagagagatactcgcaggcaagccagctgcccagaagtcacccagcgacctgctggatgccagcgcagtctcggccacatctcgctacatcgaggagcagcaggccacacagcagctgatcatggatgaacaggatcaacagctggagatggtgtctgggagcatccaggttctgaagcacatgtccggccgcgttggagaagagctggacgagcagggcatcatgctggatgccttcgcccaagagatggaccacacccagtcccgcatggacggggtcctcaggaagttggccaaagtatcccacatgacgagtgaccgccgacagtggtgtgccatcgccgtgctagtgggggtgcttctcctcgttctcatcttactattctctctctgaccccagccctccctggcaggctggtcccttaagcctggggagccaccaagcactttggagctggcctcgccccctaggaggagagggtccctcctgggtagctggagagtagagggtcccgcctggggagctgtccccatggctctcccctagagccagtgggacccttcaggaccctgggctggaaccaccaccactggtcctgtctcaagtgcacttagggggtggtggaggcagggacacctgagacacacctgtctccatttccagttccaggaccccaaagccatttgcccctgtgccttatacacgtgccaacct

SEQ ID NO: 188426 - DNA, 1164 bp, Homo sapiens
  Payload ID: 17072
  Gene Symbol: STX10
  Gene Name: syntaxin 10
  ENST ID: ENST00000588848
  CDS Start-End: 798-1164
ctctttctcccctggcggtccggctctcgatggtggcgtgacgggggcgggggtggcggcgcgttctcctcggttgggagggaaccagcccgcgaacccaggccgggaggggggttcggcctgggggggaagggactgacatgtctctcgaagaccccttttttgtagtccgagggtgagtgacaacgacgggggagggcggagggtgctctgtacccaagccagccagtgcccgggtgccggccccagcgtgcccggcgggctgggcaaggccgtcggggtgcagagtgggaggcgcacgcaggggtatataggggtctccggagtcccccatgcgtttgggtttgcagtcgggggcagaggcaggcgggaggaccgcctgcccccagccgcgcccgccgtgcccctgcccgcagcgaggtgcagaaggcggtgaacacggcccgcgggctgtaccagcgctggtgcgagctcctgcaggaaagcgcggcggtcggacgcgaggagctggactggacgaccaatgagctgcggaatggcctgcgcagcatcgagtgggacctcgaggacctggaagagaccatcgatatcctggggctttgtggcagagggtggcatgggagagcccattgcggtggcagcccaccttcgggtagggctggacccctagggacggggatgatatctggctccggccttgacccttgactctcagcccacgtatagtggaagccaacccaggcaagttcaagctcccagccggggacctgcaggagagaaaggtgttcgtggagcggatgcgagaggcagtccaggaaatgaaggaccatatggtcagcccaacagccgtagcatttttggagaggaataacagagagatactcgcaggcaagccagctgcccagaagtcacccagcgacctgctggatgccagcgcagtctcggccacatctcgctacatcgaggagcagcaggccacacagcagctgatcatggatgaacaggatcaacagctggagatggtgtctgggagcatccaggttctgaagcacatgtccggccgcgttggagaagagctggacgagcagggcatcatgctggatgccttcgcccaagagatggaccacacccagtcccgcatggacggggtcctcaggaagttgg

SEQ ID NO: 188427 - DNA, 291 bp, Homo sapiens
  Payload ID: 17072
  Gene Symbol: STX10
  Gene Name: syntaxin 10
  ENST ID: ENST00000591415
  CDS Start-End: 1-291
atgttgtgtgcccctgcagatactcgcaggcaagccagctgcccagaagtcacccagcgacctgctggatgccagcgcagtctcggccacatctcgctacatcgaggagcagcaggccacacagcagctgatcatggatgaacaggatcaacagctggagatggtgtctgggagcatccaggttctgaagcacatgtccggccgcgttggagaagagctggacgagcagggcatcatgctggatgccttcgcccaagagatggaccacacccagtcccgcatggacggggt

SEQ ID NO: 188428 - DNA, 1926 bp, Homo sapiens
  Payload ID: 17073
  Gene Symbol: STX11
  Gene Name: syntaxin 11
  Uniprot ID: O75558
  ENST ID: ENST00000367568
  CDS Start-End: 184-1047
cgcggcggcgcggagctcgggcggccgtggaggaactcagcctcggccgcaggaggcgccgggagcggagccgccgggagtcgcgcaacaggtttccttctccatcgctgcgcccacaggggacgcgcgccctgccgggagaggggcttctcggttcgcactctcgctcccagtccaggcaaaatgaaagaccggctagcagaacttctggacttgtccaagcaatatgaccagcagttcccagacggggacgatgagtttgactcgccccacgaggacatcgtgttcgagacggaccacatcctggagtccctgtaccgagacatccgggacattcaggatgaaaaccagctgctggtggccgacgtgaagcggctgggaaagcagaacgcccgcttcctcacgtccatgcggcgcctcagcagcatcaagcgcgacaccaactccatcgccaaggccatcaaggcccggggcgaggtcatccactgcaagctgcgcgccatgaaggagctgagcgaggcggctgaggcccagcacggcccgcactcggcagtggcgcgcatttcgcgggcgcagtacaacgcgctcaccctcaccttccagcgcgccatgcacgactacaaccaggccgagatgaagcagcgcgacaactgcaagatccgcatccagcgccagctggagatcatgggcaaggaagtctcgggcgaccagatcgaggacatgttcgagcagggtaagtgggacgtgttttccgagaacttgctggccgacgtgaagggcgcgcgggccgccctcaacgagatcgagagccgccaccgcgaactgctgcgcctggagagccgcatccgcgacgtacacgagctcttcttgcagatggcggtgctggtggagaagcaggccgacaccctgaacgtcatcgagctcaacgtacaaaagacggtcgactacaccggccaggccaaggcgcaggtgcggaaggccgtgcagtacgaggagaagaacccctgccggaccctctgctgcttctgctgtccctgcctcaagtagcaggccggcccgggccgccaccgcccatcccagaccatggagcgcgctgggaaggacgcaccaaagccgggagctctgccctgcagggagttgccccaaccctttccggaactcagtctttagaaaagaaacgccaggttcaagaattgcaaaccagcctgtgcttggaaagatggttagttgataccgtccgatgattcttcagtaaagatagattcccacaaagttgtgcaatgtcattatatgacaccttgcactcttaccgtcttgacagaagccaagtaaggaactgaagttgtatctgactgtagggtgaatgtctgaggcctgcctcctaataaagactcaaggaggaagtcaattgggcatctgctaatagaatgaactcatgatggaaacttcagttcatttactttgtcctgaaaattccctggttctgttccattttgagcgaaattggccttgggaaaaaccacgttcttcctttccgattcttcatccggtctacgctatgcaattcctccccaaatatagatcttatttctgctcatttcccctacttattaaaatcacaccaaacacttactattttcttatctctttcactttttaaatatctttcaccaggttatattttggtattatttttccaaacatttttaagcactgaatatcgaacaagcactcaaattgaagtatcagtcatgttttgtgtatttttcgctgataaaaattatttaacatttatatttttacttgattacatatgcacatgtatgtaaatgtaaaatactaatattcactaatatatgtacataatgatcaattggtttaacttcttttatgtaagtatggtatataaatttcaagacgaacact

SEQ ID NO: 188429 - DNA, 3079 bp, Homo sapiens
  Payload ID: 17074
  Gene Symbol: STX12
  Gene Name: syntaxin 12
  Uniprot ID: Q86Y82
  ENST ID: ENST00000373943
  CDS Start-End: 126-956
gcacgcagccttagctccttccccgcccttgctcttcccagtttctccgtcagcctgcgggtcccggctggcggctgcttccggtaggagagcggtgtagagcgagcaggtctcagctcctcgtcatgtcatacggtcccttagacatgtaccggaacccggggccctcggggccccagctccgggacttcagcagcatcatccagacgtgcagcggcaacatccagcggatcagccaagccactgctcagataaagaatttgatgagccagctaggaactaagcaggactcaagcaagctacaggaaaatctgcaacagttacaacactccacaaatcagctcgccaaggaaacaaatgaattgctgaaagaattagggtccttgccccttcccttatctacttcagaacagcgccagcagagacttcagaaggaacgcctcatgaatgacttctctgcagccttaaacaatttccaggctgtgcagagaagggtatctgaaaaggaaaaggagagtattgccagagcaagagctggatctcgtctttctgcagaagagaggcaaagagaggagcagctggtctcatttgacagccatgaggagtggaaccagatgcagagccaggaggatgaggtggccatcactgagcaggatttggaacttattaaagaaagagaaacggcaattcggcagctggaggctgacattttggatgtcaatcagatatttaaagatttggccatgatgatccatgaccagggtgatctgattgatagcatagaagccaatgtggaaagctcagaggtgcacgtcgaaagagccactgaacagttacagcgagctgcttactatcagaaaaaatctcgcaagaagatgtgtatcctggtgcttgtcctgtcagtgattattctaatcttgggacttattatctggctagtttataaaacgaagtgattgcctccgatcgttctcccgctgagctgttttcaagggcaagtgcttgttgaagtcttgccagaacaaactgatcacaagaagacagcatatatcagaacgtcctgtaatcatttagttagaaactaactactaactagtctttggaattcgtgacctatggagacagtaattatcaatttattgattctattgatttctcaaattaggaattaacttatgtggattttgcttcctcttgtattctgattgcccttcatcccaagtgtttactgaaaattccattctagatattcttgttttgacaaatgacactacagtctcgtaatattgtcttttatgtatatacaaaatttacctttttactagcatctgagatagagttactttctggtacccagtatattggagtctgtcagaaactctataataggccaccagtttttattatttaacatttttatttgaatttctaagaagcctattctctatctattttgaaagattttggcactatatttaattggaaggtaaaatattgtacatgtgatccagagtaaatgagaagtctctatctgagctggtcagttactggagtacatgttactaatctgggtttaaagtttacttcattatctgctagtgtcatccacagcagttcatcctcatccacactaagccatcctgttagcttttaaaggaagttaatttaattaacattaatatactctatgggctccctctcccacctgtctgcatagaaaggcagaattagacatagcatgctttggaaaagcaaataggaattgttgggaatgatttaatcttgttgttgttgttgttgttgttcacttgtggttctacattcctggtgaatgatgaatgttgctgtcaaagggctgccccctaccttataagggttgctgggcatttgaaggcaggaagatttttaaagatagattgaggttggtttaaaattattcctgtaaaccaacaataaagcaaagaagaggttcatttttgtaaataacactggtttcaaatagtgatgttagacttaacctaatttataaacaagagattaatatctccatgcatagttttagacaaaaaaagatgtttcaataaaattactgtcttgtaatataaatgttgtccacttcccttttccacaggcctagaacagttaaagggaacataatttgtttaggctcccacataaatgtgaatctggccaacaactttggttcatcctttagtgaattagaggatttggctaccctgagtatatttatattcatttcttctgttctccttctgttattatacttaatcttctaaactaaactaatgtgaacagtagggaagcaagggcccaaatgcataagtttctttgcactgttgcacttacttaatacaaataaatgttttttaaagcttttgtagtatgtttttatgagttaacatcctaatgtggtaggtattaggtaatgtgctgtcatgagaaaaattgagacttccaagaaaactggacaccaggtgagggttggtttggagacggaataggtgtagctgcctttccttgaaaaacagtgtgtagagatggctgagtgcaatggctcacacttgtaatcccaacactttggaaggctgaggcgggaggatcagtatatcggtacgtctgagcccaagagttcaagatcagcctgggcagtatagcaagaccccatctccattttttttttaatgattttttaattaaaaaaaagaacaacaggatagagctgttggggtggcacagtggcccaaagagcagcttcagagataattccttggttctatgatccctgtttaactccaaattacagtcggacttggatacatcatttgtaacattgtaggaaagaaaaaagtcttggttgtgaaaaacgatttgcatttgggtaaaataaagtgaccatgcttttgttctgtaatactgtgtgacctgtggttgttgtaatggtgatcatggagagcaaatatgaacttggcctggattttaaatggcctagaatttgtggtagttgccaaagaggttctcctaggtggtcttaataaacctattcacagaattctcctta

SEQ ID NO: 188430 - DNA, 718 bp, Homo sapiens
  Payload ID: 17074
  Gene Symbol: STX12
  Gene Name: syntaxin 12
  ENST ID: ENST00000440806
  CDS Start-End: 74-718
gcctgcgggtcccggctggcggctgcttccggtaggagagcggtgtagagcgagcaggtctcagctcctcgtcatgtcatacggtcccttagacatgtaccggaacccggggccctcggggccccagctccgggacttcagcagcatcatccagacgtgcagcggcaacatccagcggatcagccaagccactgctcagataaagaatttgatgagccagctaggaactaagcaggactcaagcaagctacaggaaaatctgcaacagttacaacactccacaaatcagctcgccaaggaaacaaatgaattgctgaaagaattagggtccttgccccttcccttatctacttcagaacagcgccagcagagacttcagaaggaacgcctcatgaatgacttctctgcagccttaaacaatttccaggctgtgcagagaagggtatctgaaaaggaaaaggagagtattgccagagcaagagctggatctcgtctttctgcagaagagaggcaaagagaggagcagctggtctcatttgacagctctttgcttctggatatgaagaatgtggccctccaagactttattgatagcagaggactggagccctgccatgaggagtggaaccagatgcagagccaggaggatgaggtggccatcactgagcaggatttggaacttattaaagaaagagaaacggcaattcggcagctggag

SEQ ID NO: 188431 - DNA, 785 bp, Homo sapiens
  Payload ID: 17075
  Gene Symbol: STX16
  Gene Name: syntaxin 16
  ENST ID: ENST00000312283
  CDS Start-End: 173-785
agctgcagtcagatccggggatggagggagccggagaagaggagtgagaaggccggggaggcaggccctgctgtcttcctgcaggccggcagcctgctggcagtggaggaccaggccgtccaggaaaggaaggggtcaggagctgttagccgagcaacttgctgatgaccgtatggcactggtgtcaggcatcagcttagatccagaagcagcgattggtgtgacaaaacggccacctcctaagtgggtggatggagtggatgaaattcagtatgatgttggccggattaagcagaagatgaaagaattggccagccttcatgacaagcatttaaacagacccaccctggatgacagcagcgaagaggaacatgccattgagataactacccaagagatcactcagctcttccacaggtgccagcgtgccgtgcaggccctgccgagccgggcccgggcctgctccgagcaggaggggcggctgcttgggaacgtggtggcctcgctggcgcaggccctgcaggaactctccaccagcttccggcacgcacagtcaggctacctcaaacgcatgaagaatcgagaggaaagatcccagcattttttcgacacatcagtaccactaatggatgatggagacgataacactctttaccatcggggttttacagaggaccagttagttctggtggagcagaacacactgatggtggaagagcgggaacgagagattcgccagattgtacagtccatttctgacctgaatgaaatattcagggacttag

SEQ ID NO: 188432 - DNA, 4897 bp, Homo sapiens
  Payload ID: 17075
  Gene Symbol: STX16
  Gene Name: syntaxin 16
  Uniprot ID: O14662
  ENST ID: ENST00000355957
  CDS Start-End: 736-1662
gagctgcagtcagatccggggatggagggagccggagaagaggagtgagaaggccggggaggcaggccctgctgtcttcctgcaggccggcagcctgctggcagtggaggaccaggccgtccaggaaaggaaggggtcaggaggtcgggcagggcctcagcaggttcagacaagtccccagaagggagctgcaggcgccctcgagtccaggccccaagcctggctccggttgtccaaagagggcctaggccaggcctctggtgcggaaactgagtcacagccagacctcagggcacggcctagacgcttacgagccaaagttaggggtagagagcagagacctccggggggtctcagggagtagggggcttcagggcctcccagtctagagccggattggcgagttagacgcttgtagatccaaggttggattggggtggggtctctgggacgttggatcgctacgcaaggattggggggattcaagtgcttagagatcgaagtctgccctgggtagggggagtcagacaattggaaagcctaggtagttatttggggaggggtctctacgccttggcgaagcgcacagctgcatctttttggcttgaggcctgaggccttgtcgagaagcttccgtgaaagggtgggccagccgggccacgagaaagaaagtgaataaatcaggaatataagtgggcggggggcccctgagaggggggtcgcaaagggtgagacatggccaccaggcgtttaaccgacgctttcttgttgttgcggaataattccatccaaaaccggcagctgttagccgagcaagagctggacgagcttgctgatgaccgtatggcactggtgtcaggcatcagcttagatccagaagcagcgattggtgtgacaaaacggccacctcctaagtgggtggatggagtggatgaaattcagtatgatgttggccggattaagcagaagatgaaagaattggccagccttcatgacaagcatttaaacagacccaccctggatgacagcagcgaagaggaacatgccattgagataactacccaagagatcactcagctcttccacaggtgccagcgtgccgtgcaggccctgccgagccgggcccgggcctgctccgagcaggaggggcggctgcttgggaacgtggtggcctcgctggcgcaggccctgcaggaactctccaccagcttccggcacgcacagtcaggctacctcaaacgcatgaagaatcgagaggaaagatcccagcattttttcgacacatcagtaccactaatggatgatggagacgataacactctttaccatcggggttttacagaggaccagttagttctggtggagcagaacacactgatggtggaagagcgggaacgagagattcgccagattgtacagtccatttctgacctgaatgaaatattcagggacttaggggcgatgattgtagaacagggtacagtccttgacagaattgactataacgttgaacagtcctgtatcaaaactgaagatggtttgaaacagcttcacaaggcagaacagtatcaaaagaagaatcggaagatgcttgtgattttaatattatttgtcatcatcattgtgctcattgttgtcctcgttggcgtgaagtctcgataagtggcattgggttttcgtgtgtgccgcgcgtgtggatctcccgggtgtgaggggcttggcctgcgccccgccagctgcccgcagaggtgcagcctcgaggaatctgagggcgtcggggcagcgaacctttgcatccacggactcctccttccctagtcctgctcaagcggtccggggaatgggtttttgtttttccttcattgttgagaatttaaggacctttgatactgctgcacaatagagattgagttctgggatcagttataatatatattttttttagaaagagaaaatgagctgagagtttacaggcactgcagaagctgttcagtattatatgtgtatatgctatttttttagcagccatgtctgagcagaatgttaacataatttttggaaaaattttctttaaaccatctggtttttaagaaatttggtaccaaaaattgatgagtagaggcaaaaatgccccttcatctttctctatatattttccagttgaaaacaaactaagaagtcctttaagaatttataatccgttccccattaacttaatttagcttttccatcactgttaatgatcagagtaacaaagtgtgaaaaataagaaaccatcattgatgttaattaacacatttagatgggccagttaaaacagcttcataagttttaaattaattgtaaatggaatattcctcatttaaaatttttgcactgcattttctactgtaaaccaaaagaggttactaagcaaaaccacctaaatttaagttggtgatttaaatgaatctcacattaaaagaaagcttgacagtgttatgaaagccaccagactcagccagtgtgtccccatgggtatccccagccatccttgctcaatccattacttatatactaactacataatgacctgttcaaaccagactctatttaatgaactgtgaatttacacagaggccattttaaatgggtcaccccatttaggattagtggatctcaaattattaaccaaacatcactccatttcaaagtaaaatattccaccagcgatttgatttattggctcttccattgccactgagcaatgcccaggaagcaggcacattgccaaggactgggggcatcttgactaggaagctcctcgtttgtgtgagcgtgggtcagaccgccaaagtaggacttcatcgtttacctacctattatcaatatggtgcttgaatatattcctataactgtagaacagtgtggaaagtgatggtaactttgaagttgttcatgttttattggctttgttttaattgacactagtagagttttaatggtctttgtgtaaattttaatggcttttccattgtttttgcttctcttaaaaagtttaagaagaatatgacctcattaaatgtgctgttttatttggaccagtcacacaaaatgtctctctagagttgactttaaagttgtttacagaaatttaaactcaattccagagattgaagttgtccaaacagctcatgggcttagtgtccaaacccctgcccagccttccctttccaagttggtgccacctccaggtagccattggtggttttcctattactgatgtggctgtggaatgataaggtcctagaggggccctggcatttcaggaagcggacctggtattccctgacaaacattgcttaggaaagagggccggagaataagaagccagcacctcatcagtcagccctgcaatgtgagacttccgtagctgttgagagtcactgcaggtgttctttcatcccatctgattttaacccatggttgagacgttccaagttagatctgctgctcttaggtgtggggctgtccacattagggaacttgcctcaaaaacagtccacagtggcaataccggacttctgttcaagctttttaaagtgctgagccttacaaacccctgaaggaaagtgaccctttaagagaggatcatctttttttatatttattttcaccaaatagggtgatgagggttggtttttgttccctcaacccatttgggtaaaataacggatctgattagaaactgttttaaggaggggctgggctcggtggctcacgcctgtaatcccagactttgagaggccaaggcggtcacgaggtcaggagttcgagaccagcctagccaacatggtgaaaccccgtctctacaaaaaatacaaaaattagccgggtgggacacgcctgtaatcccagctactcaagaggctgaggcaggagaatagcttgaacccgggaggcagaggttgcagtgagccgagatcacaccactgcactccagcctgggtgacagagcgaggctccgtctcaaaaaaaaaaaaaaaaaattgttttagcgctgggtttcccaaggtgggagagacagacccagcctggagctggcccctggcctgtgtgctgacttcttggggtcctcaaaccactgtatttttctgttgagcctgtacttggggagagatcagtagcatttgaggaagtaagagaaaagaatcatggtacctcagggtttctttccctttactcgctggcagccattgtctgtgggcacctcatgtttttccacactctactgggccgtggaggtaacgatcacccaggccagtctcctctgcctgggatgcgccctctgagaggaggcctagcagggcaggctccctctgggcatccctggatgcagcctctggacacatgcctcctttaaagtgtccgggtgcagctcaggttgagtggaggtagaaggagaaacagacatgtttaccacgcgttttccaaagctcctgatctttcccaagattgtaactgaaaactgctgtctcttgttttgttcgttttgggggtggtggtgctggctgggccatgcttgtgaagtgatgtgtgtctctgatttaacggattcactgttttctctgctaattgagagagcgttatttacattatttatttgttttgacacaagtgctttcagtgttttatcctagctaatggcttcttaaaggtaataaaacccttccaacgtaattggtcagataaaactttttttcttgtatgcttaaataaagcaattagtgaagcacttctatccaaaatgacttttttgtccttttttaaaaccaatttactgttactggaaactttttgtacaataaagcaatcacgcagattaaagaacatcctgcaatcctagtattaattttaa

SEQ ID NO: 188433 - DNA, 4329 bp, Homo sapiens
  Payload ID: 17075
  Gene Symbol: STX16
  Gene Name: syntaxin 16
  Uniprot ID: O14662
  ENST ID: ENST00000358029
  CDS Start-End: 129-1094
aggcctgaggccttgtcgagaagcttccgtgaaagggtgggccagccgggccacgagaaagaaagtgaataaatcaggaatataagtgggcggggggcccctgagaggggggtcgcaaagggtgagacatggccaccaggcgtttaaccgacgctttcttgttgttgcggaataattccatccaaaaccggcagctgttagccgagcaagtgagtagtcacatcacctccagccctctgcattcacgtagcattgctgcgcttgctgatgaccgtatggcactggtgtcaggcatcagcttagatccagaagcagcgattggtgtgacaaaacggccacctcctaagtgggtggatggagtggatgaaattcagtatgatgttggccggattaagcagaagatgaaagaattggccagccttcatgacaagcatttaaacagacccaccctggatgacagcagcgaagaggaacatgccattgagataactacccaagagatcactcagctcttccacaggtgccagcgtgccgtgcaggccctgccgagccgggcccgggcctgctccgagcaggaggggcggctgcttgggaacgtggtggcctcgctggcgcaggccctgcaggaactctccaccagcttccggcacgcacagtcaggctacctcaaacgcatgaagaatcgagaggaaagatcccagcattttttcgacacatcagtaccactaatggatgatggagacgataacactctttaccatcggggttttacagaggaccagttagttctggtggagcagaacacactgatggtggaagagcgggaacgagagattcgccagattgtacagtccatttctgacctgaatgaaatattcagggacttaggggcgatgattgtagaacagggtacagtccttgacagaattgactataacgttgaacagtcctgtatcaaaactgaagatggtttgaaacagcttcacaaggcagaacagtatcaaaagaagaatcggaagatgcttgtgattttaatattatttgtcatcatcattgtgctcattgttgtcctcgttggcgtgaagtctcgataagtggcattgggttttcgtgtgtgccgcgcgtgtggatctcccgggtgtgaggggcttggcctgcgccccgccagctgcccgcagaggtgcagcctcgaggaatctgagggcgtcggggcagcgaacctttgcatccacggactcctccttccctagtcctgctcaagcggtccggggaatgggtttttgtttttccttcattgttgagaatttaaggacctttgatactgctgcacaatagagattgagttctgggatcagttataatatatattttttttagaaagagaaaatgagctgagagtttacaggcactgcagaagctgttcagtattatatgtgtatatgctatttttttagcagccatgtctgagcagaatgttaacataatttttggaaaaattttctttaaaccatctggtttttaagaaatttggtaccaaaaattgatgagtagaggcaaaaatgccccttcatctttctctatatattttccagttgaaaacaaactaagaagtcctttaagaatttataatccgttccccattaacttaatttagcttttccatcactgttaatgatcagagtaacaaagtgtgaaaaataagaaaccatcattgatgttaattaacacatttagatgggccagttaaaacagcttcataagttttaaattaattgtaaatggaatattcctcatttaaaatttttgcactgcattttctactgtaaaccaaaagaggttactaagcaaaaccacctaaatttaagttggtgatttaaatgaatctcacattaaaagaaagcttgacagtgttatgaaagccaccagactcagccagtgtgtccccatgggtatccccagccatccttgctcaatccattacttatatactaactacataatgacctgttcaaaccagactctatttaatgaactgtgaatttacacagaggccattttaaatgggtcaccccatttaggattagtggatctcaaattattaaccaaacatcactccatttcaaagtaaaatattccaccagcgatttgatttattggctcttccattgccactgagcaatgcccaggaagcaggcacattgccaaggactgggggcatcttgactaggaagctcctcgtttgtgtgagcgtgggtcagaccgccaaagtaggacttcatcgtttacctacctattatcaatatggtgcttgaatatattcctataactgtagaacagtgtggaaagtgatggtaactttgaagttgttcatgttttattggctttgttttaattgacactagtagagttttaatggtctttgtgtaaattttaatggcttttccattgtttttgcttctcttaaaaagtttaagaagaatatgacctcattaaatgtgctgttttatttggaccagtcacacaaaatgtctctctagagttgactttaaagttgtttacagaaatttaaactcaattccagagattgaagttgtccaaacagctcatgggcttagtgtccaaacccctgcccagccttccctttccaagttggtgccacctccaggtagccattggtggttttcctattactgatgtggctgtggaatgataaggtcctagaggggccctggcatttcaggaagcggacctggtattccctgacaaacattgcttaggaaagagggccggagaataagaagccagcacctcatcagtcagccctgcaatgtgagacttccgtagctgttgagagtcactgcaggtgttctttcatcccatctgattttaacccatggttgagacgttccaagttagatctgctgctcttaggtgtggggctgtccacattagggaacttgcctcaaaaacagtccacagtggcaataccggacttctgttcaagctttttaaagtgctgagccttacaaacccctgaaggaaagtgaccctttaagagaggatcatctttttttatatttattttcaccaaatagggtgatgagggttggtttttgttccctcaacccatttgggtaaaataacggatctgattagaaactgttttaaggaggggctgggctcggtggctcacgcctgtaatcccagactttgagaggccaaggcggtcacgaggtcaggagttcgagaccagcctagccaacatggtgaaaccccgtctctacaaaaaatacaaaaattagccgggtgggacacgcctgtaatcccagctactcaagaggctgaggcaggagaatagcttgaacccgggaggcagaggttgcagtgagccgagatcacaccactgcactccagcctgggtgacagagcgaggctccgtctcaaaaaaaaaaaaaaaaaattgttttagcgctgggtttcccaaggtgggagagacagacccagcctggagctggcccctggcctgtgtgctgacttcttggggtcctcaaaccactgtatttttctgttgagcctgtacttggggagagatcagtagcatttgaggaagtaagagaaaagaatcatggtacctcagggtttctttccctttactcgctggcagccattgtctgtgggcacctcatgtttttccacactctactgggccgtggaggtaacgatcacccaggccagtctcctctgcctgggatgcgccctctgagaggaggcctagcagggcaggctccctctgggcatccctggatgcagcctctggacacatgcctcctttaaagtgtccgggtgcagctcaggttgagtggaggtagaaggagaaacagacatgtttaccacgcgttttccaaagctcctgatctttcccaagattgtaactgaaaactgctgtctcttgttttgttcgttttgggggtggtggtgctggctgggccatgcttgtgaagtgatgtgtgtctctgatttaacggattcactgttttctctgctaattgagagagcgttatttacattatttatttgttttgacacaagtgctttcagtgttttatcctagctaatggcttcttaaaggtaataaaacccttccaacgtaattggtcagataaaactttttttcttgtatgcttaaataaagcaattagtgaagcacttctatccaaaatgacttttttgtccttttttaaaaccaatttactgttactggaaactttttgtacaataaagcaatcacgcagattaaagaacatcctgcaatcctagtattaattttaa

SEQ ID NO: 188434 - DNA, 4273 bp, Homo sapiens
  Payload ID: 17075
  Gene Symbol: STX16
  Gene Name: syntaxin 16
  Uniprot ID: O14662
  ENST ID: ENST00000359617
  CDS Start-End: 246-1064
agatccggggatggagggagccggagaagaggagtgagaaggccggggaggcaggccctgctgtcttcctgcaggccggcagcctgctggcagtggaggaccaggccgtccaggaaaggaaggggtcaggaggtcgggcagggcctcagcagctgttagccgagcaagtgagtagtcacatcacctccagccctctgcattcacgtagcattgctgcggagctggacgagcttgctgatgaccgtatggcactggtgtcaggcatcagcttagatccagaagcagcgattggtgtgacaaaacggccacctcctaagtgggtggatggagtggatgaaattcagtatgatgttggccggattaagcagaagatgaaagaattggccagccttcatgacaagcatttaaacagacccaccctggatgacagcagcgaagaggaacatgccattgagataactacccaagagatcactcagctcttccacaggtgccagcgtgccgtgcaggccctgccgagccgggcccgggcctgctccgagcaggaggggcggctgcttgggaacgtggtggcctcgctggcgcaggccctgcaggaactctccaccagcttccggcacgcacagtcaggctacctcaaacgcatgaagaatcgagaggaaagatcccagcattttttcgacacatcagtaccactaatggatgatggagacgataacactctttaccatcggggttttacagaggaccagttagttctggtggagcagaacacactgatggtggaagagcgggaacgagagattcgccagattgtacagtccatttctgacctgaatgaaatattcagggacttaggggcgatgattgtagaacagggtacagtccttgacagaattgactataacgttgaacagtcctgtatcaaaactgaagatggtttgaaacagcttcacaaggcagaacagtatcaaaagaagaatcggaagatgcttgtgattttaatattatttgtcatcatcattgtgctcattgttgtcctcgttggcgtgaagtctcgataagtggcattgggttttcgtgtgtgccgcgcgtgtggatctcccgggtgtgaggggcttggcctgcgccccgccagctgcccgcagaggtgcagcctcgaggaatctgagggcgtcggggcagcgaacctttgcatccacggactcctccttccctagtcctgctcaagcggtccggggaatgggtttttgtttttccttcattgttgagaatttaaggacctttgatactgctgcacaatagagattgagttctgggatcagttataatatatattttttttagaaagagaaaatgagctgagagtttacaggcactgcagaagctgttcagtattatatgtgtatatgctatttttttagcagccatgtctgagcagaatgttaacataatttttggaaaaattttctttaaaccatctggtttttaagaaatttggtaccaaaaattgatgagtagaggcaaaaatgccccttcatctttctctatatattttccagttgaaaacaaactaagaagtcctttaagaatttataatccgttccccattaacttaatttagcttttccatcactgttaatgatcagagtaacaaagtgtgaaaaataagaaaccatcattgatgttaattaacacatttagatgggccagttaaaacagcttcataagttttaaattaattgtaaatggaatattcctcatttaaaatttttgcactgcattttctactgtaaaccaaaagaggttactaagcaaaaccacctaaatttaagttggtgatttaaatgaatctcacattaaaagaaagcttgacagtgttatgaaagccaccagactcagccagtgtgtccccatgggtatccccagccatccttgctcaatccattacttatatactaactacataatgacctgttcaaaccagactctatttaatgaactgtgaatttacacagaggccattttaaatgggtcaccccatttaggattagtggatctcaaattattaaccaaacatcactccatttcaaagtaaaatattccaccagcgatttgatttattggctcttccattgccactgagcaatgcccaggaagcaggcacattgccaaggactgggggcatcttgactaggaagctcctcgtttgtgtgagcgtgggtcagaccgccaaagtaggacttcatcgtttacctacctattatcaatatggtgcttgaatatattcctataactgtagaacagtgtggaaagtgatggtaactttgaagttgttcatgttttattggctttgttttaattgacactagtagagttttaatggtctttgtgtaaattttaatggcttttccattgtttttgcttctcttaaaaagtttaagaagaatatgacctcattaaatgtgctgttttatttggaccagtcacacaaaatgtctctctagagttgactttaaagttgtttacagaaatttaaactcaattccagagattgaagttgtccaaacagctcatgggcttagtgtccaaacccctgcccagccttccctttccaagttggtgccacctccaggtagccattggtggttttcctattactgatgtggctgtggaatgataaggtcctagaggggccctggcatttcaggaagcggacctggtattccctgacaaacattgcttaggaaagagggccggagaataagaagccagcacctcatcagtcagccctgcaatgtgagacttccgtagctgttgagagtcactgcaggtgttctttcatcccatctgattttaacccatggttgagacgttccaagttagatctgctgctcttaggtgtggggctgtccacattagggaacttgcctcaaaaacagtccacagtggcaataccggacttctgttcaagctttttaaagtgctgagccttacaaacccctgaaggaaagtgaccctttaagagaggatcatctttttttatatttattttcaccaaatagggtgatgagggttggtttttgttccctcaacccatttgggtaaaataacggatctgattagaaactgttttaaggaggggctgggctcggtggctcacgcctgtaatcccagactttgagaggccaaggcggtcacgaggtcaggagttcgagaccagcctagccaacatggtgaaaccccgtctctacaaaaaatacaaaaattagccgggtgggacacgcctgtaatcccagctactcaagaggctgaggcaggagaatagcttgaacccgggaggcagaggttgcagtgagccgagatcacaccactgcactccagcctgggtgacagagcgaggctccgtctcaaaaaaaaaaaaaaaaaattgttttagcgctgggtttcccaaggtgggagagacagacccagcctggagctggcccctggcctgtgtgctgacttcttggggtcctcaaaccactgtatttttctgttgagcctgtacttggggagagatcagtagcatttgaggaagtaagagaaaagaatcatggtacctcagggtttctttccctttactcgctggcagccattgtctgtgggcacctcatgtttttccacactctactgggccgtggaggtaacgatcacccaggccagtctcctctgcctgggatgcgccctctgagaggaggcctagcagggcaggctccctctgggcatccctggatgcagcctctggacacatgcctcctttaaagtgtccgggtgcagctcaggttgagtggaggtagaaggagaaacagacatgtttaccacgcgttttccaaagctcctgatctttcccaagattgtaactgaaaactgctgtctcttgttttgttcgttttgggggtggtggtgctggctgggccatgcttgtgaagtgatgtgtgtctctgatttaacggattcactgttttctctgctaattgagagagcgttatttacattatttatttgttttgacacaagtgctttcagtgttttatcctagctaatggcttcttaaaggtaataaaacccttccaacgtaattggtcagataaaactttttttcttgtatgcttaaataaagcaattagtgaagcacttctatccaaaatgacttttttgtccttttttaaaaccaatttactgttactggaaactttttgtacaataaagcaatcacgcagattaaagaaca

SEQ ID NO: 188435 - DNA, 4318 bp, Homo sapiens
  Payload ID: 17075
  Gene Symbol: STX16
  Gene Name: syntaxin 16
  Uniprot ID: O14662
  ENST ID: ENST00000361830
  CDS Start-End: 267-1085
acggaaacggtccggggctgagctgcagtcagatccggggatggagggagccggagaagaggagtgagaaggccggggaggcaggccctgctgtcttcctgcaggccggcagcctgctggcagtggaggaccaggccgtccaggaaaggaaggggtcaggaggtcgggcagggcctcagcagctgttagccgagcaagtgagtagtcacatcacctccagccctctgcattcacgtagcattgctgcgtagcttgctgatgaccgtatggcactggtgtcaggcatcagcttagatccagaagcagcgattggtgtgacaaaacggccacctcctaagtgggtggatggagtggatgaaattcagtatgatgttggccggattaagcagaagatgaaagaattggccagccttcatgacaagcatttaaacagacccaccctggatgacagcagcgaagaggaacatgccattgagataactacccaagagatcactcagctcttccacaggtgccagcgtgccgtgcaggccctgccgagccgggcccgggcctgctccgagcaggaggggcggctgcttgggaacgtggtggcctcgctggcgcaggccctgcaggaactctccaccagcttccggcacgcacagtcaggctacctcaaacgcatgaagaatcgagaggaaagatcccagcattttttcgacacatcagtaccactaatggatgatggagacgataacactctttaccatcggggttttacagaggaccagttagttctggtggagcagaacacactgatggtggaagagcgggaacgagagattcgccagattgtacagtccatttctgacctgaatgaaatattcagggacttaggggcgatgattgtagaacagggtacagtccttgacagaattgactataacgttgaacagtcctgtatcaaaactgaagatggtttgaaacagcttcacaaggcagaacagtatcaaaagaagaatcggaagatgcttgtgattttaatattatttgtcatcatcattgtgctcattgttgtcctcgttggcgtgaagtctcgataagtggcattgggttttcgtgtgtgccgcgcgtgtggatctcccgggtgtgaggggcttggcctgcgccccgccagctgcccgcagaggtgcagcctcgaggaatctgagggcgtcggggcagcgaacctttgcatccacggactcctccttccctagtcctgctcaagcggtccggggaatgggtttttgtttttccttcattgttgagaatttaaggacctttgatactgctgcacaatagagattgagttctgggatcagttataatatatattttttttagaaagagaaaatgagctgagagtttacaggcactgcagaagctgttcagtattatatgtgtatatgctatttttttagcagccatgtctgagcagaatgttaacataatttttggaaaaattttctttaaaccatctggtttttaagaaatttggtaccaaaaattgatgagtagaggcaaaaatgccccttcatctttctctatatattttccagttgaaaacaaactaagaagtcctttaagaatttataatccgttccccattaacttaatttagcttttccatcactgttaatgatcagagtaacaaagtgtgaaaaataagaaaccatcattgatgttaattaacacatttagatgggccagttaaaacagcttcataagttttaaattaattgtaaatggaatattcctcatttaaaatttttgcactgcattttctactgtaaaccaaaagaggttactaagcaaaaccacctaaatttaagttggtgatttaaatgaatctcacattaaaagaaagcttgacagtgttatgaaagccaccagactcagccagtgtgtccccatgggtatccccagccatccttgctcaatccattacttatatactaactacataatgacctgttcaaaccagactctatttaatgaactgtgaatttacacagaggccattttaaatgggtcaccccatttaggattagtggatctcaaattattaaccaaacatcactccatttcaaagtaaaatattccaccagcgatttgatttattggctcttccattgccactgagcaatgcccaggaagcaggcacattgccaaggactgggggcatcttgactaggaagctcctcgtttgtgtgagcgtgggtcagaccgccaaagtaggacttcatcgtttacctacctattatcaatatggtgcttgaatatattcctataactgtagaacagtgtggaaagtgatggtaactttgaagttgttcatgttttattggctttgttttaattgacactagtagagttttaatggtctttgtgtaaattttaatggcttttccattgtttttgcttctcttaaaaagtttaagaagaatatgacctcattaaatgtgctgttttatttggaccagtcacacaaaatgtctctctagagttgactttaaagttgtttacagaaatttaaactcaattccagagattgaagttgtccaaacagctcatgggcttagtgtccaaacccctgcccagccttccctttccaagttggtgccacctccaggtagccattggtggttttcctattactgatgtggctgtggaatgataaggtcctagaggggccctggcatttcaggaagcggacctggtattccctgacaaacattgcttaggaaagagggccggagaataagaagccagcacctcatcagtcagccctgcaatgtgagacttccgtagctgttgagagtcactgcaggtgttctttcatcccatctgattttaacccatggttgagacgttccaagttagatctgctgctcttaggtgtggggctgtccacattagggaacttgcctcaaaaacagtccacagtggcaataccggacttctgttcaagctttttaaagtgctgagccttacaaacccctgaaggaaagtgaccctttaagagaggatcatctttttttatatttattttcaccaaatagggtgatgagggttggtttttgttccctcaacccatttgggtaaaataacggatctgattagaaactgttttaaggaggggctgggctcggtggctcacgcctgtaatcccagactttgagaggccaaggcggtcacgaggtcaggagttcgagaccagcctagccaacatggtgaaaccccgtctctacaaaaaatacaaaaattagccgggtgggacacgcctgtaatcccagctactcaagaggctgaggcaggagaatagcttgaacccgggaggcagaggttgcagtgagccgagatcacaccactgcactccagcctgggtgacagagcgaggctccgtctcaaaaaaaaaaaaaaaaaattgttttagcgctgggtttcccaaggtgggagagacagacccagcctggagctggcccctggcctgtgtgctgacttcttggggtcctcaaaccactgtatttttctgttgagcctgtacttggggagagatcagtagcatttgaggaagtaagagaaaagaatcatggtacctcagggtttctttccctttactcgctggcagccattgtctgtgggcacctcatgtttttccacactctactgggccgtggaggtaacgatcacccaggccagtctcctctgcctgggatgcgccctctgagaggaggcctagcagggcaggctccctctgggcatccctggatgcagcctctggacacatgcctcctttaaagtgtccgggtgcagctcaggttgagtggaggtagaaggagaaacagacatgtttaccacgcgttttccaaagctcctgatctttcccaagattgtaactgaaaactgctgtctcttgttttgttcgttttgggggtggtggtgctggctgggccatgcttgtgaagtgatgtgtgtctctgatttaacggattcactgttttctctgctaattgagagagcgttatttacattatttatttgttttgacacaagtgctttcagtgttttatcctagctaatggcttcttaaaggtaataaaacccttccaacgtaattggtcagataaaactttttttcttgtatgcttaaataaagcaattagtgaagcacttctatccaaaatgacttttttgtccttttttaaaaccaatttactgttactggaaactttttgtacaataaagcaatcacgcagattaaagaacatcctgcaatcctagtattaatttt

SEQ ID NO: 188436 - DNA, 924 bp, Homo sapiens
  Payload ID: 17075
  Gene Symbol: STX16
  Gene Name: syntaxin 16
  ENST ID: ENST00000361770
  CDS Start-End: 1-924
atggccaccaggcgtttaaccgacgctttcttgttgttgcggaataattccatccaaaaccggcagctgttagccgagcaagagctggacgagcttgctgatgaccgtatggcactggtgtcaggcatcagcttagatccagaagcagcgattggtgtgacaaaacggccacctcctaagtgggtggatggagtggatgaaattcagtatgatgttggccggattaagcagaagatgaaagaattggccagccttcatgacaagcatttaaacagacccaccctggatgacagcagcgaagaggaacatgccattgagataactacccaagagatcactcagctcttccacaggtgccagcgtgccgtgcagccctgccgagccgggcccgggcctgctccgagcaggaggggcggctgcttgggaacgtggggcctcctggcgcaggccctgcaggaactctccaccagcttccggcacgcacagtcaggctacctcaaacgcatgaagaatcgagaggaaagatcccagcattttttcgacacatcagtaccactaatggatgatggagacgataacactctttaccatcggggttttacagaggaccagttagttctggtggagcagaacacactgatggtggaagagcgggaacgagagattcgccagattgtacagtccatttctgacctgaatgaaatattcagggacttaggggcgatgattgtagaacagggtacagtccttgacagaattgactataacgttgaacagtcctgtatcaaaactgaagatggtttgaaacagcttcacaaggcagaacagtatcaaaagaagaatcggaagatgcttgtgattttaatattatttgtcatcatcattgtgctcattgttgtcctcgttggcgtgaagtctcgataa

SEQ ID NO: 188437 - DNA, 4552 bp, Homo sapiens
  Payload ID: 17075
  Gene Symbol: STX16
  Gene Name: syntaxin 16
  Uniprot ID: O14662
  ENST ID: ENST00000371132
  CDS Start-End: 403-1317
gcagagacctccggggggtctcagggagtagggggcttcagggcctcccagtctagagccggattggcgagttagacgcttgtagatccaaggttggattggggtggggtctctgggacgttggatcgctacgcaaggattggggggattcaagtgcttagagatcgaagtctgccctgggtagggggagtcagacaattggaaagcctaggtagttatttggggaggggtctctacgccttggcgaagcgcacagctgcatctttttggcttgaggcctgaggccttgtcgagaagcttccgtgaaagggtgggccagccgggccacgagaaagaaagtgaataaatcaggaatataagtgggcggggggcccctgagaggggggtcgcaaagggtgagacatggccaccaggcgtttaaccgacgctttcttgttgttgcggaataattccatccaaaaccggcagctgttagccgagcaacttgctgatgaccgtatggcactggtgtcaggcatcagcttagatccagaagcagcgattggtgtgacaaaacggccacctcctaagtgggtggatggagtggatgaaattcagtatgatgttggccggattaagcagaagatgaaagaattggccagccttcatgacaagcatttaaacagacccaccctggatgacagcagcgaagaggaacatgccattgagataactacccaagagatcactcagctcttccacaggtgccagcgtgccgtgcaggccctgccgagccgggcccgggcctgctccgagcaggaggggcggctgcttgggaacgtggtggcctcgctggcgcaggccctgcaggaactctccaccagcttccggcacgcacagtcaggctacctcaaacgcatgaagaatcgagaggaaagatcccagcattttttcgacacatcagtaccactaatggatgatggagacgataacactctttaccatcggggttttacagaggaccagttagttctggtggagcagaacacactgatggtggaagagcgggaacgagagattcgccagattgtacagtccatttctgacctgaatgaaatattcagggacttaggggcgatgattgtagaacagggtacagtccttgacagaattgactataacgttgaacagtcctgtatcaaaactgaagatggtttgaaacagcttcacaaggcagaacagtatcaaaagaagaatcggaagatgcttgtgattttaatattatttgtcatcatcattgtgctcattgttgtcctcgttggcgtgaagtctcgataagtggcattgggttttcgtgtgtgccgcgcgtgtggatctcccgggtgtgaggggcttggcctgcgccccgccagctgcccgcagaggtgcagcctcgaggaatctgagggcgtcggggcagcgaacctttgcatccacggactcctccttccctagtcctgctcaagcggtccggggaatgggtttttgtttttccttcattgttgagaatttaaggacctttgatactgctgcacaatagagattgagttctgggatcagttataatatatattttttttagaaagagaaaatgagctgagagtttacaggcactgcagaagctgttcagtattatatgtgtatatgctatttttttagcagccatgtctgagcagaatgttaacataatttttggaaaaattttctttaaaccatctggtttttaagaaatttggtaccaaaaattgatgagtagaggcaaaaatgccccttcatctttctctatatattttccagttgaaaacaaactaagaagtcctttaagaatttataatccgttccccattaacttaatttagcttttccatcactgttaatgatcagagtaacaaagtgtgaaaaataagaaaccatcattgatgttaattaacacatttagatgggccagttaaaacagcttcataagttttaaattaattgtaaatggaatattcctcatttaaaatttttgcactgcattttctactgtaaaccaaaagaggttactaagcaaaaccacctaaatttaagttggtgatttaaatgaatctcacattaaaagaaagcttgacagtgttatgaaagccaccagactcagccagtgtgtccccatgggtatccccagccatccttgctcaatccattacttatatactaactacataatgacctgttcaaaccagactctatttaatgaactgtgaatttacacagaggccattttaaatgggtcaccccatttaggattagtggatctcaaattattaaccaaacatcactccatttcaaagtaaaatattccaccagcgatttgatttattggctcttccattgccactgagcaatgcccaggaagcaggcacattgccaaggactgggggcatcttgactaggaagctcctcgtttgtgtgagcgtgggtcagaccgccaaagtaggacttcatcgtttacctacctattatcaatatggtgcttgaatatattcctataactgtagaacagtgtggaaagtgatggtaactttgaagttgttcatgttttattggctttgttttaattgacactagtagagttttaatggtctttgtgtaaattttaatggcttttccattgtttttgcttctcttaaaaagtttaagaagaatatgacctcattaaatgtgctgttttatttggaccagtcacacaaaatgtctctctagagttgactttaaagttgtttacagaaatttaaactcaattccagagattgaagttgtccaaacagctcatgggcttagtgtccaaacccctgcccagccttccctttccaagttggtgccacctccaggtagccattggtggttttcctattactgatgtggctgtggaatgataaggtcctagaggggccctggcatttcaggaagcggacctggtattccctgacaaacattgcttaggaaagagggccggagaataagaagccagcacctcatcagtcagccctgcaatgtgagacttccgtagctgttgagagtcactgcaggtgttctttcatcccatctgattttaacccatggttgagacgttccaagttagatctgctgctcttaggtgtggggctgtccacattagggaacttgcctcaaaaacagtccacagtggcaataccggacttctgttcaagctttttaaagtgctgagccttacaaacccctgaaggaaagtgaccctttaagagaggatcatctttttttatatttattttcaccaaatagggtgatgagggttggtttttgttccctcaacccatttgggtaaaataacggatctgattagaaactgttttaaggaggggctgggctcggtggctcacgcctgtaatcccagactttgagaggccaaggcggtcacgaggtcaggagttcgagaccagcctagccaacatggtgaaaccccgtctctacaaaaaatacaaaaattagccgggtgggacacgcctgtaatcccagctactcaagaggctgaggcaggagaatagcttgaacccgggaggcagaggttgcagtgagccgagatcacaccactgcactccagcctgggtgacagagcgaggctccgtctcaaaaaaaaaaaaaaaaaattgttttagcgctgggtttcccaaggtgggagagacagacccagcctggagctggcccctggcctgtgtgctgacttcttggggtcctcaaaccactgtatttttctgttgagcctgtacttggggagagatcagtagcatttgaggaagtaagagaaaagaatcatggtacctcagggtttctttccctttactcgctggcagccattgtctgtgggcacctcatgtttttccacactctactgggccgtggaggtaacgatcacccaggccagtctcctctgcctgggatgcgccctctgagaggaggcctagcagggcaggctccctctgggcatccctggatgcagcctctggacacatgcctcctttaaagtgtccgggtgcagctcaggttgagtggaggtagaaggagaaacagacatgtttaccacgcgttttccaaagctcctgatctttcccaagattgtaactgaaaactgctgtctcttgttttgttcgttttgggggtggtggtgctggctgggccatgcttgtgaagtgatgtgtgtctctgatttaacggattcactgttttctctgctaattgagagagcgttatttacattatttatttgttttgacacaagtgctttcagtgttttatcctagctaatggcttcttaaaggtaataaaacccttccaacgtaattggtcagataaaactttttttcttgtatgcttaaataaagcaattagtgaagcacttctatccaaaatgacttttttgtccttttttaaaaccaatttactgttactggaaactttttgtacaataaagcaatcacgcagattaaagaacatcctgcaatcctagtattaattttaa

SEQ ID NO: 188438 - DNA, 4937 bp, Homo sapiens
  Payload ID: 17075
  Gene Symbol: STX16
  Gene Name: syntaxin 16
  Uniprot ID: O14662
  ENST ID: ENST00000371141
  CDS Start-End: 725-1702
agatccggggatggagggagccggagaagaggagtgagaaggccggggaggcaggccctgctgtcttcctgcaggccggcagcctgctggcagtggaggaccaggccgtccaggaaaggaaggggtcaggaggtcgggcagggcctcagcaggttcagacaagtccccagaagggagctgcaggcgccctcgagtccaggccccaagcctggctccggttgtccaaagagggcctaggccaggcctctggtgcggaaactgagtcacagccagacctcagggcacggcctagacgcttacgagccaaagttaggggtagagagcagagacctccggggggtctcagggagtagggggcttcagggcctcccagtctagagccggattggcgagttagacgcttgtagatccaaggttggattggggtggggtctctgggacgttggatcgctacgcaaggattggggggattcaagtgcttagagatcgaagtctgccctgggtagggggagtcagacaattggaaagcctaggtagttatttggggaggggtctctacgccttggcgaagcgcacagctgcatctttttggcttgaggcctgaggccttgtcgagaagcttccgtgaaagggtgggccagccgggccacgagaaagaaagtgaataaatcaggaatataagtgggcggggggcccctgagaggggggtcgcaaagggtgagacatggccaccaggcgtttaaccgacgctttcttgttgttgcggaataattccatccaaaaccggcagctgttagccgagcaagtgagtagtcacatcacctccagccctctgcattcacgtagcattgctgcggagctggacgagcttgctgatgaccgtatggcactggtgtcaggcatcagcttagatccagaagcagcgattggtgtgacaaaacggccacctcctaagtgggtggatggagtggatgaaattcagtatgatgttggccggattaagcagaagatgaaagaattggccagccttcatgacaagcatttaaacagacccaccctggatgacagcagcgaagaggaacatgccattgagataactacccaagagatcactcagctcttccacaggtgccagcgtgccgtgcaggccctgccgagccgggcccgggcctgctccgagcaggaggggcggctgcttgggaacgtggtggcctcgctggcgcaggccctgcaggaactctccaccagcttccggcacgcacagtcaggctacctcaaacgcatgaagaatcgagaggaaagatcccagcattttttcgacacatcagtaccactaatggatgatggagacgataacactctttaccatcggggttttacagaggaccagttagttctggtggagcagaacacactgatggtggaagagcgggaacgagagattcgccagattgtacagtccatttctgacctgaatgaaatattcagggacttaggggcgatgattgtagaacagggtacagtccttgacagaattgactataacgttgaacagtcctgtatcaaaactgaagatggtttgaaacagcttcacaaggcagaacagtatcaaaagaagaatcggaagatgcttgtgattttaatattatttgtcatcatcattgtgctcattgttgtcctcgttggcgtgaagtctcgataagtggcattgggttttcgtgtgtgccgcgcgtgtggatctcccgggtgtgaggggcttggcctgcgccccgccagctgcccgcagaggtgcagcctcgaggaatctgagggcgtcggggcagcgaacctttgcatccacggactcctccttccctagtcctgctcaagcggtccggggaatgggtttttgtttttccttcattgttgagaatttaaggacctttgatactgctgcacaatagagattgagttctgggatcagttataatatatattttttttagaaagagaaaatgagctgagagtttacaggcactgcagaagctgttcagtattatatgtgtatatgctatttttttagcagccatgtctgagcagaatgttaacataatttttggaaaaattttctttaaaccatctggtttttaagaaatttggtaccaaaaattgatgagtagaggcaaaaatgccccttcatctttctctatatattttccagttgaaaacaaactaagaagtcctttaagaatttataatccgttccccattaacttaatttagcttttccatcactgttaatgatcagagtaacaaagtgtgaaaaataagaaaccatcattgatgttaattaacacatttagatgggccagttaaaacagcttcataagttttaaattaattgtaaatggaatattcctcatttaaaatttttgcactgcattttctactgtaaaccaaaagaggttactaagcaaaaccacctaaatttaagttggtgatttaaatgaatctcacattaaaagaaagcttgacagtgttatgaaagccaccagactcagccagtgtgtccccatgggtatccccagccatccttgctcaatccattacttatatactaactacataatgacctgttcaaaccagactctatttaatgaactgtgaatttacacagaggccattttaaatgggtcaccccatttaggattagtggatctcaaattattaaccaaacatcactccatttcaaagtaaaatattccaccagcgatttgatttattggctcttccattgccactgagcaatgcccaggaagcaggcacattgccaaggactgggggcatcttgactaggaagctcctcgtttgtgtgagcgtgggtcagaccgccaaagtaggacttcatcgtttacctacctattatcaatatggtgcttgaatatattcctataactgtagaacagtgtggaaagtgatggtaactttgaagttgttcatgttttattggctttgttttaattgacactagtagagttttaatggtctttgtgtaaattttaatggcttttccattgtttttgcttctcttaaaaagtttaagaagaatatgacctcattaaatgtgctgttttatttggaccagtcacacaaaatgtctctctagagttgactttaaagttgtttacagaaatttaaactcaattccagagattgaagttgtccaaacagctcatgggcttagtgtccaaacccctgcccagccttccctttccaagttggtgccacctccaggtagccattggtggttttcctattactgatgtggctgtggaatgataaggtcctagaggggccctggcatttcaggaagcggacctggtattccctgacaaacattgcttaggaaagagggccggagaataagaagccagcacctcatcagtcagccctgcaatgtgagacttccgtagctgttgagagtcactgcaggtgttctttcatcccatctgattttaacccatggttgagacgttccaagttagatctgctgctcttaggtgtggggctgtccacattagggaacttgcctcaaaaacagtccacagtggcaataccggacttctgttcaagctttttaaagtgctgagccttacaaacccctgaaggaaagtgaccctttaagagaggatcatctttttttatatttattttcaccaaatagggtgatgagggttggtttttgttccctcaacccatttgggtaaaataacggatctgattagaaactgttttaaggaggggctgggctcggtggctcacgcctgtaatcccagactttgagaggccaaggcggtcacgaggtcaggagttcgagaccagcctagccaacatggtgaaaccccgtctctacaaaaaatacaaaaattagccgggtgggacacgcctgtaatcccagctactcaagaggctgaggcaggagaatagcttgaacccgggaggcagaggttgcagtgagccgagatcacaccactgcactccagcctgggtgacagagcgaggctccgtctcaaaaaaaaaaaaaaaaaattgttttagcgctgggtttcccaaggtgggagagacagacccagcctggagctggcccctggcctgtgtgctgacttcttggggtcctcaaaccactgtatttttctgttgagcctgtacttggggagagatcagtagcatttgaggaagtaagagaaaagaatcatggtacctcagggtttctttccctttactcgctggcagccattgtctgtgggcacctcatgtttttccacactctactgggccgtggaggtaacgatcacccaggccagtctcctctgcctgggatgcgccctctgagaggaggcctagcagggcaggctccctctgggcatccctggatgcagcctctggacacatgcctcctttaaagtgtccgggtgcagctcaggttgagtggaggtagaaggagaaacagacatgtttaccacgcgttttccaaagctcctgatctttcccaagattgtaactgaaaactgctgtctcttgttttgttcgttttgggggtggtggtgctggctgggccatgcttgtgaagtgatgtgtgtctctgatttaacggattcactgttttctctgctaattgagagagcgttatttacattatttatttgttttgacacaagtgctttcagtgttttatcctagctaatggcttcttaaaggtaataaaacccttccaacgtaattggtcagataaaactttttttcttgtatgcttaaataaagcaattagtgaagcacttctatccaaaatgacttttttgtccttttttaaaaccaatttactgttactggaaactttttgtacaataaagcaatcacgcagattaaagaacatcctgcaatcctagtattaattttaa

SEQ ID NO: 188439 - DNA, 553 bp, Homo sapiens
  Payload ID: 17075
  Gene Symbol: STX16
  Gene Name: syntaxin 16
  ENST ID: ENST00000458280
  CDS Start-End: 186-553
gagctgcagtcagatccggggatggagggagccggagaagaggagtgagaaggccggggaggcaggccctgctgtcttcctgcaggccggcagcctgctggcagtggaggaccaggccgtccaggaaaggaaggggtcaggagctgttagccgagcaagagctggacgagcttgctgatgaccgtatggcactggtgtcaggcatcagcttagatccagaagcagcgattggtgtgacaaaacggccacctcctaagtgggtggatggagtggatgaaattcagtatgatgttggccggattaagcagaagatgaaagaattggccagccttcatgacaagcatttaaacagacccaccctggatgacagcagcgaagaggaacatgccattgagataactacccaagagatcactcagctcttccacaggtgccagcgtgccgtgcaggccctgccgagccgggcccgggcctgctccgagcaggaggggcggctgcttgggaacgtggtggcctcgctggcgcaggccctgcaggaactctccaccagctt

SEQ ID NO: 188440 - DNA, 855 bp, Homo sapiens
  Payload ID: 17075
  Gene Symbol: STX16
  Gene Name: syntaxin 16
  ENST ID: ENST00000438253
  CDS Start-End: 1-660
ggcatcagcttagatccagaagcagcgattggtgtgacaaaacggccacctcctaagtgggtggatggagtggatgaaattcagtatgatgttggccggattaagcagaagatgaaagaattggccagccttcatgacaagcatttaaacagacccaccctggatgacagcagcgaagaggaacatgccattgagataactacccaagagatcactcagctcttccacaggtgccagcgtgccgtgcaggccctgccgagccgggcccgggcctgctccgagcaggaggggcggctgcttgggaacgtggtggcctcgctggcgcaggccctgcaggaactctccaccagcttccggcacgcacagtcaggctacctcaaacgcatgaagaatcgagaggaaagatcccagcattttttcgacacatcagtaccactaatggatgatggagacgataacactctttaccatcggggtacagtccttgacagaattgactataacgttgaacagtcctgtatcaaaactgaagatggtttgaaacagcttcacaaggcagaacagtatcaaaagaagaatcggaagatgcttgtgattttaatattatttgtcatcatcattgtgctcattgttgtcctcgttggcgtgaagtctcgataagtggcattgggttttcgtgtgtgccgcgcgtgtggatctcccgggtgtgaggggcttggcctgcgccccgccagctgcccgcagaggtgcagcctcgaggaatctgagggcgtcggggcagcgaacctttgcatccacggactcctccttccctagtcctgctcaagcggtccggggaatgggtttttgtttttc

SEQ ID NO: 188441 - DNA, 560 bp, Homo sapiens
  Payload ID: 17075
  Gene Symbol: STX16
  Gene Name: syntaxin 16
  ENST ID: ENST00000412911
  CDS Start-End: 199-560
agtcagatccggggatggagggagccggagaagaggagtgagaaggccggggaggcaggccctgctgtcttcctgcaggccggcagcctgctggcagtggaggaccaggccgtccaggaaaggaaggggtcaggaggtcgggcagggcctcagcagctgttagccgagcaagagctggacgagcttgctgatgaccgtatggcactggtgtcaggcatcagcttagatccagaagcagcgattggtgtgacaaaacggccacctcctaagtgggtggatggagtggatgaaattcagtatgatgttggccggattaagcagaagatgaaagaattggccagccttcatgacaagcatttaaacagacccaccctggatgacagcagcgaagaggaacatgccattgagataactacccaagagatcactcagctcttccacaggtgccagcgtgccgtgcaggccctgccgagccgggcccgggcctgctccgagcaggaggggcggctgcttgggaacgtggtggcctcgctggcgcaggccctgcaggaactctccac

SEQ ID NO: 188442 - DNA, 812 bp, Homo sapiens
  Payload ID: 17075
  Gene Symbol: STX16
  Gene Name: syntaxin 16
  ENST ID: ENST00000464640
  CDS Start-End: 1-609
atggccaccaggcgtttaaccgacgctttcttgttgttgcggaataattccatccaaaaccggcagctgttagccgagcaagagctggacgagcttgctgatgaccgtatggcactggtgtcaggcatcagcttagatccagaagcagcgattggtgtgacaaaacggccacctcctaagtgggtggatggagtggatgaaattcagtatgatgttggccggattaagcagaagatgaaagaattggccagccttcatgacaagcatttaaacagacccaccctggatgacagcagcgaagaggaacatgccattgagataactacccaagagatcactcagctcttccacaggtgccagcgtgccgtgcaggccctgccgagccgggcccgggcctgctccgagcaggaggggcggctgcttgggaacgtggtggcctcgctggcgcaggccctgcaggaactctccaccagcttccggcacgcacagtcaggctacctcaaacgcatgaagaatcgagaggaaagatcccagcattttttcgacacatcagtaccactaatggatgatggagacgataacactctttaccatcggaggaccagttagttctggtggagcagaacacactgatggtggaagagcgggaacgagagattcgccagattgtacagtccatttctgacctgaatgaaatattcagggacttaggggcgatgattgtagaacagggtacagtccttgacagaattgactataacgttgaacagtcctgtatcaaaactgaagatggtttgaaacagcttcacaag

SEQ ID NO: 188443 - DNA, 874 bp, Homo sapiens
  Payload ID: 17075
  Gene Symbol: STX16
  Gene Name: syntaxin 16
  ENST ID: ENST00000483434
  CDS Start-End: 162-401
cggagaagaggagtgagaaggccggggaggcaggccctgctgtcttcctgcaggccggcagcctgctggcagtggaggaccaggccgtccaggaaaggaaggggtcaggaggtcgggcagggcctcagcagctgttagccgagcaacttgctgatgaccgtatggcactggtgtcaggcatcagcttagatccagaagcagcgattggtgtgacaaaacggccacctcctaagtgggtggatggagtggatgaaattcagtatgatgttggccggattaagcagaagatgaaagaattggccagccttcatgacaagcatttaaacagacccaccctggatgacagcagcgaagaggaacatgccattgagataactacccaagagatcactcaggcatgaagaatcgagaggaaagatcccagcattttttcgacacatcagtaccactaatggatgatggagacgataacactctttaccatcggggttttacagaggaccagttagttctggtggagcagaacacactgatggtggaagagcgggaacgagagattcgccagattgtacagtccatttctgacctgaatgaaatattcagggacttaggggcgatgattgtagaacagggtacagtccttgacagaattgactataacgttgaacagtcctgtatcaaaactgaagatggtttgaaacagcttcacaaggcagaacagtatcaaaagaagaatcggaagatgcttgtgattttaatattatttgtcatcatcattgtgctcattgttgtcctcgttggcgtgaagtctcgataagtggcattgggttttcgtgtgtgccgcgcgtgtggatctcccgggtgtgaggggctt

SEQ ID NO: 188444 - DNA, 942 bp, Homo sapiens
  Payload ID: 17075
  Gene Symbol: STX16
  Gene Name: syntaxin 16
  Uniprot ID: O14662
  ENST ID: ENST00000467096
  CDS Start-End: 142-489
tctttttggcttgaggcctgaggccttgtcgagaagcttccgtgaaagggtgggccagccgggccacgagaaagaaagtgaataaatcaggaatataagtgggcggggggcccctgagaggggggtcgcaaagggtgagacatggccaccaggcgtttaaccgacgctttcttgttgttgcggaataattccatccaaaaccggcagctgttagccgagcaagagctggacgagcttgctgatgaccgtatggcactggtgtcaggcatcagcttagatccagaagcagcgattggtgtgacaaaacggccacctcctaagtgggtggatggagtggatgaaattcagtatgatgttggccggattaagcagaagatgaaagaattggccagccttcatgacaagcatttaaacagacccaccctggatgacagcagcgaagaggaacatgccattgagataactacccaagagatcactcaggcatgaagaatcgagaggaaagatcccagcattttttcgacacatcagtaccactaatggatgatggagacgataacactctttaccatcggggttttacagaggaccagttagttctggtggagcagaacacactgatggtggaagagcgggaacgagagattcgccagattgtacagtccatttctgacctgaatgaaatattcagggacttaggggcgatgattgtagaacagggtacagtccttgacagaattgactataacgttgaacagtcctgtatcaaaactgaagatggtttgaaacagcttcacaaggcagaacagtatcaaaagaagaatcggaagatgcttgtgattttaatattatttgtcatcatcattgtgctcattgttgtcctcgttggcgtgaagtctcgataagtggcattgggttttcgtgtgtgccgcgcgtgtggat

SEQ ID NO: 188445 - DNA, 572 bp, Homo sapiens
  Payload ID: 17075
  Gene Symbol: STX16
  Gene Name: syntaxin 16
  ENST ID: ENST00000460655
  CDS Start-End: 292-432
agatccggggatggagggagccggagaagaggagtgagaaggccggggaggcaggccctgctgtcttcctgcaggccggcagcctgctggcagtggaggaccaggccgtccaggaaaggaaggggtcaggaggtcgggcagggcctcagcaggttcagacaagtccccagaagggagctgcaggcgccctcgagtccaggccccaagcctggctccggttgtccaaagagggcctaggccaggcctctgctgttagccgagcaagagctggacgagcttgctgatgaccgtatggcactggtgtcaggcatcagcttagatccagaagcagcgattggtgtgacaaaacggccacctcctaagtgggtggatggagtggatgaagtaagttccatattcagtatgatgttggccggattaagcagaagatgaaagaattggccagccttcatgacaagcatttaaacagacccaccctggatgacagcagcgaagaggaacatgccattgagataactacccaagagatcactcaggcatgaagaatcgagaggaaagatcccagcattttt

SEQ ID NO: 188446 - DNA, 597 bp, Homo sapiens
  Payload ID: 17075
  Gene Symbol: STX16
  Gene Name: syntaxin 16
  ENST ID: ENST00000493301
  CDS Start-End: 1-380
ccgacgctttcttgttgttgcggaataattccatccaaaaccggcagctgttagccgagcaagtgagtagtcacatcacctccagccctctgcattcacgtagcattgctgcggagctggacgagcttgctgatgaccgtatggcactggtgtcaggcatcagcttagatccagaagcagcgattggtgtgacaaaacggccacctcctaagtgggtggatggagtggatgaaattcagtatgatgttggccggattaagcagaagatgaaagaattggccagccttcatgacaagcatttaaacagacccaccctggatgacagcagcgaagaggaacatgccattgagataactacccaagagatcactcaggcatgaagaatcgagaggaaagatcccagcattttttcgacacatcagtaccactaatggatgatggagacgataacactctttaccatcggggttttacagaggaccagttagttctggtggagcagaacacactgatggtggaagagcgggaacgagagattcgccagattgtacagtccatttctgacctgaatgaaatattcagggacttaggggcgat

SEQ ID NO: 188447 - DNA, 936 bp, Homo sapiens
  Payload ID: 17075
  Gene Symbol: STX16
  Gene Name: syntaxin 16
  ENST ID: ENST00000476384
  CDS Start-End: 281-520
ccggagaagaggagtgagaaggccggggaggcaggccctgctgtcttcctgcaggccggcagcctgctggcagtggaggaccaggccgtccaggaaaggaaggggtcaggaggtcgggcagggcctcagcagctgttagccgagcaaccagatcaagtcaaatttacgttctgaagtatgtccaaggaaattaagagctggtgcatgaaaagataggaaaacaatccaaatcctagcagttatcaaaagcaagtttataatacagcttgctgatgaccgtatggcactggtgtcaggcatcagcttagatccagaagcagcgattggtgtgacaaaacggccacctcctaagtgggtggatggagtggatgaaattcagtatgatgttggccggattaagcagaagatgaaagaattggccagccttcatgacaagcatttaaacagacccaccctggatgacagcagcgaagaggaacatgccattgagataactacccaagagatcactcaggcatgaagaatcgagaggaaagatcccagcattttttcgacacatcagtaccactaatggatgatggagacgataacactctttaccatcggggttttacagaggaccagttagttctggtggagcagaacacactgatggtggaagagcgggaacgagagattcgccagattgtacagtccatttctgacctgaatgaaatattcagggacttaggggcgatgattgtagaacagggtacagtccttgacagaattgactataacgttgaacagtcctgtatcaaaactgaagatggtttgaaacagcttcacaaggcagaacagtatcaaaagaagaatcggaagatgcttgtgattttaatattatttgtcatcatcattgtgctcattgttgtcctcgttggcgtgaagtctcgataa

SEQ ID NO: 188448 - DNA, 2713 bp, Homo sapiens
  Payload ID: 17076
  Gene Symbol: STX17
  Gene Name: syntaxin 17
  Uniprot ID: P56962
  ENST ID: ENST00000259400
  CDS Start-End: 137-1045
ctcgtgatgccccgccccgtcgctcctgcgcctgcgccgtgcccaccgaccggcctcgagcgccccggcgggaggtttttctatatgagtggagaagacagctgttaccagggaggtcatacaacatttttttaggatgtctgaagatgaagaaaaagtgaaattacgccgtcttgaaccagctatccagaaattcattaagatagtaatcccaacagacctggaaaggttaagaaagcaccagataaatattgagaagtatcaaaggtgcagaatctgggacaagttgcatgaagagcatatcaatgcaggacgtacagttcagcaactccgatccaatatccgagaaattgagaaactttgtttgaaagtccgaaaggatgacctagtacttctgaagagaatgatagatcctgttaaagaagaagcatcagcagcaacagcagaatttctccaactccatttggaatctgtagaagaacttaagaagcaatttaatgatgaagaaactttgctacagcctcctttgaccagatccatgactgttggtggagcatttcatactactgaagctgaagctagttctcagagtttgactcagatatatgccttacctgaaattcctcaagatcaaaatgctgcagaatcgtgggaaaccttagaagcggacttaattgaacttagccaactggtcactgacttctctctcctagtgaattctcagcaggagaagattgacagcattgcagaccatgtcaacagtgctgctgtgaatgttgaagagggaaccaaaaacttagggaaggctgcaaaatacaagctggcagctctgcctgtggcaggtgcactcatcgggggaatggtagggggtcctattggcctccttgcaggcttcaaagtggcaggaattgcagctgcacttggtggtggggtgttgggcttcacaggtggaaaattgatacaaagaaagaaacagaaaatgatggagaagctcacttccagctgtccagatcttcccagccaaactgacaagaaatgcagttaaaaaccaaatttcagtattattggtgccaacatgtctatcctgaggacctttgctgctgttggacactccgtcaccttttggaacacaagtatatcaagatagtggctactgatgttcaagtgggattgaagtgtgataaatggatatattttgttgtttgctggggtgttcatggagatgttaagagattgaggccctgggctgagggtatataatgtatgtcaggtaaagtttgaagactgccaaggagcagattttctccctggaaatgtgaaaactgaacctataactctgataaggacttgagatgtgtagaaacgttgggttatggaagactagtttcttccataaccctgaattggagaccttaatgctaagtgtagattattgaggtttgttagtgaggaaaagaataagagttcagaagcctttgttatcagatagcgaaatcagggcctagtgaggagcacaggtcgactacataatggagtccattggcgaaccctattgcaatttggtccaactatatcttctggtgaaggaaattaatgatgtaagaaaatgcaagaggctcaacttctcttccaaaaatcttctggcttctgaactcttcctctgcctctctttaaataaataacacagaatttcaagtggtaggagacttattaagccagtcaccaagcttggtctgtcagcctgtcttctaacacctcaaagatcttgtgccctgtgctgtccctcccttgtaattatgaaaagttctttggtttctggggtgaattctacccatgtataatgaggaattctctcataaccttttttgtcttgtctgtcatctctgttcatcccttcctataacctctaggtaaaaagaaaagaaaaaaagaaatttcgagatattttcaacattgttagagtttgggctaaaatgagcaaggagaaaaaaaccaccaagaacatttcctggggcatgttccagttttgaggggtgatatatctgccagatagggggtatctgacccagtcttcttttcagctggtctctggggggagctgagaactcgcttgctacctcacatccttttccccagactttttatctcctatgcatccctttgctttctatagctggtgtttcttccccaaaatggcgttcccatgcttacctttctcacattctagacaatgatggacaaagacgcatgcaagactcagacccggggaatggtgtggtgctaatctcaacacctgacattcacagcaagcatggcccagcccaactgcatgtctatctcaaaccgcagaaaggctttaatactggaaaaaaagaattcaagactacaggcagctcccctctgtaccccaactcatttaaaataggaggaatcactttttgccttacttaacgcttttttctgagcacagggatgggcacctgcaccccagaaggtgtgagctgtctctctgccaggagctaaggttcattaggggattggatggtttatcacttctttctttctgagtttacttttagtaacttttattgatggctacctttcatgtccctgtctaaagagactttctctttcatacgtcttaaatctcatcaatgaaatccagtgaaacagcaccatttcttagtatcattaaataactagaaagtatcaa

SEQ ID NO: 188449 - DNA, 2424 bp, Homo sapiens
  Payload ID: 17076
  Gene Symbol: STX17
  Gene Name: syntaxin 17
  Uniprot ID: P56962
  ENST ID: ENST00000534052
  CDS Start-End: 649-1557
gggctctctggaggccgcctttgggggcgtcgggccctcacaggcttggtgggcctggcgcccgtgtggcgcgcgcaagaggcgctgggcggcaagtagggcattggatccgaagtgcgagcgccatggtggctcctcctgtttttcagaagtggcggagcctcgcttggtttcgtttttggaagctttattggaagctggtatagggaggccgcagacgatgcgagcaggacggcctcccggggtcgcggggtggaaaagtttccggcgcgcgtcctgtctctggcgcgctgtaggccccgggtcgccagggtcgctggcgtctgggtcccgggacagacccgcgcatccgttcgctggtgggggcgtttggtgtgtgtggcccaggtgtgctgtgggtgacactgcgaggaatgacgcgacgctcgatggtagtgaggctcggaggactgggagcgagaggccggaagcccctgctcgccaaacccagaggtggttggcagaaggtcccacaccttggctccctccttttagctaaccgaggttcagagaggagactttactttgacttttctctccaaattcggtttttctatatgagtggagaagacagctgttaccagggaggtcatacaacatttttttaggatgtctgaagatgaagaaaaagtgaaattacgccgtcttgaaccagctatccagaaattcattaagatagtaatcccaacagacctggaaaggttaagaaagcaccagataaatattgagaagtatcaaaggtgcagaatctgggacaagttgcatgaagagcatatcaatgcaggacgtacagttcagcaactccgatccaatatccgagaaattgagaaactttgtttgaaagtccgaaaggatgacctagtacttctgaagagaatgatagatcctgttaaagaagaagcatcagcagcaacagcagaatttctccaactccatttggaatctgtagaagaacttaagaagcaatttaatgatgaagaaactttgctacagcctcctttgaccagatccatgactgttggtggagcatttcatactactgaagctgaagctagttctcagagtttgactcagatatatgccttacctgaaattcctcaagatcaaaatgctgcagaatcgtgggaaaccttagaagcggacttaattgaacttagccaactggtcactgacttctctctcctagtgaattctcagcaggagaagattgacagcattgcagaccatgtcaacagtgctgctgtgaatgttgaagagggaaccaaaaacttagggaaggctgcaaaatacaagctggcagctctgcctgtggcaggtgcactcatcgggggaatggtagggggtcctattggcctccttgcaggcttcaaagtggcaggaattgcagctgcacttggtggtggggtgttgggcttcacaggtggaaaattgatacaaagaaagaaacagaaaatgatggagaagctcacttccagctgtccagatcttcccagccaaactgacaagaaatgcagttaaaaaccaaatttcagtattattggtgccaacatgtctatcctgaggacctttgctgctgttggacactccgtcaccttttggaacacaagtatatcaagatagtggctactgatgttcaagtgggattgaagtgtgataaatggatatattttgttgtttgctggggtgttcatggagatgttaagagattgaggccctgggctgagggtatataatgtatgtcaggtaaagtttgaagactgccaaggagcagattttctccctggaaatgtgaaaactgaacctataactctgataaggacttgagatgtgtagaaacgttgggttatggaagactagtttcttccataaccctgaattggagaccttaatgctaagtgtagattattgaggtttgttagtgaggaaaagaataagagttcagaagcctttgttatcagatagcgaaatcagggcctagtgaggagcacaggtcgactacataatggagtccattggcgaaccctattgcaatttggtccaactatatcttctggtgaaggaaattaatgatgtaagaaaatgcaagaggctcaacttctcttccaaaaatcttctggcttctgaactcttcctctgcctctctttaaataaataacacagaatttcaagtggtaggagacttattaagccagtcaccaagcttggtctgtcagcctgtcttctaacacctcaaagatcttgtgccctgtgctgtccctcccttgtaattatgaaaagttctttggtttctggggtgaattctacccatgtataatgaggaattctctcataaccttttttgtcttgtctgtcatctctgttcatcccttcctataacctctaggt

SEQ ID NO: 188450 - DNA, 568 bp, Homo sapiens
  Payload ID: 17076
  Gene Symbol: STX17
  Gene Name: syntaxin 17
  ENST ID: ENST00000531035
  CDS Start-End: 255-377
accgaccggcctcgagcgccccggcgggagagatgggattttggcatgttgcccaggctggccatgaactcctgggctcaagtggtcctcccgccttggcctcccaaagtgctggtattacagacatgagccaccgtacccggccccttcattcacaatttttcataaagattcagtggctccacaaagtctgtttttctatatgagtggagaagacagctgttaccagggaggtcatacaacatttttttaggatgtctgaagatgaagaaaaagtgaaattacgccgtcttgaaccagctatccagaaattcattaagatagtaatcccaacagacctggaaaggttaagaaagcaccagataaatattgagaagtatcaaaggtgcagaatctgggacaagttgcatgaagagcatatcaatgcaggacgtacagttcagcaactccgatccaatatccgagaaattgagaaactttgtttgaaagtccgaaaggatgacctagtacttctgaagagaatgatagatcctgttaaagaagaagcatcagcagcaacagcagaatt

SEQ ID NO: 188451 - DNA, 675 bp, Homo sapiens
  Payload ID: 17076
  Gene Symbol: STX17
  Gene Name: syntaxin 17
  ENST ID: ENST00000525342
  CDS Start-End: 92-298
ccgaccggcctcgagcgccccggcgggaggtttttctatatgagtggagaagacagctgttaccagggaggtcatacaacatttttttaggatgtctgaagatgaagaaaaagtgaaattacgccgtcttgaaccagctatccagaaattcattaagatagtaatcccaacagacctggaaaggttaagaaagcaccagataaatattgagaagtatcaaaggtgcagaatctgggacaagttgcatgaagagcatatcaatgcaggacgtacagttcagtttaggaactacatttgagccttctccaaggatttcatcaactgtggaacaaaaattttttttttttaaatggacagttgcggccgggcgcggtggcttacgcctgtaatcccagcactttgggaggctgagcaactccgatccaatatccgagaaattgagaaactttgtttgaaagtccgaaaggatgacctagtacttctgaagagaatgatagatcctgttaaagaagaagcatcagcagcaacagcagaatttctccaactccatttggaatctgtagaagaacttaagaagcaatttaatgatgaagaaactttgctacagcctcctttgaccagatccatgactgttggtggagcatttcatactactgaagctgaagctagttctca

SEQ ID NO: 188452 - DNA, 858 bp, Homo sapiens
  Payload ID: 17076
  Gene Symbol: STX17
  Gene Name: syntaxin 17
  ENST ID: ENST00000529340
  CDS Start-End: 99-236
gtgcccaccgaccggcctcgagcgccccggcgggaggtttttctatatgagtggagaagacagctgttaccagggaggtcatacaacatttttttaggatgtctgaagatgaagaaaaagtgaaattacgccgtcttgaaccagctatccagaaattcattaagatagtaatcccaacagacctggaaaggttaagaaagcaccagataaatattgagaaggtatacatacattaaagaagtaaatcattgtgagatatgagggaatttccttacttcacagcttccctttgaggaaagctcacaattgagaagtactgcctaattcagttgaggaaatagtatcaaaggtgcagaatctgggacaagttgcatgaagagcatatcaatgcaggacgtacagttcagcaactccgatccaatatccgagaaattgagaaactttgtttgaaagtccgaaaggatgacctagtacttctgaagagaatgatagatcctgttaaagaagaagcatcagcagcaacagcagaatttctccaactccatttggaatctgtagaagaacttaagaagcaatttaatgatgaagaaactttgctacagcctcctttgaccagatccatgactgttggtggacttaattgaacttagccaactggtcactgacttctctctcctagtgaattctcagcaggagaagattgacagcattgcagaccatgtcaacagtgctgctgtgaatgttgaagagggaaccaaaaacttagggaaggctgcaaaatacaagctggcagctctgcctgtggcaggtgcactcatcgggggaatggtagggggtcctattggcctccttgcaggc

SEQ ID NO: 188453 - DNA, 542 bp, Homo sapiens
  Payload ID: 17076
  Gene Symbol: STX17
  Gene Name: syntaxin 17
  ENST ID: ENST00000526607
  CDS Start-End: 420-542
cgggccctcacaggcttggtgggcctggcgcccgtgtggcgcgcgcaagaggcgctgggcggcaagtagggcattggatccgaagtgcgagcgccatggtggctcctcctgtttttcagaagtggcggagcctcgcttggtttcgtttttggaagctttattggaagctggtatagggaggccgcagacgatgcgagcaggacggcctcccggggtcgcggggtggaaaagtttccggcgcgcgtcctgtctctggcgcgctgtaggccccgggtcgccagggtcgctggcgtctgggtcccgggacagacccgcgcatccgttcgctggtgggggcgtttggtgtgtgtggcccaggtttttctatatgagtggagaagacagctgttaccagggaggtcatacaacatttttttaggatgtctgaagatgaagaaaaagtgaaattacgccgtcttgaaccagctatccagaaattcattaagatagtaatcccaacagacctggaaaggttaagaaagcaccagataaatattgagaag

SEQ ID NO: 188454 - DNA, 2523 bp, Homo sapiens
  Payload ID: 17076
  Gene Symbol: STX17
  Gene Name: syntaxin 17
  Uniprot ID: P56962
  ENST ID: ENST00000525640
  CDS Start-End: 748-1656
aaggggctctctggaggccgcctttgggggcgtcgggccctcacaggcttggtgggcctggcgcccgtgtggcgcgcgcaagaggcgctgggcggcaagtagggcattggatccgaagtgcgagcgccatggtggctcctcctgtttttcagaagtggcggagcctcgcttggtttcgtttttggaagctttattggaagctggtatagggaggccgcagacgatgcgagcaggacggcctcccggggtcgcggggtggaaaagtttccggcgcgcgtcctgtctctggcgcgctgtaggccccgggtcgccagggtcgctggcgtctgggtcccgggacagacccgcgcatccgttcgctggtgggggcgtttggtgtgtgtggcccaggtgtgctgtgggtgacactgcgaggaatgacgcgacgctcgatggtagtgaggctcggaggactgggagcgagaggccggaagcccctgctcgccaaacccagaggtggttggcagaaggtcccacaccttggctccctccttttagctaaccgaggttcagagaggagactttactttgacttttctctccaaattcggtatctcttccataagtcagaaacattaagcggcgggccggaagaaatcgggcgccactagtatcctgaaaagtgggagctctgggccgatggaaggtttttctatatgagtggagaagacagctgttaccagggaggtcatacaacatttttttaggatgtctgaagatgaagaaaaagtgaaattacgccgtcttgaaccagctatccagaaattcattaagatagtaatcccaacagacctggaaaggttaagaaagcaccagataaatattgagaagtatcaaaggtgcagaatctgggacaagttgcatgaagagcatatcaatgcaggacgtacagttcagcaactccgatccaatatccgagaaattgagaaactttgtttgaaagtccgaaaggatgacctagtacttctgaagagaatgatagatcctgttaaagaagaagcatcagcagcaacagcagaatttctccaactccatttggaatctgtagaagaacttaagaagcaatttaatgatgaagaaactttgctacagcctcctttgaccagatccatgactgttggtggagcatttcatactactgaagctgaagctagttctcagagtttgactcagatatatgccttacctgaaattcctcaagatcaaaatgctgcagaatcgtgggaaaccttagaagcggacttaattgaacttagccaactggtcactgacttctctctcctagtgaattctcagcaggagaagattgacagcattgcagaccatgtcaacagtgctgctgtgaatgttgaagagggaaccaaaaacttagggaaggctgcaaaatacaagctggcagctctgcctgtggcaggtgcactcatcgggggaatggtagggggtcctattggcctccttgcaggcttcaaagtggcaggaattgcagctgcacttggtggtggggtgttgggcttcacaggtggaaaattgatacaaagaaagaaacagaaaatgatggagaagctcacttccagctgtccagatcttcccagccaaactgacaagaaatgcagttaaaaaccaaatttcagtattattggtgccaacatgtctatcctgaggacctttgctgctgttggacactccgtcaccttttggaacacaagtatatcaagatagtggctactgatgttcaagtgggattgaagtgtgataaatggatatattttgttgtttgctggggtgttcatggagatgttaagagattgaggccctgggctgagggtatataatgtatgtcaggtaaagtttgaagactgccaaggagcagattttctccctggaaatgtgaaaactgaacctataactctgataaggacttgagatgtgtagaaacgttgggttatggaagactagtttcttccataaccctgaattggagaccttaatgctaagtgtagattattgaggtttgttagtgaggaaaagaataagagttcagaagcctttgttatcagatagcgaaatcagggcctagtgaggagcacaggtcgactacataatggagtccattggcgaaccctattgcaatttggtccaactatatcttctggtgaaggaaattaatgatgtaagaaaatgcaagaggctcaacttctcttccaaaaatcttctggcttctgaactcttcctctgcctctctttaaataaataacacagaatttcaagtggtaggagacttattaagccagtcaccaagcttggtctgtcagcctgtcttctaacacctcaaagatcttgtgccctgtgctgtccctcccttgtaattatgaaaagttctttggtttctggggtgaattctacccatgtataatgaggaattctctcataaccttttttgtcttgtctgtcatctctgttcatcccttcctataacctctaggt

SEQ ID NO: 188455 - DNA, 941 bp, Homo sapiens
  Payload ID: 17076
  Gene Symbol: STX17
  Gene Name: syntaxin 17
  ENST ID: ENST00000524405
  CDS Start-End: 74-499
cccggcgggaggtttttctatatgagtggagaagacagctgttaccagggaggtcatacaacatttttttaggatgtctgaagatgaagaaaaagtgaaattacgccgtcttgaaccagctatccagaaattcattaagatagtaatcccaacagacctggaaaggttaagaaagcaccagataaatattgagaagtatcaaaggtgcagaatctgggacaagttgcatgaagagcatatcaatgcaggacgtacagttcagcaactccgatccaatatccgagaaattgagaaactttgtttgaaagtccgaaaggatgacctagtacttctgaagagaatgatagatcctgttaaagaagaagcatcagcagcaacagcagaatttctccaactccatttggaatctgtagaagaacttaagaagcaatttaatgatgaagaaactttgctacagcctcctttgaccagatccatgactgttggtggacttaattgaacttagccaactggtcactgacttctctctcctagtgaattctcagcaggagaagattgacagcattgcagaccatgtcaacagtgctgctgtgaatgttgaagagggaaccaaaaacttagggaaggctgcaaaatacaagctggcagctctgcctgtggcaggtgcactcatcgggggaatggtagggggtcctattggcctccttgcaggcttcaaagtggcaggaattgcagctgcacttggtggtggggtgttgggcttcacaggtggaaaattgatacaaagaaagaaacagaaaatgatggagaagctcacttccagctgtccagatcttcccagccaaactgacaagaaatgcagttaaaaaccaaatttcagtattattggtgccaacatgtctatcctgaggacctttgctgctgttggacactccgtcacc

SEQ ID NO: 188456 - DNA, 2138 bp, Homo sapiens
  Payload ID: 17077
  Gene Symbol: STX18
  Gene Name: syntaxin 18
  Uniprot ID: Q9P2W9
  ENST ID: ENST00000306200
  CDS Start-End: 65-1072
cgcgccgcggtcgccggctgcttacgtgggcgggcctagtgtggggctgagggtgcgggtcgctatggcggtggacatcacgctgctattccgggccagcgtcaagaccgtgaagacgcggaacaaggcgctgggagtggcggtgggcggcggggtcgatggcagccgggacgagctgttccgccggagcccccggcccaagggcgacttctccagccgggcccgcgaagtgatttctcacattggcaaactgagagattttcttctggaacacaggaaagattatattaatgcttatagccataccatgtctgaatatgggaggatgacagacacagaacgagaccagatagaccaggatgcccagatattcatgaggacctgttcagaagcaattcagcaactacgaacagaagctcacaaggagatacattcccagcaagtgaaggagcacaggaccgctgttttggatttcattgaagattacttgaaaagagtatgtaaactttactcagaacagagagccatccgagttaaaagagtggtggataagaaaagattatctaagctggaaccagaaccaaatacaaagacaagagaatccacatcttctgagaaagtttcacagagtccttcaaaagactctgaagaaaaccctgccactgaagaacgtccagaaaaaattttggctgaaacacaacctgaattgggaacgtggggagatggcaaaggcgaagatgagttatccccagaagaaatacaaatgtttgaacaggaaaatcagcgactaattggtgaaatgaacagcttgtttgatgaagtgaggcaaatcgaagggagagtggttgagatttccagactccaagagatattcacggaaaaggttttgcaacaggaagctgagattgacagcattcaccagttagttgtgggggcaactgaaaatatcaaggaaggcaacgaagacataagagaggccattaaaaacaacgctggcttccgcgtgtggatcctcttcttcctcgtgatgtgctccttctccttgctcttcctcgactggtacgacagctagccagggccacgggggcccagcacgagagtcctcatgggcactcacagactgcgtgctttcatgtacttccagtgctggagcatggtatgaccagattttatcacagtgccatttgaagggaaaggagttcagacagacagacgtattccccaaaaagggataccccaggccgatggtgttcagccatttagcagctgaaaaaggaaacagtgcacaccaatgggaggcagcctgcgtagccctcatcaggcaagacagactgaatgcaggagtgggtgattagctgctccttgaacttgaggctgccttggcagcaggggcacagcaggcctcaagagcccctaattgtctcagggttcaaaggaagacactgacctttcccatcccggtagcttcagggaagatcatagttaataacgtctctcaacaaatgattacttctttgtttccttgtggcttcttgtctgtctgagtcaacgaatacacagacttactggattatagaagagaaaattcacatctgccttgttaatctaataaatataattacagccccttaatgtgttgtcaatgagtctaagttgacaaattcagtggcagcccagccacctcctatcaatcaatcagggaagaaatgcaggggagactggggccctcagtgaggggctgcctggcattactcctccaaagactgctgcccccagaacaggcagggggtgtgggagggccagtttcccgccactgggtccaaggagcctttgttcaaaggaagaagtgggccacggaagaacgggcctgcttctctcgtgcctgtgcttctgacctccaggaactgtaaacaggaacacctatgtgtaactgaaggcatgagacatctgtacaggaagcatcccagcgcccacatgggcatgagacagtctgcactgcgcctggtgaaatgcgtgtgtgtacagacagtccactgggcagcacaggtatcctcatgttctttatttgcacagagtgaaatgtcagaagttacatgtaaatgaattcacagtcaataaagtccacgtctacctggaaa

SEQ ID NO: 188457 - DNA, 771 bp, Homo sapiens
  Payload ID: 17077
  Gene Symbol: STX18
  Gene Name: syntaxin 18
  ENST ID: ENST00000507908
  CDS Start-End: 263-771
ggtctcagtgagggagccgccagaagggaaggagcctcctagcttcccggtcctcacgctcccggagcccacacgccccaaacagacacagaagagctcgctgagctctccgcgcagctaaaccctccaagctttgctgggagaaaccgatgcccgagagcgcgtcgcgaggttcctcctccgccagatttctcacattggcaaactgagagattttcttctggaacacaggaaagattatattaatgcttatagccataccatgtctgaatatgggaggatgacagacacagaacgagaccagatagaccaggatgcccagatattcatgaggacctgttcagaagcaattcagcaactacgaacagaagctcacaaggagatacattcccagcaagtgaaggagcacaggaccgctgttttggatttcattgaagattacttgaaaagagtatgtaaactttactcagaacagagagccatccgagttaaaagagtggtggataagaaaagattatctaagctggaaccagaaccaaatacaaagacaagagaatccacatcttctgagaaagtttcacagagtccttcaaaagactctgaagaaaaccctgccactgaagaacgtccagaaaaaattttggctgaaacacaacctgaattgggaacgtggggagatggcaaaggcgaagatgagttatccccagaagaaatacaaatgtttgaacaggaaaatcagcgactaattggtgaaatgaacagcttgtttga

SEQ ID NO: 188458 - DNA, 1380 bp, Homo sapiens
  Payload ID: 17077
  Gene Symbol: STX18
  Gene Name: syntaxin 18
  ENST ID: ENST00000505286
  CDS Start-End: 47-973
tgcttacgtgggcgggcctagtgtggggctgagggtgcgggtcgctatggcggtggacatcacgctgctattccgggccagcgtcaagaccgtgaagacgcggaacaaggcgctgggagtggcggtgggcggcggggtcgatggcagccgggacgagctgttccgccggagcccccggcccaagggcgacttctccagccgggcccgcgaagtgatttctcacattggcaaactgagagattttcttctggaacacaggaaagattatattaatgcttatagccataccatgtctgaatatgggaggatgacagacacagaacgagaccagatagaccaggatgcccagatattcatgaggacctgttcagaagcaattcagcaactacgaacagaagctcacaaggagatacattcccagcaagtgaaggagcacaggaccgctgttttggatttcattgaagattacttgaaaagagtatgtaaactttactcagaacagagagccatccgagttaaaagagtggtggataagaaaagattatctaagctggaaccagaaccaaatacaaagacaagagaatccacatcttctgagaaagtttcacagagtccttcaaaagactctgaagaaaaccctgccactgaagaacgtccagaaaaaattttggctgaaacacaacctgaattgggaacgtggggagatggcaaaggcgaagatgagttatccccagaagaaatacaaatgtttgaacaggaaaatcagcgactaattggtgaaatgaacagcttgtttgatgaagtgaggcaaatcgaagggagagtggttgagatttccagactccaagagatattcacggaaaaggttttgcaacaggaagctgagattgacagcattcaccagttagttgtgggggcaactgaaaatatcaaggaaggcaacgaagacataagagaggtccctcacctataaaatgcggccaatgagtcacaccaccgtgttgctgaggactcaagtcaatgcacagtggctcaagtaaagaagccaggatgtgccccaggtcacagtgtggacagaaaagaaagccaaaagacaccactgaagtacagcccttttatcaacagcgtcttgatctcagtcccaccaggacgtcgggaagcacctgacacgctacagaacaaacagcccattcagaccagcagcgcgtgcatcaggaaggaggctctgcaggccagacaaactcccctccagcctcaccgccacgccccttcacgctgtcctctccatctgctgctcgtcatccctcagggaaacggaccaagggttcccctcttccctcccacctcggcacccagcagagtcctgcaagacctgatgcg

SEQ ID NO: 188459 - DNA, 1158 bp, Homo sapiens
  Payload ID: 17078
  Gene Symbol: STX19
  Gene Name: syntaxin 19
  Uniprot ID: Q8N4C7
  ENST ID: ENST00000315099
  CDS Start-End: 258-1142
gtgtgaagtaagcaatctattttcacttgctattaacagcaaacgtacaactttatctcttatttgacttcattatttggctttcaaattaacaacatgaaaactatacagaaattagtctgtgccctataagacagagatttagataatttgttcaaaacatgagatgatattcagatattctctcaaaggcaggactccaacaccgcaggtggaaaaccaacaaaaggaagaaaacagaaaggaggaaagggaagatgaaagaccgacttcaagaactaaagcagagaacaaaggaaattgaactctctagagacagtcatgtatcaactacagaaacagaggaacaaggggtgtttctacagcaagctgttatttatgaaagagagcctgtagctgagagacacctacatgaaatccaaaaactacaggaaagtattaacaatttggcagataatgttcaaaaatttgggcagcaacagaaaagtctggtggcttcaatgagaaggtttagtctacttaagagagagtctaccattacaaaggagataaaaattcaggcagaatacatcaacagaagtttgaatgatttagttaaagaagttaaaaagtcagaggttgaaaatggtccatcttcagtggtcacaaggatacttaaatctcagcatgctgcaatgttccgccattttcagcaaatcatgtttatatacaatgacacaatagcagcaaagcaagagaagtgcaagacatttattttacgtcagcttgaagttgctggaaaagagatgtctgaagaagatgtaaatgatatgcttcatcaaggaaaatgggaagtttttaatgaaagcttacttacagaaatcaatatcactaaagcacaactttcagagattgaacagagacacaaggaacttgttaatttggagaaccaaataaaggatttaagggatcttttcattcagatatctcttttagtagaggaacaaggagagagcatcaacaatattgaaatgacagtgaatagtacaaaagagtatgttaacaatactaaagagaaatttggactagctgtaaaatacaaaaaaagaaatccttgcagagtactgtgttgttggtgctgtccatgctgtagctcaaaataaagaagctattttaaaa

SEQ ID NO: 188460 - DNA, 2095 bp, Homo sapiens
  Payload ID: 17079
  Gene Symbol: STX1A
  Gene Name: syntaxin 1A (brain)
  Uniprot ID: Q16623
  ENST ID: ENST00000222812
  CDS Start-End: 28-894
gccggcgccgctgccactcccgggagcatgaaggaccgaacccaggagctccgcacggccaaggacagcgatgatgatgatgatgtcgctgtcaccgtggaccgagaccgcttcatggatgagttctttgagcaggtggaggagattcgaggcttcattgacaagatcgcagagaacgtggaggaggtgaagcggaagcacagtgccatcctggcatcccccaaccccgatgagaagacgaaggaggagctggaagaactcatgtccgacataaagaagacagcaaacaaagttcgttccaagttaaagagcatcgagcagtccatcgagcaagaggaaggcctgaaccgctcctccgctgacctgaggatccggaagacacagcactccacgctgtccagaaagtttgtggaggtcatgtcggagtacaacgccacgcagtccgactaccgcgagcgctgcaaaggccgcatccagaggcagctggagatcaccggcaggaccacgaccagtgaggagctggaggacatgctggagagtgggaaccccgccatctttgcctctgggatcatcatggactccagcatctcgaagcaggctctgagcgagattgagacgcggcacagtgagatcatcaagctggagaacagcatccgtgagctacacgacatgttcatggacatggccatgctcgtggagagccagggagagatgattgacaggatcgagtacaatgtggaacacgcggtagactatgtggagagggccgtgtctgacaccaagaaggccgtcaagtaccagagcaaggcgcgccggaagaaaatcatgatcatcatctgctgtgtgatcctgggcatcgtcatcgcctccactgttgggggcatcttcgcctagaagccacccaaactgccactccactccaggtgggccactccaaggaggccctggctgctgccacctggctgggctgccctcccaacccccgcctctggctcagagcaccctccctcccggcccccatgctcccttctctgccatgggccctccgtccccgccccgtgtcgtgtgcatgatctctgtgagtgtgcgtctgtacgggaagaggcagagggaggcagccagcggggcgtgatgcagtgtgcacagcgaggagcagacccaggcagggccgccagggtgacacaggccacccttccttgccttcagtaactcggtgggcccaggttctgctcttccctggggaccctaacctcgcctccagctgacctgccctgtcctctccagctgtccccacaagcagagccctgaggggtggggaccagctggccacatggtgctgcttttcaggttaggggagaggtggccctgagggacagcccagctctgagtctcagtcgctgatcactgccagggaggctcaggctgccatggctccaggctccctcccctgcctaggggcaaagtccatcgggtcctgggcctcagcttcccttcccacattcctccggccccaggagcaaccccttgggctaggtctgaccccaggtgtccctctggaaggggctggctggtgccctatttccagccaccccagcagctagggaggcaaagcaggctgcagtcagtccctcaagccagcgttgcatgtttgggatggtggctcctgttgtcttgcgctctgggaagtcagatgtcatttcaggcctgcagtctcatcctgcccttgccatcctcccatcgatgtgccacgtgggtgtcacgtgtcccagatgcagtattcggcagccagccggggagggctacctcctcctcctcaccaccttggggcttctcatgggaaatgtgcccccgccccaggaccctctcccttgtggacaggcagggagatgcatgcgagtgcatgcagcaggggatggggccgtgtccgtgtgccccaccctccctcggctttactcctgcccagtgactgtgaccactgtccgtgttgccttcttgaacagcgattccccccaaccccttcaccaaaggtcttggtacaaccagctgcccattttgtgaaatttttatgtagaataaacatttgtatctgtaccag

SEQ ID NO: 188461 - DNA, 1022 bp, Homo sapiens
  Payload ID: 17079
  Gene Symbol: STX1A
  Gene Name: syntaxin 1A (brain)
  ENST ID: ENST00000395154
  CDS Start-End: 27-869
ccggcgccgctgccactcccgggagcatgaaggaccgaacccaggagctccgcacggccaaggacagcgatgatgatgatgatgtcgctgtcaccgtggaccgagaccgcttcatggatgagttctttgagcaggtggaggagattcgaggcttcattgacaagatcgcagagaacgtggaggaggtgaagcggaagcacagtgccatcctggcatcccccaaccccgatgagaagacgaaggaggagctggaagaactcatgtccgacataaagaagacagcaaacaaagttcgttccaagttaaagagcatcgagcagtccatcgagcaagaggaaggcctgaaccgctcctccgctgacctgaggatccggaagacacagcactccacgctgtccagaaagtttgtggaggtcatgtcggagtacaacgccacgcagtccgactaccgcgagcgctgcaaaggccgcatccagaggcagctggagatcaccggcaggaccacgaccagtgaggagctggaggacatgctggagagtgggaaccccgccatctttgcctctgggatcatcatggactccagcatctcgaagcaggctctgagcgagattgagacgcggcacagtgagatcatcaagctggagaacagcatccgtgagctacacgacatgttcatggacatggccatgctcgtggagagccaggtgagtgccgggcccccctgccctccactccagcccacaccagcacccagggctgcactaacctcgccctttctgcccgacacgctgccctgccggggagggaccaagttctcagcctcagggtgctttcctgaagtcctgccccgagccccaacccaaccctgaggagggggccctctggagctcgggtgcccccggccccgcagggagagatgattgacaggatcgagtacaatgtggaacacgcggtagactatgtggagagggccgtgtctgacaccaagaaggccgtcaagtaccagagcaaggcgcgccggg

SEQ ID NO: 188462 - DNA, 783 bp, Homo sapiens
  Payload ID: 17079
  Gene Symbol: STX1A
  Gene Name: syntaxin 1A (brain)
  ENST ID: ENST00000395155
  CDS Start-End: 1-783
atgaaggaccgaacccaggagctccgcacggccaaggacagcgatgatgatgatgatgtcgctgtcaccgtggaccgagaccgcttcatggatgagttctttgagcaggtggaggagattcgaggcttcattgacaagatcgcagagaacgtggaggaggtgaagcggaagcacagtgccatcctggcatcccccaaccccgatgagaagacgaaggaggagctggaagaactcatgtccgacataaagaagacagcaaacaaagttcgttccaagttaaagagcatcgagcagtccatcgagcaagaggaaggcctgaaccgctcctccgctgacctgaggatccggaagacacagcactccacgctgtccagaaagtttgtggaggtcatgtcggagtacaacgccacgcagtccgactaccgcgagcgctgcaaaggccgcatccagaggcagctggagatcaccggcaggaccacgaccagtgaggagctggaggacatgctggagagtgggaaccccgccatctttgcctctgggatcatcatggactccagcatctcgaagcaggctctgagcgagattgagacgcggcacagtgagatcatcaagctggagaacagcatccgtgagctacacgacatgttcatggacatggccatgctcgtggagagccagcctcagggtgctttcctgaagtcctgccccgagccccaacccaaccctgaggagggggccctctggagctcgggtgcccccggccccgcagggagagatgattga

SEQ ID NO: 188463 - DNA, 2050 bp, Homo sapiens
  Payload ID: 17079
  Gene Symbol: STX1A
  Gene Name: syntaxin 1A (brain)
  Uniprot ID: Q16623
  ENST ID: ENST00000395156
  CDS Start-End: 29-784
agccggcgccgctgccactcccgggagcatgaaggaccgaacccaggagctccgcacggccaaggacagcgatgatgatgatgatgtcgctgtcaccgtggaccgagaccgcttcatggatgagttctttgagcaggtggaggagattcgaggcttcattgacaagatcgcagagaacgtggaggaggtgaagcggaagcacagtgccatcctggcatcccccaaccccgatgagaagacgaaggaggagctggaagaactcatgtccgacataaagaagacagcaaacaaagttcgttccaagttaaagagcatcgagcagtccatcgagcaagaggaaggcctgaaccgctcctccgctgacctgaggatccggaagacacagcactccacgctgtccagaaagtttgtggaggtcatgtcggagtacaacgccacgcagtccgactaccgcgagcgctgcaaaggccgcatccagaggcagctggagatcaccggcaggaccacgaccagtgaggagctggaggacatgctggagagtgggaaccccgccatctttgcctctgggatcatcatggactccagcatctcgaagcaggctctgagcgagattgagacgcggcacagtgagatcatcaagctggagaacagcatccgtgagctacacgacatgttcatggacatggccatgctcgtggagagccagactatgtggagagggccgtgtctgacaccaagaaggccgtcaagtaccagagcaaggcgcgccggaagaaaatcatgatcatcatctgctgtgtgatcctgggcatcgtcatcgcctccactgttgggggcatcttcgcctagaagccacccaaactgccactccactccaggtgggccactccaaggaggccctggctgctgccacctggctgggctgccctcccaacccccgcctctggctcagagcaccctccctcccggcccccatgctcccttctctgccatgggccctccgtccccgccccgtgtcgtgtgcatgatctctgtgagtgtgcgtctgtacgggaagaggcagagggaggcagccagcggggcgtgatgcagtgtgcacagcgaggagcagacccaggcagggccgccagggtgacacaggccacccttccttgccttcagtaactcggtgggcccaggttctgctcttccctggggaccctaacctcgcctccagctgacctgccctgtcctctccagctgtccccacaagcagagccctgaggggtggggaccagctggccacatggtgctgcttttcaggttaggggagaggtggccctgagggacagcccagctctgagtctcagtcgctgatcactgccagggaggctcaggctgccatggctccaggctccctcccctgcctaggggcaaagtccatcgggtcctgggcctcagcttcccttcccacattcctccggccccaggagcaaccccttgggctaggtctgaccccaggtgtccctctggaaggggctggctggtgccctatttccagccaccccagcagctagggaggcaaagcaggctgcagtcagtccctcaagccagcgttgcatgtttgggatggtggctcctgttgtcttgcgctctgggaagtcagatgtcatttcaggcctgcagtctcatcctgcccttgccatcctcccatcgatgtgccacgtgggtgtcacgtgtcccagatgcagtattcggcagccagccggggagggctacctcctcctcctcaccaccttggggcttctcatgggaaatgtgcccccgccccaggaccctctcccttgtggacaggcagggagatgcatgcgagtgcatgcagcaggggatggggccgtgtccgtgtgccccaccctccctcggctttactcctgcccagtgactgtgaccactgtccgtgttgccttcttgaacagcgattccccccaaccccttcaccaaaggtcttggtacaaccagctgcccattttgtgaaatttttatgtagaataaacatttgtatctgtaccag

SEQ ID NO: 188464 - DNA, 4664 bp, Homo sapiens
  Payload ID: 17080
  Gene Symbol: STX1B
  Gene Name: syntaxin 1B
  Uniprot ID: P61266
  ENST ID: ENST00000215095
  CDS Start-End: 233-1099
gtgccgcagccgcatcgccaccgcagcccggcagagccgagcccggcccaggcccctgcccctgcccggccctcggccagtcgcccccggccccgcccccgcccgcaggccccccgcagcggccgcggcgccccccggcgcccccagaccccggcctccggcacagaggcgggagacccggagcagcagcagaggcaggaggactaggaggaggaggaggagccgtcgcaggatgaaggatcggactcaagagctgcggagtgcgaaagacagtgatgatgaagaggaggtggtccacgtggatcgggaccacttcatggatgagttctttgaacaggtggaagagatccggggctgcattgagaaactgtcggaggatgtggagcaggtgaaaaaacagcatagcgccatcctggccgcacccaacccagatgagaagaccaaacaggagctggaggatctcactgcagacatcaagaagacggccaacaaggttcggtccaaattgaaagcgatcgagcaaagcattgaacaggaggaggggctgaaccgttcctccgcggacctgcgcatccgcaagacccagcactccacactgtcccggaagttcgtggaggtaatgaccgaatataacgcgacccagtccaagtaccgggaccgctgcaaggaccggatccagcggcaactggagatcactggaaggaccaccaccaacgaagaactggaagacatgctggagagcgggaagctggccatcttcacagatgacatcaaaatggactcacagatgacgaagcaggcgctgaatgagattgagacgaggcacaatgagatcatcaagctggagaccagcatccgcgagctgcacgatatgtttgtggacatggccatgctcgtagagagccagggagagatgattgaccgcatcgagtacaacgtggaacattctgtggactacgtggagcgagctgtgtctgacaccaagaaagcagtgaaatatcagagcaaggcccggaggaagaaaatcatgatcatcatttgctgtgtggtgctgggggtggtcttggcgtcatccattggggggacgctgggcttgtaggccccccccacccttctctctcccagacccttcccccaccacatcgggagcaatacccccaccacccctttcactccatcccctgctccaggctcactcccaaaacagacccaggcagccccacccccacggcagaccctggtgtccctggacctcaccgggccatggaccccccccccgtccccgcacgtagatcgcagcaggcgtgattacacatgcacaccaacatgcatgccgccggcacatgctcgagacgtgtggacaccccagcgtgcgtgtgcgtgtgatgtgtgtgatgcaccagagcaccccctccacccccaccttgggtgtgtgtgcgtggtctgagcttcccccttcaccggggctgttgtgtagactgcagccaagtgtaacacagcagtccatcacgccctctctgtcctctgtgaacagtgtgtgtgcgtgcgtgagaccacagatctgtggacacaccatttgtgtacgtggaattttgtgtttcagtgtttgaacctaatgcaacagcaacaaagccactgatacctgagccctttgtgtctgctacaaaccaggcaggtggtgtgtgtggactcacactcacattctcagaggatccagggaggcccaggtacacacaggccatggcagacaccccatgtctttgttaccccaggggctgtggcatgtcccaggagggtgtgcatgtgtgtgtgtgtgtgtgtgtgtgtgtccaggatgtgcctgaagtattgataggtcttctcagatagagccctccacactgtggactggacacctgttttgggagggcacagaaatgtgtatttcttgctacctagaatgcagctgtgtgtgtgtggcgtgcgtgtgtatgcacgtgtgtgtgtgtgttaggggctctctacatggtgtgctttttaatttttttttgttttttgttttttgtttttttcgagacggagtcttgctctgtcacccaggctggagtgcagtggcgcaatctcagctcactgcaacctgtgcctccctgacgcaagcgattctcatgcctcagcctcccaagtagctgggactacaggcgcctgccaccacgcctggctaattttagaattttagtagagatgaggttttgacatgttggccaggctggtctcgaactcctgacctcaggtgatccgcccactttggcctccctaagtgctggcattacaggcctgagccaccacgcctggcctacatgatgtgtttctgtcctgcctgacctacatggtgtgtttctgccctgcgtattacacacacacacacacacgtgcgtgcacacacacttctaaggacgtggccccatctggctttgtctctccagttgtccttgccctgcccccctccccagaggtgctgcccagtgctggtgtggccacacacggctacatcattgtgcaggcagagctccctgcctgcccagcctcagggctctgcatgctcacacctagatcctcatcttcctccatgtctctgcccagcatagccccgagcccctggaagctggtacccctcagtgtgctcacacgtggcaaggccgaggtggccccaggcaggggccataccaggcacaaaccatgcacgctggcatgggtgcggggatcacacgaatgcctcctggaaggaaagggctacttgtaggaatgttactgatgaggcaagatgccaaggacttccctgcagggatcaaagatcaggacacgaccccttcctcacacacccacctcagacctgggagaggactgtgtgtcccccactgccccatcggatgctctgggctctgcctcagggaactcgggtttggggaaatgtctatttcagaagtactggagtggccagtgtggcagtggccactcagggtgggctgggtcctgagacccatccccgacacctctcctgctgaaccctcaggctgctccccacaccagggtgtgactgaggggtacacaggcctggatttctggtgtgaggaaggggctagcacctcccctgttgtgtagccagcacaggcacaatttgtgggtttggtggcaggtaggtggtgcgtgggagaaaggacagtgttagaggtccccactccgtggtctaggatcatgaaaggtgaacacacaagtacacaaatgtgccatgccctggcatggggcttatgtgtgcacaggcaaggcactcggtgtgtgtgtgcggaccccagggtcccaggtcatgtgaagcgtacgtgtgtgtgcattgtatgtgtgtgtacattgtgtgtgcattgtgtgtgcatgtggccaaacagatgtgacctcccagaacacagtacccctccacctctacccgagctcagacagccgagctctcccttgtcctgtgtgtgtgtcagtgtggccacgtgcgtaaccccaggtgggctgtcctgagctgggggcctgcctgtcccttcccagaacgcccctctgcaggacaggaagtctgccccaagtctggccacggccctcctgctcccatctcgggctgcttgggagacatcagagcaggccccagcccccagtcccctcttccggccgcctggacaggacccccattcagcccaggtgtttccggaagtcccacggccttggggccacaggagaagggttgaagcgtggctggggcaccactccccccacctggagtggcattgggcccacagctgcccatctctgggcctcaggtggaccaggggatctctaagggtctgctgtgccctttctatgcgtcctccacatcctatgatgtgcctgcttgttggctgctgtctgtgtgcgtcctggcatgttgtctggaggctggtgtcttttgcatgttcttggacaaatgtgtgctacctgcccaggcgcctgcaaccattgagcccacatgtgccccacgtgtgccctgcgggtggtcccgggcctggccagggctcagtgctcctcttccccctcctccctgttcccacccctcatgaagcacactgcgtgtccatcccatgtacccgtgggtcgacacacgctcttgccacgccctgagcgtgtacacatgatgtgttctatgcattcaccctgccccccagcccgccctgcagaggacaagatgggtggccccggctccctttcccctaaccgcccctgcccgctgtgcagccgtgtgcgttggcgtgtgtttctgtgtcactggcgtgtcacgtgatgtagccgtgtttgctgacatgagcccctgcccccttctctgtttctccgttggtttctagagctctctccctccccttctcagaggggacaggactcctggggcctggctggggcccagagccaggccgccctctcctgttagccctcagagtcccatttctgttagccctcagagtcccatttctattggtgaccaacttgcaaatggataaaacacaggaaaatcctgccccccccttcctccctgcatgtcctgtccccagagccccccaccccaccctgggccaggtcaggccctgtgggacgggagaaatagcaaccaatccaacagcggg

SEQ ID NO: 188465 - DNA, 1208 bp, Homo sapiens
  Payload ID: 17080
  Gene Symbol: STX1B
  Gene Name: syntaxin 1B
  Uniprot ID: P61266
  ENST ID: ENST00000565419
  CDS Start-End: 1-834
atgaaggatcggactcaagagctgcggagtgcgaaagacagtgatgatgaagaggaggtggtccacgtggatcgggaccacttcatggatgagttctttgaacaggtggaagagatccggggctgcattgagaaactgtcggaggatgtggagcaggtgaaaaaacagcatagcgccatcctggccgcacccaacccagatgagaagaccaaacaggagctggaggatctcactgcagacatcaagaagacggccaacaaggttcggtccaaattgaaagcgatcgagcaaagcattgaacaggaggaggggctgaaccgttcctccgcggacctgcgcatccgcaagacccagcactccacactgtcccggaagttcgtggaggtaatgaccgaatataacgcgacccagtccaagtaccgggaccgctgcaaggaccggatccagcggcaactggagatcactggaaggaccaccaccaacgaagaactggaagacatgctggagagcgggaagctggccatcttcacagatgacatcaaaatggactcacagatgacgaagcaggcgctgaatgagattgagacgaggcacaatgagatcatcaagctggagaccagcatccgcgagctgcacgatatgtttgtggacatggccatgctcgtagagagccagggagagatgattgaccgcatcgagtacaacgtggaacattctgtggactacgtggagcgagctgtgtctgacaccaagaaagcagtgaaatatcagagcaaggcccggagggtgagcggggcaggcggcctgggggtaggcgggggagcccaaggctgagcccgggctgaggtgagtgatggcagcgggcgggaggccttatctctggctctgacctcttcctgtttctgttttctctcccctcttctccctgccaccctctgccctgtctgtccctgcatctgtccgtgtgtcgatctctctcactgtctgcctgtctcactcctctttctgctgcagaagaaaatcatgatcatcatttgctgtgtggtgctgggggtggtcttggcgtcatccattggggggacgctgggcttgtaggccccccccacccttctctctcccagacccttcccccaccacatcgggagcaatacccccaccacccctttcactccatcccctgctccaggctcactcccaaaacagaccca

SEQ ID NO: 188466 - DNA, 4178 bp, Homo sapiens
  Payload ID: 17080
  Gene Symbol: STX1B
  Gene Name: syntaxin 1B
  ENST ID: ENST00000569638
  CDS Start-End: 1-615
gccaacaaggttcggtccaaattgaaagcgatcgagcaaagcattgaacaggaggaggggctgaaccgttcctccgcggacctgcgcatccgcaagacccagcactccacactgtcccggaagttcgtggaggtaatgaccgaatataacgcgacccagtccaagtaccgggaccgctgcaaggaccggatccagcggcaactggagatcactggaaggaccaccaccaacgaagaactggaagacatgctggagagcgggaagctggccatcttcacagatgacatcaaaatggactcacagatgacgaagcaggcgctgaatgagattgagacgaggcacaatgagatcatcaagctggagaccagcatccgcgagctgcacgatatgtttgtggacatggccatgctcgtagagagccagggagagatgattgaccgcatcgagtacaacgtggaacattctgtggactacgtggagcgagctgtgtctgacaccaagaaagcagtgaaatatcagagcaaggcccggaggaagaaaatcatgatcatcatttgctgtgtggtgctgggggtggtcttggcgtcatccattggggggacgctgggcttgtaggccccccccacccttctctctcccagacccttcccccaccacatcgggagcaatacccccaccacccctttcactccatcccctgctccaggctcactcccaaaacagacccaggcagccccacccccacggcagaccctggtgtccctggacctcaccgggccatggaccccccccccgtccccgcacgtagatcgcagcaggcgtgattacacatgcacaccaacatgcatgccgccggcacatgctcgagacgtgtggacaccccagcgtgcgtgtgcgtgtgatgtgtgtgatgcaccagagcaccccctccacccccaccttgggtgtgtgtgcgtggtctgagcttcccccttcaccggggctgttgtgtagactgcagccaagtgtaacacagcagtccatcacgccctctctgtcctctgtgaacagtgtgtgtgcgtgcgtgagaccacagatctgtggacacaccatttgtgtacgtggaattttgtgtttcagtgtttgaacctaatgcaacagcaacaaagccactgatacctgagccctttgtgtctgctacaaaccaggcaggtggtgtgtgtggactcacactcacattctcagaggatccagggaggcccaggtacacacaggccatggcagacaccccatgtctttgttaccccaggggctgtggcatgtcccaggagggtgtgcatgtgtgtgtgtgtgtgtgtgtgtgtgtccaggatgtgcctgaagtattgataggtcttctcagatagagccctccacactgtggactggacacctgttttgggagggcacagaaatgtgtatttcttgctacctagaatgcagctgtgtgtgtgtggcgtgcgtgtgtatgcacgtgtgtgtgtgtgttaggggctctctacatggtgtgctttttaatttttttttgttttttgttttttgtttttttcgagacggagtcttgctctgtcacccaggctggagtgcagtggcgcaatctcagctcactgcaacctgtgcctccctgacgcaagcgattctcatgcctcagcctcccaagtagctgggactacaggcgcctgccaccacgcctggctaattttagaattttagtagagatgaggttttgacatgttggccaggctggtctcgaactcctgacctcaggtgatccgcccactttggcctccctaagtgctggcattacaggcctgagccaccacgcctggcctacatgatgtgtttctgtcctgcctgacctacatggtgtgtttctgccctgcgtattacacacacacacacacacgtgcgtgcacacacacttctaaggacgtggccccatctggctttgtctctccagttgtccttgccctgcccccctccccagaggtgctgcccagtgctggtgtggccacacacggctacatcattgtgcaggcagagctccctgcctgcccagcctcagggctctgcatgctcacacctagatcctcatcttcctccatgtctctgcccagcatagccccgagcccctggaagctggtacccctcagtgtgctcacacgtggcaaggccgaggtggccccaggcaggggccataccaggcacaaaccatgcacgctggcatgggtgcggggatcacacgaatgcctcctggaaggaaagggctacttgtaggaatgttactgatgaggcaagatgccaaggacttccctgcagggatcaaagatcaggacacgaccccttcctcacacacccacctcagacctgggagaggactgtgtgtcccccactgccccatcggatgctctgggctctgcctcagggaactcgggtttggggaaatgtctatttcagaagtactggagtggccagtgtggcagtggccactcagggtgggctgggtcctgagacccatccccgacacctctcctgctgaaccctcaggctgctccccacaccagggtgtgactgaggggtacacaggcctggatttctggtgtgaggaaggggctagcacctcccctgttgtgtagccagcacaggcacaatttgtgggtttggtggcaggtaggtggtgcgtgggagaaaggacagtgttagaggtccccactccgtggtctaggatcatgaaaggtgaacacacaagtacacaaatgtgccatgccctggcatggggcttatgtgtgcacaggcaaggcactcggtgtgtgtgtgcggaccccagggtcccaggtcatgtgaagcgtacgtgtgtgtgcattgtatgtgtgtgtacattgtgtgtgcattgtgtgtgcatgtggccaaacagatgtgacctcccagaacacagtacccctccacctctacccgagctcagacagccgagctctcccttgtcctgtgtgtgtgtcagtgtggccacgtgcgtaaccccaggtgggctgtcctgagctgggggcctgcctgtcccttcccagaacgcccctctgcaggacaggaagtctgccccaagtctggccacggccctcctgctcccatctcgggctgcttgggagacatcagagcaggccccagcccccagtcccctcttccggccgcctggacaggacccccattcagcccaggtgtttccggaagtcccacggccttggggccacaggagaagggttgaagcgtggctggggcaccactccccccacctggagtggcattgggcccacagctgcccatctctgggcctcaggtggaccaggggatctctaagggtctgctgtgccctttctatgcgtcctccacatcctatgatgtgcctgcttgttggctgctgtctgtgtgcgtcctggcatgttgtctggaggctggtgtcttttgcatgttcttggacaaatgtgtgctacctgcccaggcgcctgcaaccattgagcccacatgtgccccacgtgtgccctgcgggtggtcccgggcctggccagggctcagtgctcctcttccccctcctccctgttcccacccctcatgaagcacactgcgtgtccatcccatgtacccgtgggtcgacacacgctcttgccacgccctgagcgtgtacacatgatgtgttctatgcattcaccctgccccccagcccgccctgcagaggacaagatgggtggccccggctccctttcccctaaccgcccctgcccgctgtgcagccgtgtgcgttggcgtgtgtttctgtgtcactggcgtgtcacgtgatgtagccgtgtttgctgacatgagcccctgcccccttctctgtttctccgttggtttctagagctctctccctccccttctcagaggggacaggactcctggggcctggctggggcccagagccaggccgccctctcctgttagccctcagagtcccatttctgttagccctcagagtcccatttctattggtgaccaacttgcaaatggataaaacacaggaaaatcctgccccccccttcctccctgcatgtcctgtccccagagccccccaccccaccctgggccaggtcaggccctgtgggacgggagaaatagcaaccaatccaacagcg

SEQ ID NO: 188467 - DNA, 3331 bp, Homo sapiens
  Payload ID: 17081
  Gene Symbol: STX2
  Gene Name: syntaxin 2
  Uniprot ID: P32856
  ENST ID: ENST00000261653
  CDS Start-End: 168-1031
gcagagcgcgcggggcgcggttgccgtggcagcgccggctccagggagggctgctggcgccgggccgggaccgcggggcctgaggcggagaccggagagcccgaggcccggccggaggcagctcgggacaggcttgagcggcggggcgcgctgcccggccggcggggatgcgggaccggctgccagacctgacggcgtgtaggaagaatgatgatggagacacagttgttgtggttgagaaagatcatttcatggatgatttcttccatcaggtggaggagattagaaacagtattgataaaataactcaatatgttgaagaagtaaagaaaaaccacagcatcattctttctgcaccaaacccggaaggaaaaataaaagaagagcttgaagatctgaacaaagaaatcaagaaaactgcgaataaaattcgagccaagttaaaggctattgaacaaagttttgatcaggatgagagtgggaaccggacttcagtggatcttcggatacgaagaacccagcattcggtgctgtctcggaagtttgtggaagccatggcggagtacaatgaggcacagactctgtttcgggagcggagcaaaggccgcatccagcgccagctggagataactgggagaaccaccacagacgacgagctagaagagatgctggagagcgggaagccatccatcttcacttccgacattatatcagattcacaaattactagacaagctctcaatgaaatcgagtcacgtcacaaggacatcatgaagctggagaccagcatccgagagttgcatgagatgttcatggacatggctatgtttgtggagactcagggtgaaatgatcaacaacatagaaagaaatgttatgaatgccacagactatgtagaacacgctaaagaagaaacaaaaaaagctatcaaatatcagagcaaggcaagaaggaaattgatgttcattattatttgtgtaattgttttgcttgtgatccttggaattatcctagcaacaacattgtcctagcaaccatatcccaagagccatttatccttgagactcagaccacatctgcaaccaaatcagcatcctgtcatttcgtgaatgaatctcagacgctgtaacccggcatcgagtgctgaccttgtaatgtatgagttcacggaagaagcacaaccgaacgtcttgttcagtgacagcgccgtaagcacagtgggtgtgatgcgtgaccctgaatgacacactacagaatgtgagcagtgtgagacttctctcactggccttgaaataagaaaatattgaacattttaatattaaaaatatttcagtgttaacaaatgtgcatgaagtttaattaggaaggaatgctttatgttatgaaggcttttttttttttttttgagacggagtctcgctttgtcatccaggctggagtgcagtggtgcgatctcagctcactgcaacctcggcctcccgggttcaagcaattctcctgcctcagcctcccgagtagctgggattacaggcatgggccaccacacccagctaattttttgtgttttctttttagtagagacggggttttaccatgctggccaggctggcctcaaactcctgaccttgtgatccacccacctcagcctcccaaagtgctgggattacaggcgtgagtcaccgggcaggctgttctgaagcttttagatctcaggtctaaggcttcctttccctccctctcccagctagtttgtgctaattaagagaccttttatactgttttattgcctgtttgaagaaataatttttatcacgtttttgtaagatatctataattttaaatgtttataaattgtttaatttattagcatcttaatgtaccccatttttatatactgaatgtggccttttgagtgaaataggaagcttcatggtgttggagccacctttgtacagttgtttaaagtttcccattgtcacggaaaacattggctgcaaagcccctcaaagccctcaagtgccttctgtgagtttaaatgtgctggtgccctccagaaaagcctcggcctcagctccgtttccgcctgttccctcccccaggataatgaatggttactgcactgtaaagaccgtggtctcttttcactaaataggagattcgagtttcccagtttacatgaatgaagtctgaatttaagacggtgatgaaactgaggttcagtactctcgggactcgaggaaattattcctgagacatggagtaattcttacaaatttaaactattgtacagatccacatacatgttgttaagtacctaatgttttgctgaacttttaaaagttaatttccaaaatgtatagggattcatgataattaaacctttttattgctcatttttttagtagaagaatatcacttatttttagacttgtaaaatgtatgaactggtgagcggacatctgttaagagagtcactagtcagaatgttaaaggagtgcatgcaggatgccccaaatgtcgtgaactcttgttactcctgtatgtagtagtgtaagcatgtgacttttaacaccatttggtttgaaactaatgtagagatgcctgattccaaacaggtgtggagaatattgaatggctcagaagccgcgtcccttacttaacacaattccgaatctccctcatccatgatgcgtccattggatcactcgctggtggtcactgtgtggcagttactaggggaattctgcctctgactgttctttttcttttggtctttaaacaccctgtcgtgggatgtgctcactgatttgtggctatgttgaaggtatcacttgtcttgagggttttcaatatttcaggatcatgctggtggcaaaaggactccacgcctctgtggaatcatgtccacagggggacctgcctcccgtgatgtcccacctttccttcaaggtctgtcatatgagtcctccccttttacaacacttattatggtatttttcaagttattcttcttagatttgcagtacctactgaaatttgtgtttttatagttgaagttaggaaaatgctatttgatttgtatttagatatttaagtcacttgtccaatgatgtgtatgtctaagcctcatgtaccgatttgaagtcagacttaaaaatgtatttacagattcacttgagactttttaatcggttcttcaaatatttcatgtttacattaaaaatttccagagaagcataaaagtattcactttcctgccttgtcatttctggaaagattttggggagatattttattgcatattaattaataaattgttctactaggaaaa

SEQ ID NO: 188468 - DNA, 661 bp, Homo sapiens
  Payload ID: 17081
  Gene Symbol: STX2
  Gene Name: syntaxin 2
  ENST ID: ENST00000344271
  CDS Start-End: 1-337
tggagacacagttgttgtggttgagaaagatcatttcatggatgatttcttccatcaggtggaggagattagaaacagtattgataaaataactcaatatgttgaagaagtaaagaaaaaccacagcatcattctttctgcaccaaacccggaaggaaaaataaaagaagagcttgaagatctgaacaaagaaatcaagaaaactgcgaataaaattcgagccaagttaaagggtttcagatgtgtgcagaagcagagagaggcgaccacaagccgaccccccagctccacagttctccatgagctcccacccgcacccgctcccagactattctgaagcccatcccaggcatctgagatttcatcactattgaacaaagttttgatcaggatgagagtgggaaccggacttcagtggatcttcggatacgaagaacccagcattcggtgctgtctcggaagtttgtggaagccatggcggagtacaatgaggcacagactctgtttcgggagcggagcaaaggccgcatccagcgccagctggagataactgggagaaccaccacagacgacgagctagaagagatgctggagagcgggaagccatccatcttcacttccgacattatatcagattcacaaattactagacaagctctca

SEQ ID NO: 188469 - DNA, 2151 bp, Homo sapiens
  Payload ID: 17081
  Gene Symbol: STX2
  Gene Name: syntaxin 2
  Uniprot ID: P32856
  ENST ID: ENST00000392373
  CDS Start-End: 96-962
gcggggcctgaggcggagaccggagagcccgaggcccggccggaggcagctcgggacaggcttgagcggcggggcgcgctgcccggccggcggggatgcgggaccggctgccagacctgacggcgtgtaggaagaatgatgatggagacacagttgttgtggttgagaaagatcatttcatggatgatttcttccatcaggtggaggagattagaaacagtattgataaaataactcaatatgttgaagaagtaaagaaaaaccacagcatcattctttctgcaccaaacccggaaggaaaaataaaagaagagcttgaagatctgaacaaagaaatcaagaaaactgcgaataaaattcgagccaagttaaaggctattgaacaaagttttgatcaggatgagagtgggaaccggacttcagtggatcttcggatacgaagaacccagcattcggtgctgtctcggaagtttgtggaagccatggcggagtacaatgaggcacagactctgtttcgggagcggagcaaaggccgcatccagcgccagctggagataactgggagaaccaccacagacgacgagctagaagagatgctggagagcgggaagccatccatcttcacttccgacattatatcagattcacaaattactagacaagctctcaatgaaatcgagtcacgtcacaaggacatcatgaagctggagaccagcatccgagagttgcatgagatgttcatggacatggctatgtttgtggagactcagggtgaaatgatcaacaacatagaaagaaatgttatgaatgccacagactatgtagaacacgctaaagaagaaacaaaaaaagctatcaaatatcagagcaaggcaagaaggaaaaagtggataattattgctgtgtcagtggttctggttgccataatcgctctaattattggcttgtcagttggcaaatgatggtgtggataacgtcagtgtgcatgcctctctgccagggtgggaaaattgatgttcattattatttgtgtaattgttttgcttgtgatccttggaattatcctagcaacaacattgtcctagcaaccatatcccaagagccatttatccttgagactcagaccacatctgcaaccaaatcagcatcctgtcatttcgtgaatgaatctcagacgctgtaacccggcatcgagtgctgaccttgtaatgtatgagttcacggaagaagcacaaccgaacgtcttgttcagtgacagcgccgtaagcacagtgggtgtgatgcgtgaccctgaatgacacactacagaatgtgagcagtgtgagacttctctcactggccttgaaataagaaaatattgaacattttaatattaaaaatatttcagtgttaacaaatgtgcatgaagtttaattaggaaggaatgctttatgttatgaaggcttttttttttttttttgagacggagtctcgctttgtcatccaggctggagtgcagtggtgcgatctcagctcactgcaacctcggcctcccgggttcaagcaattctcctgcctcagcctcccgagtagctgggattacaggcatgggccaccacacccagctaattttttgtgttttctttttagtagagacggggttttaccatgctggccaggctggcctcaaactcctgaccttgtgatccacccacctcagcctcccaaagtgctgggattacaggcgtgagtcaccgggcaggctgttctgaagcttttagatctcaggtctaaggcttcctttccctccctctcccagctagtttgtgctaattaagagaccttttatactgttttattgcctgtttgaagaaataatttttatcacgtttttgtaagatatctataattttaaatgtttataaattgtttaatttattagcatcttaatgtaccccatttttatatactgaatgtggccttttgagtgaaataggaagcttcatggtgttggagccacctttgtacagttgtttaaagtttcccattgtcacggaaaacattggctgcaaagcccctcaaagccctcaagtgccttctgtgagtttaaatgtgctggtgccctccagaaaagcctcggcctcagctccgtttccgcctgttccctccccc

SEQ ID NO: 188470 - DNA, 3231 bp, Homo sapiens
  Payload ID: 17082
  Gene Symbol: STX3
  Gene Name: syntaxin 3
  ENST ID: ENST00000300150
  CDS Start-End: 576-1352
agggtgacagatcgctataaactggtcataagccatgactaccagcaggacacaatcagccccacccaagaagacaaagaaaaacatctgggtgccacatcccgtgatggaaacaggagttttgcccattgaaaggaggtttgccaaggccaatggggtgatggaagatgtatagaagatttctagaactgccagattagccaggaaaaagtacatgggggtgtggagggaatgattgatctgaacaatgactgcaattgtagcatttccaccgaggctggtcagatacatcatcaggaagaccacaaaaatcagcatctggacctcagggtcaggtctaatggaagaggaaaaccagaggggagtggtacacttccacttccacttcttttcaacagacctggtggtggcttcctttataattgtggccttgatgttgcaccaagaagccttgttggacacttcacctttgggcccacagtctggcaagatcccttcctccatattccaataagcagctgacacaggatgatgatactgatgcggttgagattgctatcgacaacacggcttttatggacgagttcttttctgagattgaggaaactcggcttaacattgacaagatctcagaacatgtagaggaggctaagaaactctacagtatcattctctctgcaccgattccagagccaaaaaccaaggatgacctagagcagctcacgactgagattaagaaaagggccaacaacgtccggaacaaactgaagagcatggagaagcatattgaagaagatgaggtcaggtcatcggcagaccttcggattcggaaatcccagcactctgtcctttctcggaagtttgtggaggtgatgaccaaatacaatgaagctcaagtggacttccgagaacgcagcaaagggcgaatccagcggcagctcgaaattactggcaaaaagacaaccgatgaggagctggaggagatgttggagagtggcaacccggccatcttcacttctgggatcattgactcacagatttccaagcaagccctcagtgagattgagggacgacacaaggacattgtgaggctggagagcagcatcaaggagcttcacgacatgtttatggacatcgccatgctggtggagaatcagggtgagatgttagataacatagagttgaatgtcatgcacacagtggaccacgtggagaaggcacgagatgaaacgaaaaaagctgtgaaataccagagtcaggcccggaagaaattgataattatcattgtgctagtagttgtgttgctgggcattttagcattgattattggactttccgttgggctgaattaagagtggcctaagaggctgctgcactgaaataaactgatttcactccagactggtgtggccacccttgtcttcagatgagaatggagtctgaatggccttcctgagagcgagtgcgacccgttcctttgtttccttgcaaccacccttggacctgactcagctaacaatctagccctgggggaatgtgatctacctgatgcgaccctgagttctccccagagcctcctcctgccccaccagctctcaagtaccttttctcctggactgtgtggacccacccagctttcttcctccctgttgtgtgtcagattatgccttgcacttgggaaagctcttgtgagactctcccaaggtgctgtatttttctacctcatggagtattctcccagaaactgcaatgtatttttttaggggagtatctttaacaaagcagaatgattcttctaagtttggcaacaagaaggcttggatctgagtcttctacctggcaggatgccaatcctgtttgttgtccgtatgtcctgaaaacatgagggactggcagatgtcattttggtctaaagagctgacttgtttgaaattcagccttaaattaagctcttagttgttcagcttggggggcaactttgatttttctctgtgttgtagtctctcatatttactcaaggagggaccaggatgatacagtcatctgaggttatgctttgcaaaaggctgacggtatggaatatgtttccatgtctgagtcttagaaactggctgctcattgttagaaagtgatgctttgtgagactattgtcttggggccaaaaataatcagggattttaaattgggcaagggacaaggtgctagaatcctaagctctggaaatatttcatgacactggtgtattcactcatgtgttccagatgtattctaattgtgtatgaaatgtatgtacacataagtgtgtgtgtctcaggaagtaggaaataaaaatggaagctattatgacctcaaaaaaaaaaagccaactttgagctaggataaaaattgggtaaaggacatttgcttacctgcaaatgaatcactgtggaaatgtgatcttcccatatcatcaagaaacttgttttctggatgaatactgggagaataaaatgagaactctggagtgagctaaattgatcccaattaagtttttctgcttagcagacagaaggtataattttttgacaccctttcccacctggtgcctatgctaggcttgtcctgagaacatccctcagtaacttgatattcacatgacctacaggatgtcccatctgcagggctgagtcagttggggaacaccagaggctacacagtagctcttcctgctactcggttaatgagcttggcaggttctttgtctcactgaattcttatcatggaaacagcagcagcagccgctaggaaatcttcaagtgtagtgtctgtgctaacccagtggtaaatcccttagatcccctgctggtctctggcagtctccttgattttgggtaccatgtatattttccgctttgactttaacgctttctaggatagggtaagcacccttaattcaggcactgtccattagcttcctttgcaaaggctacttatggccggtcacaatccagcactcagacagagccaaggcaatatcctcttgcccatggctatgatgtcagacagtggatgggctccagcaacaagagacaaaataactaaaggcctttgctctcctctgacattgaggcctggggcttacagtttggaatacaacatgtgaaggtttttgttgttgtttgtattttttagatgtaaacttgattattttattgctaatttaaaaataaaaatgactttgtattgattgtg

SEQ ID NO: 188471 - DNA, 3299 bp, Homo sapiens
  Payload ID: 17082
  Gene Symbol: STX3
  Gene Name: syntaxin 3
  Uniprot ID: Q13277
  ENST ID: ENST00000337979
  CDS Start-End: 548-1417
agcttgtccccgcctagcaaggagtcggctaagaactggatcctagcgaggagcccggcacagacagcgaatgaccgcagccagacagtcgctcttgctcttcctcggccctgcggcaggatccgccggtgcaggggcctctccccggactccacgcgtgtctggagggctctcgggttagggaagggggctttggagacgccccgggcggccgggcggtggcgggacgcgggccctttaagaaggagcgaggggcgcggccaggtaggggcgggtccagggcggatcagcgctgcgccggcgccggcccgggagccggatttggagcgcgaggcgccggtgggggcggagggggctgcgcggcggaggctcccgtggcctcggacgctcctcctagctagcggccgccgcccgccgccgcctgcgcctccagctccttcgccccggcgggcccggccgccgcttccggcagctcacctgggaagcgctcacctgggacgcgctcacctgggacgcgctacctgcctccgggcgcctgggcttcaggatgaaggaccgtctggagcagctgaaggccaagcagctgacacaggatgatgatactgatgcggttgagattgctatcgacaacacggcttttatggacgagttcttttctgagattgaggaaactcggcttaacattgacaagatctcagaacatgtagaggaggctaagaaactctacagtatcattctctctgcaccgattccagagccaaaaaccaaggatgacctagagcagctcacgactgagattaagaaaagggccaacaacgtccggaacaaactgaagagcatggagaagcatattgaagaagatgaggtcaggtcatcggcagaccttcggattcggaaatcccagcactctgtcctttctcggaagtttgtggaggtgatgaccaaatacaatgaagctcaagtggacttccgagaacgcagcaaagggcgaatccagcggcagctcgaaattactggcaaaaagacaaccgatgaggagctggaggagatgttggagagtggcaacccggccatcttcacttctgggatcattgactcacagatttccaagcaagccctcagtgagattgagggacgacacaaggacattgtgaggctggagagcagcatcaaggagcttcacgacatgtttatggacatcgccatgctggtggagaatcagggtgagatgttagataacatagagttgaatgtcatgcacacagtggaccacgtggagaaggcacgagatgaaacgaaaaaagctgtgaaataccagagtcaggcccggaagaaattgataattatcattgtgctagtagttgtgttgctgggcattttagcattgattattggactttccgttgggctgaattaagagtggcctaagaggctgctgcactgaaataaactgatttcactccagactggtgtggccacccttgtcttcagatgagaatggagtctgaatggccttcctgagagcgagtgcgacccgttcctttgtttccttgcaaccacccttggacctgactcagctaacaatctagccctgggggaatgtgatctacctgatgcgaccctgagttctccccagagcctcctcctgccccaccagctctcaagtaccttttctcctggactgtgtggacccacccagctttcttcctccctgttgtgtgtcagattatgccttgcacttgggaaagctcttgtgagactctcccaaggtgctgtatttttctacctcatggagtattctcccagaaactgcaatgtatttttttaggggagtatctttaacaaagcagaatgattcttctaagtttggcaacaagaaggcttggatctgagtcttctacctggcaggatgccaatcctgtttgttgtccgtatgtcctgaaaacatgagggactggcagatgtcattttggtctaaagagctgacttgtttgaaattcagccttaaattaagctcttagttgttcagcttggggggcaactttgatttttctctgtgttgtagtctctcatatttactcaaggagggaccaggatgatacagtcatctgaggttatgctttgcaaaaggctgacggtatggaatatgtttccatgtctgagtcttagaaactggctgctcattgttagaaagtgatgctttgtgagactattgtcttggggccaaaaataatcagggattttaaattgggcaagggacaaggtgctagaatcctaagctctggaaatatttcatgacactggtgtattcactcatgtgttccagatgtattctaattgtgtatgaaatgtatgtacacataagtgtgtgtgtctcaggaagtaggaaataaaaatggaagctattatgacctcaaaaaaaaaaagccaactttgagctaggataaaaattgggtaaaggacatttgcttacctgcaaatgaatcactgtggaaatgtgatcttcccatatcatcaagaaacttgttttctggatgaatactgggagaataaaatgagaactctggagtgagctaaattgatcccaattaagtttttctgcttagcagacagaaggtataattttttgacaccctttcccacctggtgcctatgctaggcttgtcctgagaacatccctcagtaacttgatattcacatgacctacaggatgtcccatctgcagggctgagtcagttggggaacaccagaggctacacagtagctcttcctgctactcggttaatgagcttggcaggttctttgtctcactgaattcttatcatggaaacagcagcagcagccgctaggaaatcttcaagtgtagtgtctgtgctaacccagtggtaaatcccttagatcccctgctggtctctggcagtctccttgattttgggtaccatgtatattttccgctttgactttaacgctttctaggatagggtaagcacccttaattcaggcactgtccattagcttcctttgcaaaggctacttatggccggtcacaatccagcactcagacagagccaaggcaatatcctcttgcccatggctatgatgtcagacagtggatgggctccagcaacaagagacaaaataactaaaggcctttgctctcctctgacattgaggcctggggcttacagtttggaatacaacatgtgaaggtttttgttgttgtttgtattttttagatgtaaacttgattattttattgctaatttaaaaataaaaatgactttgtattgattgtgaaa

SEQ ID NO: 188472 - DNA, 615 bp, Homo sapiens
  Payload ID: 17082
  Gene Symbol: STX3
  Gene Name: syntaxin 3
  ENST ID: ENST00000528805
  CDS Start-End: 1-615
atctcagaacatgtagaggaggctaagaaactctacagtatcattctctctgcaccgattccagagccaaaaaccaaggatgacctagagcagctcacgactgagattaagaaaagggccaacaacgtccggaacaaactgaagagcatggagaagcatattgaagaagatgaggtcaggtcatcggcagaccttcggattcggaaatcccagcactctgtcctttctcggaagtttgtggaggtgatgaccaaatacaatgaagctcaagtggacttccgagaacgcagcaaagggcgaatccagcggcagctcgaaattactggcaaaaagacaaccgatgaggagctggaggagatgttggagagtggcaacccggccatcttcacttctgggatcattgactcacagatttccaagcaagccctcagtgagattgagggacgacacaaggacattgtgaggctggagagcagcatcaaggagcttcacgacatgtttatggacatcgccatgctggtggagaatcagaaattgataattatcattgtgctagtagttgtgttgctgggcattttagcattgattattggactttccgttgggctgaattaa

SEQ ID NO: 188473 - DNA, 1571 bp, Homo sapiens
  Payload ID: 17082
  Gene Symbol: STX3
  Gene Name: syntaxin 3
  Uniprot ID: Q13277
  ENST ID: ENST00000529177
  CDS Start-End: 155-988
ctagctagcggccgccgcccgccgccgcctgcgcctccagctccttcgccccggcgggcccggccgccgcttccggcagctcacctgggaagcgctcacctgggacgcgctcacctgggacgcgctacctgcctccgggcgcctgggcttcaggatgaaggaccgtctggagcagctgaaggccaagcagctgacacaggatgatgatactgatgcggttgagattgctatcgacaacacggcttttatggacgagttcttttctgagattgaggaaactcggcttaacattgacaagatctcagaacatgtagaggaggctaagaaactctacagtatcattctctctgcaccgattccagagccaaaaaccaaggatgacctagagcagctcacgactgagattaagaaaagggccaacaacgtccggaacaaactgaagagcatggagaagcatattgaagaagatgaggtcaggtcatcggcagaccttcggattcggaaatcccagcactctgtcctttctcggaagtttgtggaggtgatgaccaaatacaatgaagctcaagtggacttccgagaacgcagcaaagggcgaatccagcggcagctcgaaattactggcaaaaagacaaccgatgaggagctggaggagatgttggagagtggcaacccggccatcttcacttctgggatcattgactcacagatttccaagcaagccctcagtgagattgagggacgacacaaggacattgtgaggctggagagcagcatcaaggagcttcacgacatgtttatggacatcgccatgctggtggagaatcagggtgagatgttagataacatagagttgaatgtcatgcacacagtggaccacgtggagaaggcacgagatgaaacgaaaaaagctgtgaaataccagagtcaggcccggaagaaactgatttcactccagactggtgtggccacccttgtcttcagatgagaatggagtctgaatggccttcctgagagcgagtgcgacccgttcctttgtttccttgcaaccacccttggacctgactcagctaacaatctagccctgggggaatgtgatctacctgatgcgaccctgagttctccccagagcctcctcctgccccaccagctctcaagtaccttttctcctggactgtgtggacccacccagctttcttcctccctgttgtgtgtcagattatgccttgcacttgggaaagctcttgtgagactctcccaaggtgctgtatttttctacctcatggagtattctcccagaaactgcaatgtatttttttaggggagtatctttaacaaagcagaatgattcttctaagtttggcaacaagaaggcttggatctgagtcttctacctggcaggatgccaatcctgtttgttgtccgtatgtcctgaaaacatgagggactggcagatgtcattttggtctaaagagctgacttgtttgaaattcagccttaaattaagctcttagttgttcagcttggggggcaactttgatttttctctgtgttgtagtctctcatattta

SEQ ID NO: 188474 - DNA, 534 bp, Homo sapiens
  Payload ID: 17082
  Gene Symbol: STX3
  Gene Name: syntaxin 3
  ENST ID: ENST00000530221
  CDS Start-End: 1-231
atgtttatggacatcgccatgctggtggagaatcagggtgagatgttagataacatagagttgaatgtcatgcacacagtggaccacgtggagaaggcacgagatgaaacgaaaaaagctgtgaaataccagagtcaggcccggaagaaattgataattatcattgtgctagtagttgtgttgctgggcattttagcattgattattggactttccgttgggctgaattaagagtggcctaagaggctgctgcactgaaattgtgtctcttcttattcctcctccttccatgtgaccaggggatctaaaagtcagcttattacagcattgagcattcaacttcatcttgaaagataagcaacagtgagatgaacaacctctcatagacaggtggttggttgattttttttttcccctcttttttctggcacttggagtctagcccttgacttttttgtatgtgaactttaaattttggtttggctctgaacaatctgattgaaatagatgttgaaattttaaaaagatataaga

SEQ ID NO: 188475 - DNA, 1024 bp, Homo sapiens
  Payload ID: 17082
  Gene Symbol: STX3
  Gene Name: syntaxin 3
  ENST ID: ENST00000533637
  CDS Start-End: 231-362
ggatttggagcgcgaggcgccggtgggggcggagggggctgcgcggcggaggctcccgtggcctcggacgctcctcctagctagcggccgccgcccgccgccgcctgcgcctccagctccttcgccccggcgggcccggccgccgcttccggcagctcacctgggaagcgctcacctgggacgcgctcacctgggacgcgctacctgcctccgggcgcctgggcttcaggatgaaggaccgtctggagcagctgaaggccaagcagctgacacaggatgatgatactgatgcggttgagattgctatcgacaacacggcttttatggacgagttcttttctgagaaaccaaggatgacctagagcagctcacgactgagattaagaaaagggccaacaacgtccggaacaaactgaagagcatggagaagcatattgaagaagatgaggtcaggtcatcggcagaccttcggattcggaaatcccagcactctgtcctttctcggaagtttgtggaggtgatgaccaaatacaatgaagctcaagtggacttccgagaacgcagcaaagggcgaatccagcggcagctcgaaattactggcaaaaagacaaccgatgaggagctggaggagatgttggagagtggcaacccggccatcttcacttctgggatcattgactcacagatttccaagcaagccctcagtgagattgagggacgacacaaggacattgtgaggctggagagcagcatcaaggagcttcacgacatgtttatggacatcgccatgctggtggagaatcagggatccatgattgaccgtattgagaacaacatggaccagtcagtgggctttgtggagcgggccgtggcagataccaaaaaggctgtcaagtatcagagtgaagcccggaggaaactgatttcactccagactggtgtggccacccttgtcttcagatgagaatggagtctgaatggccttcctgagagcgagtgcgacccgttcctttgtttccttgca

SEQ ID NO: 188476 - DNA, 3111 bp, Homo sapiens
  Payload ID: 17082
  Gene Symbol: STX3
  Gene Name: syntaxin 3
  ENST ID: ENST00000633708
  CDS Start-End: 209-1072
gtgggggcggagggggctgcgcggcggaggctcccgtggcctcggacgctcctcctagctagcggccgccgcccgccgccgcctgcgcctccagctccttcgccccggcgggcccggccgccgcttccggcagctcacctgggaagcgctcacctgggacgcgctcacctgggacgcgctacctgcctccgggcgcctgggcttcaggatgaaggaccgtctggagcagctgaaggccaagcagctgacacaggatgatgatactgatgcggttgagattgctatcgacaacacggcttttatggacgagttcttttctgagattgaggaaactcggcttaacattgacaagatctcagaacatgtagaggaggctaagaaactctacagtatcattctctctgcaccgattccagagccaaaaaccaaggatgacctagagcagctcacgactgagattaagaaaagggccaacaacgtccggaacaaactgaagagcatggagaagcatattgaagaagatgaggtcaggtcatcggcagaccttcggattcggaaatcccagcactctgtcctttctcggaagtttgtggaggtgatgaccaaatacaatgaagctcaagtggacttccgagaacgcagcaaagggcgaatccagcggcagctcgaaattactggcaaaaagacaaccgatgaggagctggaggagatgttggagagtggcaacccggccatcttcacttctgggatcattgactcacagatttccaagcaagccctcagtgagattgagggacgacacaaggacattgtgaggctggagagcagcatcaaggagcttcacgacatgtttatggacatcgccatgctggtggagaatcagggatccatgattgaccgtattgagaacaacatggaccagtcagtgggctttgtggagcgggccgtggcagataccaaaaaggctgtcaagtatcagagtgaagcccggaggaagaagatcatgatcatgatctgctgtattatccttgcgatcatcttagcttccaccattgggagcatatttgcctgaaaaagattgatcgactggcatttctaatcctccttccacttctgtggtaccatcacttctccacgcagactcctcatcagcttctcctctttccattatgaaacttcttaagaaacagggcaccaatcaactacttattaagaattatgcaaagaataaacgtatacagaattgggcggaggacagggacagggagtacagatacatagctgattaggcagatggtttaaaggaggactgcagggtagagaagcaagcagagtgggcgcctctttaggaagtgacacagcctgcatgtgcagtatggctgtgaaggggcagatatcatagcacacctaactcaacaggatcttacttgaactgctgtgagttggtcaagtcagggcacttctgctcttcaggctcctctaggtcacacctttgaccaccctacatctgtttcctctttcaggctccagtagtagtcttaaaagtgaagtttatctaaggataagcacatgcctatcttgctcactgctgtgtccccactttttagcacagcgcctgctgcttacaggtactcaaatatctgctgacttaattacttataattaagctcttatttcagtcatggacaaatccttgggtttgactcctaaactctttaaggtaccaatgagaacgtggtttgttactgtcagaggctgtgtaaagccgcttgggaatgggctgatctgcttatgcaaaaatgctaccaacctttcaaaccccattaccacaacatgaaaatttaaagtgctttttctatgggtggtgatggtggagttctagcaacagcctcttaatctgtggagaagatggctggctccaggactgtggttcaataacgaaatacaggcccacaaaataaaataggtttatagcatgactgaactcacacatcagtagaacactctgtgaaccataacaaagaacagataaaggtgtcaagtgagaaaggtgaaatgaggttatcactcacttcacctctcacctgatttgtgttgctagctgaaactgctggccagtaacgtatgtataagaaactgttataggccgggcacggtggctcatgcctgtaatcacagcactttgggaggccaaggcaggtggatcaccagactgaccaacatagtgaaaccccctctctacaaaaaatacaaaaattagccaggcatggtggcttgcacctgtattcccagctacttgggaggctgaggcaggagaattgcttgaatgcaagaggcggaagttgcagtgagccgagatcgcgccactgcactccagcctgggcaacaagagctaaattccatctaaaaaaaaaaaaaaaacaaaaaaaaaaaactgttcttaatacttaatactgtccccaattccattcaaggttcagttgtgttcagctttaaaaccagctatgtgaatgtgagttctagtgcagattatttagtgattatgtaactaaaattgatgaaaaaatcacactatacaactgtgaggagcacacaactgctaagtttgtacttttgaaagtaaattattctttgtttgataccttattttttaagaaagtgggattaaaaatattttggtcagtgctgttttctacccaccttcaaaagccaatggtttgatatttctattaatttgtgcttcctttagttttaataggggatagaagactgcagctggttgggtctggaaaacattaatctgggcaaacggagctggagctatgaggatctgagtcctagggggccctcattcactagcagtaagaatttaagtggtgcatggcacatagcactgtactagattctgcaggggcacaaacatagagccaaacactctccctcttggagaatttcagacccagaaaaggccacgcagttctaacttttgtcatcggttccttttgctaaaaggcaaagggtatgttccttgcctattgtccaacataccccttccaagattgtgagaagatgggtagctgggcatcaataaatattgaatcaattgaccta

SEQ ID NO: 188477 - DNA, 1481 bp, Homo sapiens
  Payload ID: 17083
  Gene Symbol: STX4
  Gene Name: syntaxin 4
  Uniprot ID: Q12846
  ENST ID: ENST00000313843
  CDS Start-End: 316-1209
cccagcctcgggcaaggaagagacgcgaccatgtgcgcatgccccgaatttatcacggaggggcggggctgaggctgcgggagctggagcggggaagaaaagggaattccaacctgtggaaccttggggggtccccggggtcggcgccttcccattgactgtgggcggtgcaagggacggagcctctggcggctcgtgggggtgttggggtccgcagggggagggaggggagtgtcagagtgtgagcggggtacgggaattccaaatttgagggcctcccggctctggcgccggggagggagagctcaggccgccatgcgggacaggacccacgagctgagacagggggatgacagctcggacgaagaggacaaggagcgggtcgcgctggtggtgcacccgggcacggcacggctggggagcccggacgaggagttcttccacaaggtccggacaattcggcagactattgtcaaactggggaataaagtccaggagttggagaaacagcaggtcaccatcctggccacgccccttcccgaggagagcatgaagcaggagctgcagaacctgcgcgatgagatcaaacagctggggagggagatccgcctgcagctgaaggccatagagccccagaaggaggaagctgatgagaactataactccgtcaacacaagaatgagaaaaacccagcatggggtcctgtcccagcaattcgtggagctcatcaacaagtgcaattcaatgcagtccgaataccgggagaagaacgtggagcggattcggaggcagctgaagatcaccaatgctgggatggtgtctgatgaggagttggagcagatgctggacagtgggcaaagcgaggtgtttgtgtccaatatcctgaaggacacgcaggtgactcgacaggccttaaatgagatctcggcccggcacagtgagatccagcagcttgaacgcagtattcgtgagctgcacgacatattcacttttctggctaccgaagtggagatgcagggggagatgatcaatcggattgagaagaacatcctgagctcagcggactacgtggaacgtgggcaggagcacgtcaagacggccctggagaaccagaagaaggcgaggaagaagaaagtcttgattgccatctgtgtgtccatcaccgtcgtcctcctagcagtcatcattggcgtcacagtggttggataatgtcgcacattgttggcactaggagcaccaggaacccagggcctggccttctctcccagcagcctggggggcagggcagagcctccagtcggaccccttcctcacactggcccctatgcagaagggcagacagttcttctggggttggcagctgctcattcatgatggcctcctccttcaggcctcaatgcctgggggaggcctgcactgtcctgattggccgggacacacggttttgtaaaaaattaaaaaacaaaaaaagagcatagaaa

SEQ ID NO: 188478 - DNA, 1498 bp, Homo sapiens
  Payload ID: 17083
  Gene Symbol: STX4
  Gene Name: syntaxin 4
  Uniprot ID: Q12846
  ENST ID: ENST00000394998
  CDS Start-End: 344-1231
acccactgcctcgaaaggcctctgggggtggtcggcgcgcccctccccacctcgcgggggccgtgtgggcgtcgctcggtcgttggggtgccggggacgtcgtgatgagaacggcgtcccagagacggcggtgacagagccgggacacgtgacagtcacagggtcacattctgcggtccacgagtttgggaccgggctggtcacgtgacgcgatttccgttggaagatgcaacggttccggtgacggtagcaagttctcgcgtccaggcatctccgcttccgctcggggcgcaacaacttccgactccaccttcccagcctcgggcaaggaagagacgcgaccatggggatgacagctcggacgaagaggacaaggagcgggtcgcgctggtggtgcacccgggcacggcacggctggggagcccggacgaggagttcttccacaagccctctcggtcaccctccccaggtccggacaattcggcagactattgtcaaactggggaataaagtccaggagttggagaaacagcaggtcaccatcctggccacgccccttcccgaggagagcatgaagcaggagctgcagaacctgcgcgatgagatcaaacagctggggagggagatccgcctgcagctgaaggccatagagccccagaaggaggaagctgatgagaactataactccgtcaacacaagaatgagaaaaacccagcatggggtcctgtcccagcaattcgtggagctcatcaacaagtgcaattcaatgcagtccgaataccgggagaagaacgtggagcggattcggaggcagctgaagatcaccaatgctgggatggtgtctgatgaggagttggagcagatgctggacagtgggcaaagcgaggtgtttgtgtccaatatcctgaaggacacgcaggtgactcgacaggccttaaatgagatctcggcccggcacagtgagatccagcagcttgaacgcagtattcgtgagctgcacgacatattcacttttctggctaccgaagtggagatgcagggggagatgatcaatcggattgagaagaacatcctgagctcagcggactacgtggaacgtgggcaggagcacgtcaagacggccctggagaaccagaagaaggcgaggaagaagaaagtcttgattgccatctgtgtgtccatcaccgtcgtcctcctagcagtcatcattggcgtcacagtggttggataatgtcgcacattgttggcactaggagcaccaggaacccagggcctggccttctctcccagcagcctggggggcagggcagagcctccagtcggaccccttcctcacactggcccctatgcagaagggcagacagttcttctggggttggcagctgctcattcatgatggcctcctccttcaggcctcaatgcctgggggaggcctgcactgtcctgattggccgggacacacggttttgtaaaaaattaaaaaacaaaaaaagagcat

SEQ ID NO: 188479 - DNA, 571 bp, Homo sapiens
  Payload ID: 17083
  Gene Symbol: STX4
  Gene Name: syntaxin 4
  ENST ID: ENST00000457779
  CDS Start-End: 46-571
gagatttctgccttggctgaggtcccatgatgctgacagccccaaatgctaagtcgtcagtccgcccacgccctggacccgaaagcaataaaggcgagatttccgttggaagatgcaacggttccggtgacggtagcaagttctcgcgtccaggcatctccgcttccgctcggggcgcaacaacttccgactccaccttcccagcctcgggcaaggaagagacgcgaccatggggatgacagctcggacgaagaggacaaggagcgggtcgcgctggtggtgcacccgggcacggcacggctggggagcccggacgaggagttcttccacaaggtccggacaattcggcagactattgtcaaactggggaataaagtccaggagttggagaaacagcaggtcaccatcctggccacgccccttcccgaggagagcatgaagcaggagctgcagaacctgcgcgatgagatcaaacagctggggagggagatccgcctgcagctgaaggccatagagccccagaaggaggaagctgatgagaactataactccgtcaacacaagaatgagaa

SEQ ID NO: 188480 - DNA, 842 bp, Homo sapiens
  Payload ID: 17083
  Gene Symbol: STX4
  Gene Name: syntaxin 4
  ENST ID: ENST00000460668
  CDS Start-End: 260-454
ggaggggcggggctgaggctgcgggagctggagcggggaagaaaagggaattccaacctgtggaaccttggggggtccccggggtcggcgccttcccattgactgtgggcggtgcaagggacggagcctctggcggctcgtgggggtgttggggtccgcagggggagggaggggagtgtcagagtgtgagcggggtacgggaattccaaatttgagggcctcccggctctggcgccggggagggagagctcaggccgccatgcgggacaggacccacgagctgagacagggggatgacagctcggacgaagaggacaaggagcgggtcgcgctggtggtgcacccgggcacggcacggctggggagcccggacgaggagttcttccacaagccctctcggtcaccctccccaggtccggacaattcggcagactattgtcaaactggggaataaagtccaggagttggagaaacagcaggtcaccatcctggccacgccccttcccgaggagagcatgaagcaggagctgcagaacctgcgcgatgagatcaaacagctggggagggagatccgcctgcagctgaaggccatagagccccagaaggaggaagctgatgagaactataactccgtcaacacaagaatgagaaaaacccagcatggggtcctgtcccagcaattcgtggagctcatcaacaagtgcaattcaatgcagtccgaataccgggagaagaacgtggagcggattcggaggcagctgaagatcaccaatgctgggatggtgtctgatgaggagttggagcagatgctggacagtgggcaaagcgaggtgtttgtgtcc

SEQ ID NO: 188481 - DNA, 983 bp, Homo sapiens
  Payload ID: 17083
  Gene Symbol: STX4
  Gene Name: syntaxin 4
  ENST ID: ENST00000496977
  CDS Start-End: 260-454
ggaggggcggggctgaggctgcgggagctggagcggggaagaaaagggaattccaacctgtggaaccttggggggtccccggggtcggcgccttcccattgactgtgggcggtgcaagggacggagcctctggcggctcgtgggggtgttggggtccgcagggggagggaggggagtgtcagagtgtgagcggggtacgggaattccaaatttgagggcctcccggctctggcgccggggagggagagctcaggccgccatgcgggacaggacccacgagctgagacagggggatgacagctcggacgaagaggacaaggagcgggtcgcgctggtggtgcacccgggcacggcacggctggggagcccggacgaggagttcttccacaagccctctcggtcaccctccccaggtccggacaattcggcagactattgtcaaactggggaataaagtccaggagttggagaaacagcaggtcaccatcctggccacgccccttcccgaggagagcatgaagcaggagctgcagaacctgcgcgatgagatcaaacagctggggagggagatccgcctgcagctgaaggccatagagccccagaaggaggaagctgatgagaactataactccgtcaacacaagaatgagaaaaacccagcatggggtcctgtcccagcaattcgtggagctcatcaacaagtgcaattcaatgcagtccgaataccgggagaagaacgtggagcggattcggaggcagctgaagatcaccaatgctgggatggtgtctgatgaggagttggagcagatgctggacagtgggcaaagcgaggtgtttgtgtccaatatcctgaaggacacgcaggtgactcgacaggccttaaatgagatctcggcccggcacagtgagatccagcagcttgaacgcagtattcgtgagctgcacgacatattcacttttctggctaccgaagtggagatgcag

SEQ ID NO: 188482 - DNA, 649 bp, Homo sapiens
  Payload ID: 17083
  Gene Symbol: STX4
  Gene Name: syntaxin 4
  ENST ID: ENST00000613541
  CDS Start-End: 1-346
catgcgggacaggacccacgagctgagacagggggatgacagctcggacgaagaggacaaggagcgggtcgcgctggtggtgcacccgggcacggcacggctggggagcccggacgaggagttcttccacaaggtccggacaattcggcagactattgtcaaactggggaataaagtccaggagttggagaaacagcaggtcaccatcctggccacgccccttcccgaggagagcatgaagcaggagctgcagaacctgcgcgatgagatcaaacagctggggagggagatccgcctgcagctgaagggtgagctcctgggacctcagacagatccttccctctgatcctgccctgttgttggtatatctggggagtgtgtggcccagagaagccagtgatatatccaggtcacacagcaggcctgggtctagcatctgtctcctggcctccaggccattgtactctccacagcacaagtccgcctctcaggttcttttatttacaatgaaaccatttacttacacagttatcgctgcccactgggcattctttgggcagggagatggagttttgttaggtggcctctgcatacctatgggaactcagtgatgtaatgcaaagaaaaataaacttactttctcctctta

SEQ ID NO: 188483 - DNA, 1794 bp, Homo sapiens
  Payload ID: 17084
  Gene Symbol: STX5
  Gene Name: syntaxin 5
  Uniprot ID: Q13190
  ENST ID: ENST00000294179
  CDS Start-End: 155-1222
gggggtggggttacgtgtaggtgacgtggccgcttccagtctttggtcgggtttcggcggcttcagtgctcggggaggaggcagtgacggccggtgagattggaagtggcggcggcggcaggcggcagaggggagtccgaggttatgcgtctcaatgatcccgcggaaacgctacgggtctaagaacacggatcagggtgtctacctgggtctctcaaagacacaggtcctgtcccctgcaactgctggcagtagcagcagcgacatcgcccctctgccccccccagtgaccctcgtccctccccctcccgacaccatgtcctgccgggatcggacccaggagtttctgtctgcctgcaagtcgctgcagacccgtcagaatggaatccagacaaataagccagctttgcgtgctgtccgacaacgcagtgaattcaccctcatggccaagcgcattgggaaagaccttagcaacacatttgccaagctggagaagctgacaatcttggcaaagcgcaagtccctctttgatgataaagcagtggaaattgaagagctaacatatatcatcaaacaggacatcaatagcctcaacaaacaaattgctcagctccaggatttcgtgagagccaagggcagccagagtggccggcacctgcagacccactccaacaccattgtggtctccttgcagtcgaaactggcttctatgtccaatgacttcaaatcggttttagaagtgaggacagagaacctgaagcagcagaggagccggagagagcagttctcccgggcacctgtgtcagccctgccccttgcccctaaccacctgggcggtggtgctgtggttctgggggcagagtcccatgcctccaaggatgtcgccatcgacatgatggactctcggaccagccagcagctgcagctcattgacgagcaggattcctacatccagagtcgggcagacaccatgcagaacattgagtcgacaattgttgagttgggctccatctttcagcagttggcacacatggttaaggaacaggaggaaaccattcagaggatcgacgagaacgtgctaggagcccagctggacgttgaggccgcccattcagagatcctcaagtacttccagtctgtcacctccaaccggtggctcatggtcaaaatcttcctcatcctcattgtcttcttcatcatctttgtggtcttccttgcttgaaccctctctactctgaggcactctgttggggtttgggaccctcctgggaaggcaagtggccagtgctgccactgagcctgtgcagggtacttgggagaaaggccctgtttccctggaactgctaagaatgaccactgcccctgatcccccaccccttgcctctggccaccctgtcctccccccaccaccctcaggcctatgaaacacacagggttctagatttgaactctgctgtgaagtgactggaagggagcagaggccagctgggggccagtgggggaggttgtttccactaggagatttttataaaccctctccagcctctcccaaaggaagcgttggcagcaaagggagatgatgcccttacccaccttcctgtgagtgaagagaggaagcagccccagggaccaattttcccaattgacctctttcttcctctttcaccatgtgaggcagggagccctgagcccttcagctgcctgcacaacccctgacattggctgctggtgactcaatctgccaaatgtgctgcagctcgttttctcccaattacagcaagactgtcagcctca

SEQ ID NO: 188484 - DNA, 1785 bp, Homo sapiens
  Payload ID: 17084
  Gene Symbol: STX5
  Gene Name: syntaxin 5
  Uniprot ID: Q13190
  ENST ID: ENST00000377897
  CDS Start-End: 108-1073
cgggtttcggcggcttcagtgctcggggaggaggcagtgacggccggtgagattggaagtggcggcggcggcaggcggcagaggggagtccgaggttatgcgtctcaatgatcccgcggaaacgctacgggtctaagaacacggatcagggtgtctacctgggtctctcaaagacacaggtcctgtcccctgcaactgctggcagtagcagcagcgacatcgcccctctgccccccccagtgaccctcgtccctccccctcccgacaccatgtcctgccgggatcggacccaggagtttctgtctgcctgcaagtcgctgcagacccgtcagaatggaatccagacaaataagccagctttgcgtgctgtccgacaacgcagtgaattcaccctcatggccaagcgcattgggaaagaccttagcaacacatttgccaagctggagaagctgacaatcttggcaaagcgcaagtccctctttgatgataaagcagtggaaattgaagagctaacatatatcatcaaacaggacatcaatagcctcaacaaacaaattgctcagctccaggatttcgtgagagccaagggcagccagagtggccggcacctgcagacccactccaacaccattgtggtctccttgcagtcgaaactggcttctatgtccaatgacttcaaatcggttttagaagtgaggacagagaacctgaagcagcagaggagccggagagagcagttctcccgggcacctgtgtcagccctgccccttgcccctaaccacctgggcggtggtgctgtggttctgggggcagagtcccatgcctccaaggatgtcgccatcgacatgatggactctcggaccagccagcagctgcagctcattgacgagcaggattcctacatccagagtcgggcagacaccatgcagaacattgagtcgacaattgttgagttgggctccatctttcagcagttggcacacatggttaaggaacaggaggaaaccattcagagtgtccttttgtttcctcttctcccggccttgtccccaggatcgacgagaacgtgctaggagcccagctggacgttgaggccgcccattcagagatcctcaagtacttccagtctgtcacctccaaccggtggctcatggtcaaaatcttcctcatcctcattgtcttcttcatcatctttgtggtcttccttgcttgaaccctctctactctgaggcactctgttggggtttgggaccctcctgggaaggcaagtggccagtgctgccactgagcctgtgcagggtacttgggagaaaggccctgtttccctggaactgctaagaatgaccactgcccctgatcccccaccccttgcctctggccaccctgtcctccccccaccaccctcaggcctatgaaacacacagggttctagatttgaactctgctgtgaagtgactggaagggagcagaggccagctgggggccagtgggggaggttgtttccactaggagatttttataaaccctctccagcctctcccaaaggaagcgttggcagcaaagggagatgatgcccttacccaccttcctgtgagtgaagagaggaagcagccccagggaccaattttcccaattgacctctttcttcctctttcaccatgtgaggcagggagccctgagcccttcagctgcctgcacaacccctgacattggctgctggtgactcaatctgccaaatgtgctgcagctcgttttctcccaattacagcaagactgtcagcctca

SEQ ID NO: 188485 - DNA, 1568 bp, Homo sapiens
  Payload ID: 17084
  Gene Symbol: STX5
  Gene Name: syntaxin 5
  Uniprot ID: Q13190
  ENST ID: ENST00000394690
  CDS Start-End: 119-1024
tcgggtttcggcggcttcagtgctcggggaggaggcagtgacggccggtgagattggaagtggcggcggcggcaggcggcagaggggagtgaccctcgtccctccccctcccgacaccatgtcctgccgggatcggacccaggagtttctgtctgcctgcaagtcgctgcagacccgtcagaatggaatccagacaaataagccagctttgcgtgctgtccgacaacgcagtgaattcaccctcatggccaagcgcattgggaaagaccttagcaacacatttgccaagctggagaagctgacaatcttggcaaagcgcaagtccctctttgatgataaagcagtggaaattgaagagctaacatatatcatcaaacaggacatcaatagcctcaacaaacaaattgctcagctccaggatttcgtgagagccaagggcagccagagtggccggcacctgcagacccactccaacaccattgtggtctccttgcagtcgaaactggcttctatgtccaatgacttcaaatcggttttagaagtgaggacagagaacctgaagcagcagaggagccggagagagcagttctcccgggcacctgtgtcagccctgccccttgcccctaaccacctgggcggtggtgctgtggttctgggggcagagtcccatgcctccaaggatgtcgccatcgacatgatggactctcggaccagccagcagctgcagctcattgacgagcaggattcctacatccagagtcgggcagacaccatgcagaacattgagtcgacaattgttgagttgggctccatctttcagcagttggcacacatggttaaggaacaggaggaaaccattcagaggatcgacgagaacgtgctaggagcccagctggacgttgaggccgcccattcagagatcctcaagtacttccagtctgtcacctccaaccggtggctcatggtcaaaatcttcctcatcctcattgtcttcttcatcatctttgtggtcttccttgcttgaaccctctctactctgaggcactctgttggggtttgggaccctcctgggaaggcaagtggccagtgctgccactgagcctgtgcagggtacttgggagaaaggccctgtttccctggaactgctaagaatgaccactgcccctgatcccccaccccttgcctctggccaccctgtcctccccccaccaccctcaggcctatgaaacacacagggttctagatttgaactctgctgtgaagtgactggaagggagcagaggccagctgggggccagtgggggaggttgtttccactaggagatttttataaaccctctccagcctctcccaaaggaagcgttggcagcaaagggagatgatgcccttacccaccttcctgtgagtgaagagaggaagcagccccagggaccaattttcccaattgacctctttcttcctctttcaccatgtgaggcagggagccctgagcccttcagctgcctgcacaacccctgacattggctgctggtgactcaatctgccaaatgtgctgcagctcgttttct

SEQ ID NO: 188486 - DNA, 723 bp, Homo sapiens
  Payload ID: 17084
  Gene Symbol: STX5
  Gene Name: syntaxin 5
  ENST ID: ENST00000431400
  CDS Start-End: 1-476
tcaacaaacaaattgctcagctccaggatttcgtgagagccaagggcagccagagtggccggcacctgcagacccactccaacaccattgtggtctccttgcagtcgaaactggcttctatgtccaatgacttcaaatcggttttagaagtgaggacagagaacctgaagcagcagaggagccggagagagcagttctcccgggcacctgtgtcagccctgccccttgcccctaaccacctgggcggtggtgctgtggttctgggggcagagtcccatgcctccaaggatgtcgccatcgacatgatggactctcggaccagccagcagctgcagctcattgacgagcaggattcctacatccagagtcgggcagacaccatgcagaacattgagtcgacaattgttgagttgggctccatctttcagcagttggcacacatggttaaggaacaggaggaaaccattcagaggtgagatacactctctcgccccaaacagaggagctttctcttccccgtggattggcatcttaaagtccccagggactgcttgatgccttttggaagatagagtgaattctgcccacccatgggacccagttcacctgcttccatccacccaacaagtttttattgagcacctgttcatgtgaggcactgttccaggtgcgggagatacagtggcaagtagaacagtaaagtctgtctggagctgctttgta

SEQ ID NO: 188487 - DNA, 1719 bp, Homo sapiens
  Payload ID: 17084
  Gene Symbol: STX5
  Gene Name: syntaxin 5
  ENST ID: ENST00000491231
  CDS Start-End: 109-861
tcgggtttcggcggcttcagtgctcggggaggaggcagtgacggccggtgagattggaagtggcggcggcggcaggcggcagaggggagtccgaggttatgcgtctcaatgatcccgcggaaacgctacgggtctaagaacacggatcagggtgtctacctgggtctctcaaagacacaggtcctgtcccctgcaactgctggcagtagcagcagcgacatcgcccctctgccccccccagtgaccctcgtccctccccctcccgacaccatgtcctgccgggatcggacccaggagtttctgtctgcctgcaagtcgctgcagacccgtcagaatggaatccagacaaataagccagctttgcgtgctgtccgacaacgcagtgaattcaccctcatggccaagcgcattgggaaagaccttagcaacacatttgccaagctggagaagctgacaatcttggcaaagcgcaagtccctctttgatgataaagcagtggaaattgaagagctaacatatatcatcaaacaggacatcaatagcctcaacaaacaaattgctcagctccaggatttcgtgagagccaagggcagccagagtggccggcacctgcagacccactccaacaccattgtggtctccttgcagtcgaaactggcttctatgtccaatgacttcaaatcggttttagaagtgaggacagagaacctgaagcagcagaggagccggagagagcagttctcccgggcacctgtgtcagccctgccccttgcccctaaccacctgggtaagtcacaggcggtggtgctgtggttctgggggcagagtcccatgcctccaaggatgtcgccatcgacatgatggactctcggaccagccagcagctgcagctcattgacgagcaggattcctacatccagagtcgggcagacaccatgcagaacattgagtcgacaattgttgagttgggctccatctttcagcagttggcacacatggttaaggaacaggaggaaaccattcagaggatcgacgagaacgtgctaggagcccagctggacgttgaggccgcccattcagagatcctcaagtacttccagtctgtcacctccaaccggtggctcatggtcaaaatcttcctcatcctcattgtcttcttcatcatctttgtggtcttccttgcttgaaccctctctactctgaggcactctgttggggtttgggaccctcctgggaaggcaagtggccagtgctgccactgagcctgtgcagggtacttgggagaaaggccctgtttccctggaactgctaagaatgaccactgcccctgatcccccaccccttgcctctggccaccctgtcctccccccaccaccctcaggcctatgaaacacacagggttctagatttgaactctgctgtgaagtgactggaagggagcagaggccagctgggggccagtgggggaggttgtttccactaggagatttttataaaccctctccagcctctcccaaaggaagcgttggcagcaaagggagatgatgcccttacccaccttcctgtgagtgaagagaggaagcagccccagggaccaattttcccaattgacctctttcttcctctttcaccatgtgaggcagggagccctgagcccttcagctgcctgcacaacccctgacattggctgctggtgactcaatctgccaaatgtgctgc

SEQ ID NO: 188488 - DNA, 1627 bp, Homo sapiens
  Payload ID: 17084
  Gene Symbol: STX5
  Gene Name: syntaxin 5
  ENST ID: ENST00000492066
  CDS Start-End: 98-343
cggcttcagtgctcggggaggaggcagtgacggccggtgagattggaagtggcggcggcggcaggcggcagaggggagtccgaggttatgcgtctcaatgatcccgcggaaacgctacgggtctaagaacacggatcagggtgtctacctgggtctctcaaagacacaggtcctgtcccctgcaactgctggcagtagcagcagcgacatcgcccctctgccccccccagtgaccctcgtccctccccctcccgacaccatgtcctgccgggatcggacccaggagtttctgtctgcctgcaagtcgctgcagacccgtcaggcgcattgggaaagaccttagcaacacatttgccaagctggagaagctgacaatcttggcaaagcgcaagtccctctttgatgataaagcagtggaaattgaagagctaacatatatcatcaaacaggacatcaatagcctcaacaaacaaattgctcagctccaggatttcgtgagagccaagggcagccagagtggccggcacctgcagacccactccaacaccattgtggtctccttgcagtcgaaactggcttctatgtccaatgacttcaaatcggttttagaagtgaggacagagaacctgaagcagcagaggagccggagagagcagttctcccgggcacctgtgtcagccctgccccttgcccctaaccacctgggcggtggtgctgtggttctgggggcagagtcccatgcctccaaggatgtcgccatcgacatgatggactctcggaccagccagcagctgcagctcattgacgagcaggattcctacatccagagtcgggcagacaccatgcagaacattgagtcgacaattgttgagttgggctccatctttcagcagttggcacacatggttaaggaacaggaggaaaccattcagaggatcgacgagaacgtgctaggagcccagctggacgttgaggccgcccattcagagatcctcaagtacttccagtctgtcacctccaaccggtggctcatggtcaaaatcttcctcatcctcattgtcttcttcatcatctttgtggtcttccttgcttgaaccctctctactctgaggcactctgttggggtttgggaccctcctgggaaggcaagtggccagtgctgccactgagcctgtgcagggtacttgggagaaaggccctgtttccctggaactgctaagaatgaccactgcccctgatcccccaccccttgcctctggccaccctgtcctccccccaccaccctcaggcctatgaaacacacagggttctagatttgaactctgctgtgaagtgactggaagggagcagaggccagctgggggccagtgggggaggttgtttccactaggagatttttataaaccctctccagcctctcccaaaggaagcgttggcagcaaagggagatgatgcccttacccaccttcctgtgagtgaagagaggaagcagccccagggaccaattttcccaattgacctctttcttcctctttcaccatgtgaggcagggagccctgagcccttcagctgcctgcacaacccctgacattggctgctggtgactcaatctgccaaatgtgctgca

SEQ ID NO: 188489 - DNA, 604 bp, Homo sapiens
  Payload ID: 17084
  Gene Symbol: STX5
  Gene Name: syntaxin 5
  ENST ID: ENST00000488303
  CDS Start-End: 1-202
agtctttggtcgggtttcggcggcttcagtgctcggggaggaggcagtgacggccggtgagattggaagtggcggcggcggcaggcggcagaggggagtgaccctcgtccctccccctcccgacaccatgtcctgccgggatcggacccaggagtttctgtctgcctgcaagtcgctgcagacccgtcaggctggagtgtagtggtgtgatgatagctcacttgcagtcttgaactcctagactcaagggatcctctttcctcagcctcctgagcagctgggactacatggatgcaccactcagctaattttaaaattttttcgtacaggcagtgtctcactatgttgcccagaatggaatccagacaaataagccagctttgcgtgctgtccgacaacgcagtgaattcaccctcatggccaagcgcattgggaaagaccttagcaacacatttgccaagctggagaagctgacaatcttggcaaagcgcaagtccctctttgatgataaagcagtggaaattgaagagctaacatatatcatcaaacaggacatcaatagcctcaacaaacaaattgctcagctccaggatttcgtgagagc

SEQ ID NO: 188490 - DNA, 560 bp, Homo sapiens
  Payload ID: 17084
  Gene Symbol: STX5
  Gene Name: syntaxin 5
  ENST ID: ENST00000486437
  CDS Start-End: 118-354
agtctttggtcgggtttcggcggcttcagtgctcggggaggaggcagtgacggccggtgagattggaagtggcggcggcggcaggcggcagaggggagtccgaggttatgcgtctcaatgatcccgcggaaacgctacgggtctaagaacacggatcagggtgtctacctgggtctctcaaagacacaggtcctgtcccctgcaactgctggcagtagcagcagcgacatcgcccctctgccccccccagtgaccctcgtccctccccctcccgacaccatgtcctgccgggatcggacccaggagtttctgtctgcctgcaagtcgctgcagacccgtcaggctggagtgtagtggtgtgatgatagctcacttgcagtcttgaactcctagactcaagggatcctctttcctcagcctcctgagcagctgggactacatggatgcaccactcagctaattttaaaattttttcgtacaggcagtgtctcactatgttgcccagaatggaatccagacaaataagccagctttgcgtgctgtccgacaacgcagtgaat

SEQ ID NO: 188491 - DNA, 4851 bp, Homo sapiens
  Payload ID: 17085
  Gene Symbol: STX6
  Gene Name: syntaxin 6
  Uniprot ID: O43752
  ENST ID: ENST00000258301
  CDS Start-End: 239-1006
cgggactggaggctgccgagggggccggcgcccgagtccgggattcggccagtggtgctgagcgagtgctggaccagcggccgtcctgtgcacctggcctgtgcgcgtgcccgctgctcggcttcacccagactaaggcgcgggcagctgcgggaacaggcggggtgggcggagggagaccgggaggcacgggcgccctgtgcgcggaggaggtgaaggcggccggggccgggacgccatgtccatggaggaccccttctttgtggtgaaaggagaggtacagaaagcagtcaacactgcccagggattgtttcagagatggacagagctcctccaggacccctccacagcaacaagggaagaaatcgactggaccaccaacgagctgagaaataacctccggagcatagagtgggatctagaggaccttgatgaaaccatcagcatagttgaagcaaatcctagaaaatttaaccttgatgcaactgaattgagtataagaaaagccttcattacaagtactcggcaagttgtcagggacatgaaagatcagatgtcaacttcatctgtgcaggcattagctgaaagaaaaaatagacaggcactgctgggagacagtggcagccagaactggagcactggaacaacagataaatatgggcgtctggaccgagagctccagagagccaattctcatttcattgaggagcagcaggcacagcagcagttgatcgtggaacagcaggatgagcagttggagctggtctctggcagcatcggggtgctgaagaacatgtcccagcgcatcggaggggagctggaggaacaggcagttatgttggaagatttctctcacgaattggagagcactcagtcccggctggacaatgtgatgaagaaacttgcaaaagtatctcatatgaccagtgatcggcgccaatggtgtgccatagccatcctctttgcagtcctgttggttgtgctcatcctcttcttagtgctgtgacggcggggcctctgggtgcgagttcctcctgcatatgaaccgaggggaggaggagaagctgagcacgtgtgacattgccgtctactcacattcctatcctggaaacatactgctgcactgacttttctccgtgtgaccccacaattgacatggctcctccatcccagcgctggaagggccagtgggaagaggaaatagatgtctgcactcctggctgcagctggacaacagaagccccatgccgcctgtccagttcggaggagaactagctgctgccttgccttccgggacctcgtttgctgaggagggacttacagactccactggtgttttgctgttgctcattccatgcatctttggcagctcttttcttctgctcagacccttccccgtgctcagacagtgcaccgctgtcccatctaaagaaacctgtcaggaatacgagcttctgggtatgtttcgtttcccattgctgtagcatttcttatcccctgagagctgatgattattgaggacagaaggctcagaaacagtttgtgacagaaaatgcagtgtttcatttttcagggataaatgctaagataaaattgcttttccaggtcatttttttttgtggtaagaataactaatggaaaataatgaaacaccctggggtttgggggtgctaacaacttgtggctttaactgacaggagcaattaaaaagagcaagagggttctgcattggcatagcttagggaagggttaatgatgtcgccacaggtcagctcctgatccttgccgacttgatgttgctgtaccagggcttcctccccagaggtgcagcttgcgttttgagggtgattgctacatatgttgttgctaaacagctcagtaacacacttgaatgaatttggataccagattgtcctcattacagttcttttactcttagggcactctacactgggggttggggttgggagtggttagtacatttattacatttattaagaaacgtaatgacataaaaggttagctctgggccagacttctcttactctgtgggtaatggcaaggatgtgtaggtaaacttggttcttttttttccctaagatgacagcttgattttatcatctgcagtcaaataactgagccaatccaaatttaaatgatagatgctttaattgagtttaagtagctgaaactgctgagacactaaactttaaccttctgatgactttttaaaatgcctcaaatgtgcacatgtatataggatatttttataacttccctgatgaataatctgatattaaagtagtatttggacccagagccagaactcggtggtggaggctgctggtctctcctcaccaccttcttttgcacttggaaagaacagcaacatctggatagagttctagctttgacttctcatttccttgtctttttgggtgcattcctcagcacactttttttttaaacctttttgttttgttttgtttgtatttcatgtggttttatttgggggttttggttttttcacccttttttgtgatttgcaatgatgtgcttgcccagctaacttttgaattgcactttttaataaatattcttaacaatttttgaagaaggatattttatctcatttgagatcatggtaggttaagaaaatatgcctgttgatgaaagctaaaagcaaatttatgaaactaaaagggtgattgacatccatgtttacactccgctctaatgtttgatatataaataagttattttcaaattaggaaaaaacagtgagtattacaaagggcttcagatgtttagagtactaggttatttatgttttacaaagtttgaatcttctataaactaagaaaggggatgatccttagatttgcattaaaatatagaagtcttttaaagtaaatgtgaaccttgtctaagtactgtaatccacacaacacattataagaagcaaaccagcatcttaaggaattataaaattaccctatttaaaagccatgctattgttctgctattaccagatttattgtgccacacaaaaggatcatgtgtgtcagcaggggccgtttggaacaaacctagtcattaatgagtaagatactcctgttagttcagggaccaagttttatgacccagaggcttaatgatgtttggatatatttcaaatcggcgtgcttacctcactgatttaaattattttctaaatagtggccattgtagacctgactcaggctgaagctaaatagagaacaatttagaaagttaactaacaatacagtgcattctacccgtagggccaccatgcccttctgcccctggctgatttgatcctgtgtctgatcccattgcaccctgactgggcagtccctacagaaccagtgttaatttgaagggcctccactcaggctccaaatgtggcagccaaagagaacaatccagggaacctacatttatttttaaggacaaatatttcctcctcagtggtcctaatgttcagggctttagagggaacccaggtggtctcttcaccctgtgtcctagaatgggagagtaagtagacagtggtgataaccccacactgcttataagtgcatctttatagtatttggggctttcctacccctttagccttctgtacctagtaccatattccagttttaaagaactggcagaatgtgatggataacagaggaagagctcaatttatgtttattggaagaacattttacttaaatgatttgaggggtgggagggagtgaactactgagtttgccagagtgaaaatccatctgaaaaactcagctacctttagtttttagtcctcatttttggtcttgtctctgcggactgtgaagaatcacaatgctctatatgccctggactgtgtggcaaatgcaggttgcagcgtgtgtgttacatgaggatcttccacaatttcagaatgcacgccagagctgaagggggaaacttggtaacttgcccattattctctgcttttagccagagttaaacagactgatgggtctggtagccaacaacttggcaacttccactccttctcacctcgtgagattaagggctgtgaaaagaaatctagtctaactccaacagaaatctgtctctgttaagtgttttaccttctgtaagtagagatggtagagccaagatttttcttttggtaatttccctgtctataaagtgagaccaaagggatatctgttccctgttacctttttggagaattcataacatttgaagatcaaaaaattgaatgataaatatgaatggcttttcaattctgtggactttgtaccatttggcttcaccttgtactgcaagatgaatttgtaaacaaaacaaaattggactgtctggaaagctaaagttctgaaatatggaatgtactgcctctaatttttctttgtcttcctctcactggcatttttttctctcccaggtttcttaagaataatgttttttaaaggaggctttttgcccatcaagaataaaaagaaataaaaccaaagggttaccggacttaagcccccgcagtcactgtgcgccatccctgagcaaagtccgcccctgaggacagtgcccctgccccagtgacaggccttactcctcccagggcctttgcttctaatagggggtggtctttcttttctttctctcctttttttttttttgattaaaaaataaaaccaaaccagaatttgctgaaagcaggtacctttcagtagctccgatcagagtaactcagcttagagatactgttactcaggacaacagtatgtacaaaagtctccggaaaaggaaaataaaacaacctgaaaagaa
